United States Patent Application Publication US 2008/0114160 A1 - sequence listing, part 9

SEQ ID NO: 4845 - DNA, 11201 bp, Oryza sativa
cggtaccctgaaatttcctggttgttgtctttcaatccactatgcttctcacaaactgcatgcaacaaaaatcattgtttattgcatagtaacattaaatatacaaaacaaccagcactgaacaactcgaagtacatttagtggcgtgagtttacttctattttgttacaacgtccatttcaccctatcaacattcagttagttcaggctgttcacgtttttctttcaataaaggttcatcagtacaaatgtggcagtacaggcaagatggaaaaatgaatgccaactacagtctacagtaccaagcgatgttgcaatagctaaaatttgaaatctaggcatgggtattcaatgaacatccccatcacagtaacatgacaatttgcaagagaaactgcattaaattgtagtatcgaaatggttaacagaactagtatatatgtagtgaaaatggcggtacaattaaaacatatgtggcaaagcaatagcaggtgatatttatagccacagatttggtaaaccggaataccatgaatgcaagtttatcagaggaaagagtgccttacattgttgatgatcagcagctaagctctccgtggtttccccatctatctcgcagctgaatccatcctcaatacaatcctgagagaggactaacgcagtaatttcttcgtcgatcatcttactaaccatatcacccaccttgtcatcatcatcagaggacaccgcggatttatcctcactggtgttagccatgttcttcagcaccacattgcgctgcttcgaagttacatgatccattgcatcattcccttcaccacgggattcatatgatactgcactctttctgacatttgacaaatcagctgattcaagaggcaccagctgcaggacattgccaacaatctcggcacattgagctgccaagccagccatggcgccgatcgggtcctcctccaatggcttctcatcgaagagctcgatcacagggccctcctcggacacgaagaccagatcgcgattgagatttgccatgccggcgtctctcctgtggccacagtccacgtcgcacgccgccggcgcggggaacaagaacggcggcgagatgaagccgctctcgagcgcgacgccgcagcacgcgcatgccaggtcccgctcgccgagctcgctccgcctcatccacgacgacgccgccgccgccgcggaggcggacacgcagtcctcgcacatgtccccggcgtccgcgagccgccggtgcgcgcggcagtagccgaggcgcgacacctcggcggcgtgcgagtcgcacagcacgcggcacaggggctccgcgccggcgccctgcccctcgccgcggggctcgaagaggctgtccacgccgaggcgggagcagagggcgcacgcggcgccaggccgaagaaggcggcgaacctcgatatgaggtaggagaagacgccattggcgagaggagagctatcaggatccactcgaggagcgcgtaggcgagcacccgcgcgacccggttgctcctcttgcacagcgccgcggtgacgacgacggcgcccgccgccatgggcgcctccgagaccatctccccagctctcggtgttctcgccagccagggaacaaaatgcgatcaaaagatgccaaattcgcccgcccagaattcgccgtgtaatcgaagaaaagcacagaaattccttccttttggcgctaaatccctcggcgcccgtcgccaatcggattgaaacaaagcaaagaacacgatccaaccacgatttctcctagaacaacaagccactcccacaaactgccgatttcttctcgttcgatgaagagaaacagcaaataaaaacaaaaaacaaagccttgctcctccacttgctccttctaaaaagctgaacaagaacctcctcaagactatcaatccggattgcaacaaagaagactttttttacagatggaatctgggattgcgaacgagatcagagaacctatagagattgaaatctttgataacgcggggaagaagtgggactagtgacagtgacaggatgatatcatctaagtattcacaagaacagtgagaagagggggagaagaggaggaggaaggaaaggggagtttggtgaaaagctcctctataggcagagaaagccggaagccttggaagcagaaaaatatcaccagtggaaaaagaaaaataaaagaaaaacaaagctctgtgtgtgtgtgggtggattgttgagctactaatccgcattattaagccctaatggcgcgtaatcaagccgccctagacgagcacacagtcgaacgttgggggtgacgccataattagctggtaattgctctgtttggaaaaggttaatgacactcttttgactgtgctcgtgacaggattaaggcggtgaattcagacattactacgcagcaaagaaaaaaatgacccgttacaccgtacacgcagtactgcttttcatttttttttcttctcttatcttttcctcacggccacaggtacacagattcagattctgctccgtcgcattcggacggcgacgtcggcgaagtgagtaaccgaccagtaaaaaagaaagaaagaactaaacgaaaactataggccgtttcgtagccgaagacgaccggatcagtggatcgtccgttgttctagcgctgccctgacctgaaggagtcgcgatccggaagaacgtggcggcgattaagggggaaatcctgccgcatttgaccgggctggagcaggaggggcttggacaagccactcctttccttgtgcgacttttggtggtgaggggcgtgcggatcagtggatgggttctgaattctgaaactgtctgaacattccgccagtcttatagatttatcttcagtattgctaaatctctgtcgccacattttgggttcgatttcagtcggatagtctgacccgcatgatgcgcttgcgagcgtcgtgggtgactcacgtccgtagatcacggccggcatgggcagagatatccctcgcttctcttttttagtttaactttttatatatttacacaaatttatacaatagttacattgcacttacacaccacttacatatataattttgtagtttacatatgtaattttaggacttacatatgtaattttgagacttacattataaatgcactaaaattacatatgtactttagagatttacaatgtaaatatatgccgactatttttttttgatgaaaaatatggcgccataaatatagtcactccctttatctttttgtttatgcttcgcttatcagcaaaaaattaaacttcgatcttaaatttaaagaattttggtttttttttcagtcgtagtttattttttttagcattttttttagatcgttaagattatatatatatatattttatttataaaatttttttgtttgtgaatatgtcatttcgcctttttctcaaatcagccaatcgatgtggctgttaagccacgtacatgcatcatgcaagtgtttttggtgggtggattggctgagaactttaggccaagctgaattttgtgctgaaatagcgcaagtgtgcttgaattgaacccactctgaatgataagagttcgtcccggaaagaatgcatgaacattataggatttattagttaattctcaccaaaaccttctgtttcaaagaaggcgttcagccctcaacagctcaatataaaaattttgggttatcaattgatagataatctattttttataactattaaccggtacgaacgaatgaatttaatattaaaaattatatataaaaagcttttgtaaaaaaaaaacatcgcttctaagaggcgtacgaacaaaatccagaatctacaagacatacccttggttaactctccaggtgagcttgcactgaaacgaacaattctcacgcacattcagctcaagcaaaaaatcacacttgggtaatttgggtacaaaggattcaatgttgagtaattcagtgatgagttgcgacaggtcaggtggggcgcgacatttgaatgcattggatcaagcaagcacgtggacgaacggacaaacggaaaatcaaacagtgaagagctggaatcaagtcatctgctgttggcagagacaaaaacagcggggatttcagaacccaagaagctgaactgccctataaaacacacacgtggtagccatttgtgtttgctgcaagttcggcaatctagaggcaagtttggtctgtcttgccgtattgcacgttattttagttacagacgaaaaagaattatttcttgttgcagtttgcagtatatgctatattttaccgtcaaagttttttttttttaactatcactaccaccaccaccattgacatgtgggaccatgaggtacgctacagcagcaccaccattgatatatggggtcatgaggtacactacatgagatcattgtactaagtaacccctaaaaaacaggtggtctacgtttttctttttaatatgaagaatcttatttgaaccaggtagagataagtattccctttttaaccatgagaactacttttttttctatcttctacaatccgttgcaacacacagttatttggctagttcttaaaatatagctaacaaaatgcaccatagagccaaacttgtccattataacttcgtaagtgaaataaaaagggcatatttatgccaaaatatgtcattttgtacatccaaacagtcttcagaatatattccgagcactggttctactataagatattagaaaaaaacatataaaattatagtataatattataaaacacttatataaattttacacataagatgcatttaatcaaaacatttagaaagatattgattctaaaaaaattaaaaataatgatttcaaatatgccccaaatcatatatttttataactgataagcatcttacgatagtaaatccatacgataaaatgtcccgctacaattggcatgtggggagcttcctgtaatttattttaaaatcaaaagcttcctcaaacaacataatccaaaaaaaaaaacgaaggcaaaagcttgtttttttagcttctccaaattccagcccaccagttgcttgttataatctaaatttaaagctcttctaactggcccaatatcttgatgccagccattcctctgacatcatcataagtgagtgaatgggaatgttaatagagaattggtctaatgctatgccattaataaaatggatatttatctaaagaaataaaatggatattgaggtcccctagtatcttttgctttcggctactcatccatcggtgacaattgacgagcgcctaagtgtggctttatctgtagctttccagcgtccagctctctaaagctcatctttactttgctcgcacgtacgtattcccaataatttttttttaaaaaaaaactattaggcgtaacagggaccaaaaagaatccgcattcagattaatttagtatccctggaatttttctgtacttttcaaaacaggatgactcgagaaaaaaatatcacttcatcgaagatgtcgtgatggtgcatcattacaatgttagtgcacgcacgtgtaaagcttggaaaaaaatattaatgctactagtattattggaaacaggaaatgtacatctagaatcatgtcaggggatggtgagagtgtctgttttgttgtccaattcaacaaataacttaaaattatcagtgccaaaaaaagaaaagataattttgtttgcctataccctttcaaaatagagaagcaaatcaaacaaccataattcactaaagtttaatgagtcaatgacccaaccaaatccaatatcttcagctccagcactccagcatcaactggctttgtgatgtttataaaaggaataattaatgctagtattactgaaaacaagaaatatgtacacctagaatcatgtaaagggataatgagagtgtttgttttgttgaccaattaaactataatttagaattaacaatgccgaaaaaaactagatacttacatatcttggttgcctgtacatttccaaaactgatagcaaatcaaataaccataattaactaaaatttaatgagtcaatgacccagccaaaccaatatgtccagctccagcactccagtatcaactggatttgtgatgttcatttgttagaacttagagctaaaatcacattatttgttgaacacaatataatggttcaacacaatcaacaactaaaacaaaacggttttcttagaggaccaagtaaaatggtgaccgcagagcgagcagaacagcccagagcccactagacaaacgatttggacaaacaaattgaccatatcataggtttggatgcaaccggaccgactaccaaggacaaaaacaacggtcaagcacagaagggtagtactattaggattttaaatgagcaaataccaataaaagaggttttaacataggaataaagagtggccaatttcaggatctgatgtaattgtgcatctagtttactagttgtaaatttcattgtcagatgaaattatctatgtcactcagcatagttttttttttccaacatgtgggtcttccgccaccctcttcctccctggtgtcgcctctagcatctatggaaccgccatgccatatttaatcccctatgccgctctctcctcctcataacccaaatgtatcaccactttatcttatctgattccgatacttcaatttcaataacgagtttcactagttgccaacaccaccccaccgcccctcctcctctgccacggctaacgaggtaccaccgtaccacggccgcctcgcagctctgctatggccacctgccatccccctccccctttgcctgacctcaaaacctaacacttgagagctcaaactattacgactaaaaaaaagtgagatttgaagggagagacatccctccaaatatttttttaagaagaaaatgtgagtgcgtcgggattgaacacaagaccttagggttgaaaaccacacacctcttatcacccgcactattaaatgcatctaaaactactattccatctgtcccaaaaaaggtgaatctaagactggatgtggcatattctagtacaacgaatttggacagatgtatgttcagattcatcgtattaggaggtgtcacatccggtactaggtaggtttttttatgggacgaagagagtacgactgaagcatgaatcaaagaataaggggatgtttggttgatgcctaaccttgccataactaagtttaggcatggtggcacaaatgtggcttagaaatagttagccacaagtgtggcatacttagctctaaatttgagagcatgacatgtgggtcccaaagttaagaaagtgtggcataacacaattgcggcagcgaaccaaacacatgcctaaaaaactgtagcatgactaaagtgtggcgtggcaaagtgtggtaaccaaccaaacagcccctaaatcgcaaggttaacgatttcatgtggttttgcccaaaaatgtctgtcgaagcgatgtagagcatttccgatattagatctatcgttgttgtacgccagtttcaggatacatgtattgtgtgacttgtgtccaagtattcactcccaaaaatgaagacaagatttcctaggtaccgagaaataatgctaccaagttatagttcacagcagccgcacacctgacaactcaaaggtaatccatggaatcttcatcgcaccatgacaaattgacagttgacaaaaaatgagatgatctggcaaccttctgccgtatgagaccatttgcattatgcagttctgctcaagatgcaacaaagttacaacaggacattagtggacaatttcataactgggattgacacgcggagatcatttcaaattattctcgaaatgcacggactgcaaatcattttacatttgctacggtcaaacgtataccgaaccttacaggttttgactaacttcagtcatcactgccactcaaacgtatactcgattgatctgtttctttctgttgtcacaggacgggggaaaaacagattaaaactgcaaatggtgcatctttttatctttttgaacacatagcggttctcttatctgagtacatatgtcatgcttgaaattgtaactgtcgttcaagacctttggtcgattgcatggtgtgctgagaccactggaaaccaacagtacttacacaggaaaatacaccagttaggaaccataaaaaatatgaataatacatagtgcaaacaaaaacacattcgattgagagttgagaacatggatgtcccgaccttttgccaggtcaacaggacatttaaagtaaaccactgttcccaatatctcataataactgtacatgagccacaaatctgcctgccaaaaaaaaaaggctgcatggagcaccatcttactgaaaaatcaattcacttgcaaaacattacattaagcatgcacactgatatttagaatggcatgcttgtgtttagcacaaaaacatggaagagaagacagtcctctgacaaggggcctaacggagtgaaaacaaaagaggactgcattgctacacatcctgaaatggcacgcaaatgagatatgaagcttcatataagctaaccatgccaagcttcaattcaaaatagatacttcaaaagcatatcaatttagggactgtaatcagttatcatgagaaggcattctgatgttagtcaaactgggataccaaggcaccaattctacacattatcttcaatctgtgcaaagcaggtaatctgttggccctaatgctttctccacagtaaggcgattaactgctgcaagcacccagagatctatcaactgtgcagaccaatcactaccaagatccactacggaatttctatccgtgaactattggcaaatatataatgttttaactcaaaatacagttcacttcaaaatatcctagtcatggaaatattgttggatagtctgcgaggatggcagagcgattattattggcaaaacaaattctattcagcaatattccaaaaaacatctaactcagtaactcacaaacttgttcggattcaggcaagggttatatgcctctctaccctgttctccacttctcctcttggctctttcactagtataaatgtataatcaatgcaaaaccgtaaaaggcaactggtttaaaatggtcatctgatcgatgtcttaaagaatcaattagactcagcttacagaatgagctagaaaagaaacttttgactgctcctatcagtaccaaaacagaacaatatcattacttcatatgacaaccaaatgaaatgcagagacttcatactaactactcccaaatttctcacactcgtagagctatattatgagcatatttttataatataaaacattttctatgcaatgtcgtcaattgttcatgcttagttagtatagaaagcttaagcaattataggtatagcactgggattgggtaagaaaaaactcttgataaaagtggtttttttccaagggaagaggataaaagtggttgacaaggaaacaaaattctgttatttcacagcttataagtaataagttatggaagcaaaagaaggtgaatggatgaagctacatgaacaagttatcagaaacgtaaattaaaaataaaacgattgcaacagcaggcagctgtatagataacaatgctggaaccatatatattatgctgatgaaataattaaactaaaaggcaatatccgtagacgatgtacataggcataaataataggcatattaggctgactaaggcaaggcccaagctgagtgaggaactacaaaagcatatagcataataatctagattttaatattttatacacatggggtgaagggcggaagcacgtcaccaaaaccaccagtatgtccgcttagcgaccagccgctgcagcatcctcaacaagcaaccttagcctccggctcaacacatcaagctcatcaatcctctgtgctctccatcgccttgcaagttcactgcccccattcacattagcaccgtaggtaatgccattggccttcacctctcgcaagcactcctcaaatatatccagcacggcatttgccatgtgatgctcattgctacgtggcaccacggccttgccgttgccattctcactgtgaaccgcaatgtccccgatactggggagggcaggaagagtctcaggctgcaccttcacaatcccatcaaggcttccgtcagccgcaatcgcgacatctccatgataaccaaagtgcccactttcctgctcaagatacatcatttcctcaccaccgtgcccatccccaaatgcgccgggcgtaccggcgctaataccgccgttgtaatcatgggaattgctgtcccctgagggatccgggggcatgagcggcccggcgcgcggggcggcgcggcggcgcttgttccccgaggaggcgtcaccggcggcggcgaagggcgaggtggcggcgttggcggggtcccagaggcgggagcagaggtggagcacgtcgcggtcgtgcggcgcgaggcgggcggggtcgaggccccgtgcgacgcgggcggacatgccgcggaacttgttcttgaggcggcggagcttctcggagagctgggagcgggtgtagggcgagggcatggactcggagaagcggtcgtagaagacgttgaggtcccgcgggaagacgagcccctgcgcgccgcagccgaggaggccctgcaggaagcggagctcgtcggactcggaccaaatccgctggaacttgaacggcggcggcggctgctgaggctgctgcttggcggcggggtcggaggaggccgggtcggaggaggagggggagaaggggctctgcggcggggagcggcgcttgacggggagcttgcgggcggcggcggcggcggcggggggtgcggaggggtcgtccgcgtgcgggaggaggggtgcggtcgggtcaggagggttgggcgcggcggggggcagctcgaccgagaccgggacggggagggtttggtccgaggccatggcgacctagcgcgcgcgcgcacggatcgagcgagcgacgcaggcgagacgaggccacgagggggttgggttgcggcgcggcgcggccggacgggacggggcggacgggagggggaagggtggt

SEQ ID NO: 4846 - DNA, 7374 bp, Oryza sativa
aattataattacgtaaatttttttaataagacgaatggtcaaacatgtgaaaaaaagtcaacggcgttatctattaaaaaacgaaggtagtattaaatatagactacttacaaaactaattacataaatgaaaactaattcgtgagataaattttttaagcctaattaatctataattagagaatatttactgtagcatcacatatgctaatcatgtattaattaggctcaatagattcatttcgtgaattagttcaagattatggatgggttttattaatagtctacgtttaatatttataattagtgtccaaacattcgatgtgatagggattaaaaagttttagtcccatctaaacgggtgcttcgccctttttgccgccgaccgtagggatcacatcgctggtgagtctagaggataactcattttcttttttcgattacactgtagatgtacacatgcgcacaccactgtacaggaacatcacacaccccctcataaataagtcctttaacatatgctttaagagataaaaaccatcaatacaaccatgatctcattgaatttttattaaaaacccatttacttatgcctaatatttttaaatccacgacaacaacaccgcatcactattgttttccaataggataactcattagccacagtagcagcaagactgcaagagccgggaaaaggaccggacttgtccttcaccgcggcggcaaagccacaacggcgaggctgccgacagccgagctcgccgcggcctcgcctggctctctctcccggcggcacagagcgcgcgggtggggccgcccggccgcgtcgcggggcgcgcggcggtcgcgtacgggccacaggcgcgtcgcatggggcggatccggccacgtcgcccgcggaggtggagggtgtcgccgtcgggcgcgatctggcgctgtggctatccgtcgagtcgagctggtgtggctctcccctgtggggcccggacgaaggaaagcccctgcagctatgctcgacacgtcagctgtagtatcactgtgtgtggaatgtgtgttgattttcaccggccgtacgcacttgaggttgaggggatgtctgaacatcactgatttggtgagcgacttatgtgagcatttttgctaagaaagaatctcgtcgcttatcaccctgcaaatagttcagctatcaacttctaacggcgttttgttgatggatgattggtgatggataaaactgagtttaggcactacaaagttgatataaaaaggttctatactgatgaatattttttttttcaaaagtcatactatttaataggttaaaaagtgtctccataatatgccttacatttacgagtagaccgtgttaacgatatacgaacttgtcaagtggatgcaatttagtacacaaacttacgagagaagtacataaacggtctctaaacgtgtgtgggtgtgttacctaggcttctgaactcccaaaatgcatttttgggtctctcaatttgtcttgggtaccatatagttctaaatgggctccaacccactccgtgtgttgatgtagcatgccatgatggtgcatacgtgtcagtagaacccatatgtcagtcatatattgaaaaattaagaacataattttctcctctctttatttatttatttttcaaaattaaaaacataattttatcctctctctcctctctttataatttttatttttttctatgtgactaatatgtggattccgctgacacttaagcgtcaccatgacatgccacgctgtctcatggagcgggttggagcccatttgaacctatatgacacttatgacatgtttaaagagctaaaaatgtattttgagagtttatggacctagatgacatatccgtacaagtttagggaccgctcgtgcacttcactcaacttataaacattatgatgcataaacttttcttttgcgtgcgaacatttgtaaaacgatgtattatatagctagtctgattatagaatgttacacacatttgagagcatgagacatgtcgtatgtgcaaataattaacatttacactgtacttaatttgttcttatattatttcgtatccattacatatcccctttatatacatttttaatatgtataattaacatggcttgttatatgtttgatatgcatatctactaacatcatcttgaaattcgagcctacataacatccatctgcatccaacttagtgaaattagttacgacatgtttttgctttggtttatatggaccagacaagtttatacattaaaatgagtaatttacaaattccatatactaaatcacactcacctcgcaagttcacgtaccaacgatacaatttacgctagaattactcaaaagagtatactatgagatgtgcttctatgctcttcaaagaaaaaattgcacaatttttaaagaagatgagaggttcagattagaagtacttcaatagcctaaaccgttttaacaagggcatttttgtctttggagaaaattaccctgtatcaccgcccctttctcccgccgttcttctccacctccggcgccatcactcgaccattttgtcaaaatcaccatggcggcgctacccccgaacaaagttgtcgtaggcgccagtatctactctggtcctctcgatgaagcttcttgcccgtgattatgtcatcgtggttaggactgcactgcagcctgatcccaacactgagcagatccattatcatctctgatttggttgctttaatcaatagcatcacgattaagtaattcagctagttctctcaggtttgatgcagaggctacaaataaaaaaaacagatcggcttataacttttgatgctgtttcaagtgatgaacgatttgtgtttgtgatgcaatgcaaatgcaatggtgatcgcggttgttgtttagtggctttcagtttgtgacggcggcgagcagaacaagttgccggtgagctttggtgtggcttccgaacttttaggatcggagattaactccctctcaaggatgaaattgccctttctgaataatgtttatactatcctttcatcttctttaaaaattgtgcaattttttctttgaagagcatagaagcacatctcgtatactattatttagtagctgtgtcaattactcctagttaacacccactctagggatatgctgacgttgcatacggcatgctatctactttgcccatatcccatgcctcatgacttgctctatacgtgaggttaggatctaacaactggctttgttaggacccatgtgtcgatagcatatcaaagatctactgcttacctggcgtgccacatcatcagtccatcgctgatcaggaacagccacatcttccaaggccatcggctgaagttcatggatatagtatacgtgccttatgcatctcctcaagcccaaggagtcgaagcactcacactttgtgaacctagcttggcagtgtctcacgctccacacatatattttttttttcatgttagaataatatgtatatatatggtgtaacaaagtcacagttagttacattcaaatatatgtaggagagcaactctgtccacaataattattctcaccagccaattattctccacaaaaattattctcgcatgagaggacctttcatgcgcacatcgatcggtgtcagttttgcgaatttgtgttgtctgcgagcagatgccgaccttgtatgataggaacacccaagagagtcatgccattggcaattaatgaggaaattcgccctagtagataggtaattgttgcctttttcattaaaaaaagtaaaaataggtagcttattattatcaatttttataccagaccaagagagagagagagagagagagagagagagagagagagagagagagggagcacgcatggagcagagctttcttgctgattttcatgtgatttttcaataagaacaatactcctttacttttagaaagatctcagagttccttttggattaccaaagatatatggatctctgaattgtaccttaattagtaattccgaaaactacagccatattttctcctaaagttacaaattttcttttagctaaaaagttgtttataccacagcctccccccctcctcccctaataaaaaaaatataattgactagctaaatgtctgtgtgttgtaacgagattttaagaaaatcatcatacatggtagcaaaataaaaatattttctccaatctatggtcatcgttggtatcgttttttacacatatatcagcgacatagttgctccaactgataaacaactaatcgatataaattatttatatgcctagaaaactgtatttgatccaggtaaagtaatctgaggctcatcaaaacgttctcttaacctcccagtataccgaaaaggcaaatagctaaaaaaatgaaacgaaataggctgggagatagccctgctgccttgctagcagcaggttgtgggtgggaatcaggaatgggtaaaaattccccttcagttgttccatatgatcaatgaagtttctttgaattataacttaaaaatatatttttggaagaacaaagctgattaatcctttgtctagaacgtcaaataatgctatcagacgatatagctcatacccattttcacatttacaaataaatatgattgtcctgacagctatcccactttctcgttttgactctccttgtaagatgccatagtaccatttttggggtagaatggttatttaacttattcatcaatgtacagctgccatagtatgacttgttaggggacacatgcggatgagcgtgtgcgtatgcacatttcaaacaccaacaagtgcatatgcacatttcgagagatggtgaagactaacaaatctctattctcatttcctcgcaaaaaactctattctcattaaatctctattgaaaatgcacctatatataagtaatatggatcatctatatattgatatatctaaagctggctaatctccttgccagctgattggtccatcttttatccgtttatttactgccacgtgtctctccaccatttagacaacaggcgtagcataaactccgtgcttgcagcatgcatgcctctgctgccattcaggaataactgggagtaatggtgtgagcctctcgcgtaaaaataatgcactttctagacgtctcgcttgcccacattggttcgtgggcaattgcagtgctttcgcactatgccgaccgagccaaccatgcagtaagctcacatattgtcgcatgcatttgcataaactaaaccagtaacttgtacgaagaaaagcaataaacaaattaattatatataaaaattaaatttcaatatagacggttcaaatacaagaggtgaggatataaatatatattttttctatcgcatctgcaaatttaacttcttagaaagtaaatgagagatttcccgaaaaaaaaggagagattccaacaagttatcatgtatttcttaaaaaaagtaaaggttttacttttttaaaaaaaatagaaatcaagtatataataaaaactattttattctaatcacaacagcttagatgctaaactttacaaagtacaaaagcaatgtagaatattcaggaaatacgcctttctatatattaaaatatcatcttcaccactgataagttaaaacttaaaacaatattattctatagcatgatatatgttattcttgggtgttctacaaacttatctagaacacactaaaggatactttcgatgtaagatatttgcatatacttgatataaatctttacactaattgctataaataaatcccatattccaaataatatctaaatgaaatattagaggctaaattagcatgcgtgccaacatgcacgctcattttctagttaggatttaaacatagtagatagagtcatatacccacgatcactgccatggttcatctcagttaattcccaagaaggtcgccaagctcaaaattaccatgtatgtatcctaaagcgtagaagttggataaacttatggacatatatctaaataaaacatttgaatttatgttctggtaaaaattaaacaaccatcatgtatattctacccaatacatcacaatcaatcccgctgtttgatatagagtacgcttcaggcgtttttatcgacctactacaacattctcacaaaactgagatgaccagttgacaaggcaccattatccatgatttatgtacagcacgcgtgcggataggcatagcctactgtcttatacaaaatgatagttaaattaatttccattccatttggcatcagctcgatcaaacagacaaacactgttcagaaatactgtttcgaaagatacagatcaatcatggcatcctacgcttgtcgggctaccgcctgtgagaacaagtaccatgagcatttaagcacaagactcaggattatcacgtataattaaggccttctttagtttctaaaataaaaacttttcacccatcacatcgaatgtttggacacatacatagaatattaaatgtagacaaaaagaaaaaccaattacacggtttgcgtgtaaattgtgaaacgaatcttttaagcctaattgcgccatgatttgaaagcaaataaataaataaaattattatgttgtattacctctgttttttaatagataacaccattgaattttgggtatatacattagattatccatcttattaaaaaaaatcatgtgatcatttaaatcaaatgatctactcactctatcgaaaaaaaggcaaccttccagattcattgtcctaggtgatgtcaaatcaccacctatgttaccctttttaggagagggagtaaaaattaacaacgccatctattaaaaaacagatgtagtattcgagtggaggcaatgtgttatatgcattaccccttaattaataactactccataagattattggtgattatagctccgatatatgagtttttttcttttattcgctgatggatgagtcaccaacccaagaagatcacagagttgacaacacgaacctcctctcgtagtaatcctctctcgcctcgtgcccatcccctcgggtggcccccaccggaaatcccacggcgtgacagcccgcccaatggcattccgcccctccggattccgcgccccccgccagccaatcaccttccagataaccgtcctcccgggccccacctcctccccccgtcccgccacgtggcgcaaaagcgtgttcacgggccccacctccctgtcagccgacccgcactgtcgctgacgtgtgggcccgggggtcaggacccgagtccgcgattttataaaggaaacggctc

SEQ ID NO: 4847 - DNA, 14744 bp, Oryza sativa
  unsure (1)..(14744): unsure at all n locations
ccccgcgcgccgccggccactgcgcgcttatgacgaggaggagcccgcggtggcggcggtgtcccaccgcgcgtccccgtgcgccaccgccgaggaggagcccgccgcccaccgcgcgtccccgcgcgcccggtcggcctctacctctgtcgccggccgccgtcatcctcgggccccctccgccacctacaacttgctccgccccctgcgcgccgccgtcctcacctcacctcaccgccgccacgctcctccgccgcctccgcctccgcgccgacgtcctgagcgccaacgtatgcgccatcctcgctgactgcccacgctgaccgcccgtccccgcgccgtcctcgccgacagcccacgcccatcgctcgtccttgccatgtgcgtagcgcgagagagaaaagagcgagagaatagaaatagaggaaaaaagtatgataggtgggtcccacattttttattaaataaaatgctgactggattgccacatgtgcgccacgttggacaaaaccgctctggattgggtcgagggggtaatttgtccggtattaaaagtttaggggtaattcggacgaccccgatagttcggggttaattcgtactttttccaaaaaaaaaaaaaccaagcatccccgtgtacttagcatgtccatttgagatgatggcattagtggcccgtaccgtgcgatgctacattttgtccctgcctccggcggcacttgtcacactcttttcacgcgcgcattcttatatagttgaacctactaatccaaatccaatccaagttgtcacaaaaaaaaaaaacaagttgtcactttgttccgtgccaaattgactggtggaacgccccacggccccagcgaccaaccatcataggtcaagaaaccgtttaacccgcaccctaccaattagcgcgcgcgtacgaacaatcaagaacccagtggcacacgagtacgagtaatctagtaagtacactatggtactcccgatccgcgcgcccgaattaataggctggcagccgtcgccgttcacctcgttggacttggaccgcgtcgtcgtcggcgtctgctgcggcgcaccggcacggcggcacctcgcttagggcacccactataagctctctacaagagatcaatatcagcatatttttctatttagaagatattaaatgaagagatagagcaaagctgtctactaaattagagatagtctatagagaaaaacgaggcaatgcataagagagctatagatacccatgtagatatgctattgaggtggtttactattaatctagtttagaacaccttactttactattacggatgctcttaccgcccatcaattttccgcgccaaccccacgacgccgccgcccgctgccgggcgccggcctcggtggactcgcggcgcgacccaactaaaacggcggcacatggaacaccacgaattgatcgaatggcgaggcgaagcgtggccgcagaggccgaggcgtcgcgtcgcgtcgccgtcgcgctcgcgcaggtgtttggctgtggcctgtggtgcgccgcggtcgccgtcgcggcagattttccacggcctccacgtagaaacccattgattacacactctcccaagtcccaagtgcgtggcgtggtgcagctcctctcgaaatggacggcccattgcggagaacatggccccggactgggcctcttttcccggcacctttttcacggactttctgttattaacaacggcaggatttactcgctactgtagctttcagctggaagtttccaatgcgtaataaacttgactcctatggttgaaatggaatcaatccctccagggaaattgcatccaaattgacactagatttggatagtagtaccacttctcctaccataccccgaatctcccagaccatagtatgctggagccacccaaaaccgtcccgtccatctttgccactagtaaataacgcgcgtttttcttgaagcgttaagttgaaactccgaaacgtcatccacgcagaaggggttgtgtgtactcctacgccgcacggaaacgcaaccacacacttcttcggtcgcgcacctaacaaagtacccgcttctacgtcgtcgagcgtttaatgagtagccctcctcctcggcggcagtgatgacccaatcatccccccgggttcagaagccacgtctcgtcgtgcgtttaagccaagtataaggtagatgtgactaccacctctaaatttatctattttattcactcataaattaagaggcaacacatacaatgtatcacctctaatatacaaataccaatatctctaatactctcacacatttcttgaaatttgtgtggaagttgcctcttaatttaggggtggctcatcttatctctctccacttctctcctccaccttatcacccaatccaatgtagcgtttttagaggcaacatatgagatattatagtacttgccctaaagagaggatattttccactttctctgcgcactatttttaaacggttaaatggtgtattttctaaaaaatattttatagacaattcgtttaaaaacttatattaatcaacttttaaatttaaaataattactacctccgttttaggttataagacgttttaactttgatcaaagtcatactgctctaagtttgataaagtttataggaaaaaatattttcaaccaagataaatttattataaaaatatattaaattattgatttgatgacactaatttagtattatcaatattattatttttttaataaagttagttaaacttagagcagtttgactttaacaaagtcaaaacgttaacctaaaacctcatttttcgtatattccttcccaaacactaaaacgagaaaagtagctcgcggcgttgctgaagtacgtgaacggttcctgcctacccggccgcccaaagaaaaaaaaaatttctgctaatcggctgcgttggtcaacacggaaaacgcaatttcaccggaaaaaccttcaatgcgaggaagaaaaagaaacaaatacactacagtagtagtacgagtaaaatagttctttttttatactgctagtgctgttggtaggagaaaaagaaagatggaactggctgacatgcttgttacagcaggtacaatagcaggtataagccagttataaacatattttaaagagttaaaaaaagaagagaagagcagcgggctacagatctgtagccagctacagcacggactccaagatataatgtgtgtatgacaagtgggaccagatattaatagtatagtaaataactattgtatgaattggctattacattagctataaatgatttggatctagtagtggactatactattaaacttgctcttagagcaaggctaataatacagccgacctgctggctataaggttctttatagccttatcttagcctatccatataatagttagctcttcacaattaatacaggacccacttgtttctctcacagagttttttggttcttgtgtccaagccggctgttagtttacagtccgcttcttctctctctcctctcttctttcctccaactcagcatttaaccggcttatattctacaattatactcgctcttattgccagccagaataataaccgagtgaccggttaacccgggggcgcgggcccacttgtcagcgagccctcccagcacgcgcagcaaggcgcatttgttgtctcggctggatggctggcagagacagtcaatccaacagggcactctcccctaggcgtagcattgccagagtcatcgtacccagtcgcattccccttccccatcccggccaagcaaacgagatcccattaccattcccattcccacccgtgcgggcggcgccacccattcccattccctttcccaaccgcccgccaactcccggaataaatcccggcctcccaaagacggaaaaccccaactccccgaggcccattccgcaaaattcgcacgggagtttttagggtttttccgtttcgcccacctctctctctctctcttctcccccatccaccaccgcccacacacacacccacacacacaaccaaaagcgaaacaaaggcgcgcacgcgccgccctcctcctctcgcttcctcctctgcgcgccgccgggatgcgggcggcgtggcggccggcgagcggccgccgcgtggcgctggcggcgatggtggtgctgtccgtggtggtggcggcggcgatggcggacgacctggcgggggacgcgagggcgctgctggcgttcagggacgcggtggggaggcacgtggcgtggaacgggagcgacccgggcggagcgtgctcgtggacgggggtgacctgcgagggcggcagggtggcggtgctgcggctccccggggcggcgctggcggggcgggtgcccgaggggacgctcgggaacctgacggcgctgcacacgctcagcctccgcctcaacgcgctcgccggcgcgctcccgggcgacctcacctccgccgcggcgctccgcaacgtgttcctcaacgggaacaggctctccggcgagttcccgcgggcgttcctcgcgctccagggcctcgtccgcctcgccatcggcgggaacgacctgtcgggctccatcccacccgcgctgggcaacctcacgcggctcaaggttctcctcctcgagaacaaccgcttctccggcgagattcccgacctcaagcagccgctgcagcagttcaacgtgtcgttcaaccagctgaacggatccatcccggccacgctccgcaccatgccgcgctcggcgttcctggggacggggttgtgcgggggccccttggggccttgtcccggtgaggtctcgccttccccggctccgggcgaacagccggtgtcgccgactccggcgaacaacggcgacaagggcggaaatgggggtgaaagtggcaagaagagcaagaagctctctggtggcgccattgcaggaatcgccataggctccgccgtgggagccgcgcttctcctgttcctccttatttgcctctgctgcaggtcgggacgcaccaagacgcggtctatggagatgccgccgcctccgtcttcggctcctgccgttgtcgccgccggccgtaaaccacctgagatgaccagcgccgcggccgtagcacccatggccaccgtgggcaatcctcacgcccctctcggtcagtcgacttcagggaagaagctgatcttcttcgggtctgcggccgcagtggcgcccttcgacctggaggacctgctgcgtgcatccgccgaggtgcttgggaaaggcgcattcgggacgacgtacaaagctgttcttgaatccggggcgacggtggcagtgaagaggctcaaggatgtgaccctgaccgagccggagttccgtgaccggattgctgacattggcgagctgcagcacgagttcatcgttccccttcgtgcctattactacagcaaagacgagaagctgctcgtctacgacttcatgcccatgggcagcctctctgcggttttgcatggtgagaacttgacagttgtattttgttgtgattcttaattcacaatgaaatgttattcttgtgtttgttagtactatgatgcattgttatttggtggtgatgataagagtggcgcttgattgttttgtggctattactttttcctttcctcgtttgactattcatctgccggttttagactctactccgattctgtcttctctaggagacttagtcaggctcggtgttgatgtaggttttctttatcatgttggtatccaaagtacctgttgtttattgggtagtgattcttaattgatgttactcattcaggattgactacgatttagtttgtgactgtttcttgattcccccctgttctggttaaacttttcaattgttcatacttttcagaaagttcaaacataattgatgacattgcaatccttgaggtgcagaattggttgtcttattttttttatatgcacaaattccttcaatgtgttgactcagcttggttagtgtgatttttctttacattgcttatagtttctggggatggtacatgattaattaggatggtatctgatgtcttgatatcatgctggaactaatatttgcattttaagttatagccatatagttgaatactaatgttttcatcattactgttgtgactcctgctaatcatgatactggtacttagacttgaggatagaaaacttatctcacaccatctttacttatttgctaagcagggaacagaggttctggccgtacaccgcttaactgggagacgagatcaagcattgcgctggctgcagcccgtggcgtcgagtacattcactcaacaagctcatcagcatcccatggcaacatcaagtcatccaatgtcctcctgaacaagtcgtatcaagcacgtttatcagacaacggactttctgctcttgttggtccatcgtccgcaccatcccgtgccagtggataccgtgctcctgaggttactgatccccggagggtgtcccagaaggcagatgtgtacagctttggtgttctcttgcttgagctgctcacaggcaaggcccccagtcaggccgctcttaacgatgagggtgttgacctgcccaggtgggtgcagtcagttgtccgctcggaatggactgcagaggtgtttgatatggagctcctgaggtatcagaatgttgaggaacagatggttcagctactacagcttgctatagactgcgttgcacaagtcccagatgcccgaccttcaatgccacatgttgttttgcggatcgaggagatcaaaaagtcaagcgaaagattagaaggtagagatccgcagcagcaggcctcaaatctcgaagcgggcgatgatcagacttctaagccagaatccgctgaggggctcaatccttttgccccttgatattgaataacatgatggaggaatcggctaactgctgtagcccacatttggttcatggatttgatgaatcctatcttcaattgagtggactactttcatcttttggcaatattgaatttaccattggtgtcaaccatatggttgtctttcgattgcgcatgatgcttggcaccctctgtgctgtggtaggtattctggtggtgtttagggatcaccaccccaagtttgtgattgctttaatcgatctgcttattctagctgatgattaggttggttctttagctatccatgtaattacaccgcaatctagtgcttggaatttcttgcctgagaatcatatttcatgagttcgctccctgatggagttgttgccgattggcatggccgatgtgattgattgctgggtctttctttggatggtttggtgatctgtaaaacatgcatctcctgtggccgcatctggttgacgccttcggttcgtgaaagcaacgtgctctcgatccggtggcacgggtcttgttttcggcgagatgttttttgaatcgcccctgtttgttggtttcgtcctttgaattcaatctgcctgatacgaatagaaatgtgactgttgggctatcattattgatcatggtccataaatagatgccactgttaccctgtacgtagggtggtccaaaggaaaaatatgtacaggaaacgtactggttgagtgatccaaatgggtcgtgccgtttttggcttgggctacatctcatcaaaccacgatctatagcagtgtttccctagctccgtgccttcgttgcatcagcatccataacaaactctggccatattcgtctcaaaaagaaaaaaaaaaaagaaactggccatattctgaatcagtgtaaacatttagtacttcctccttttcatattataaaactttctagcattcccacattcatatatatgttaacgaatctaaatatatatgtgtagttagatttattaacatctatataaatataaacaatgctagaaagtcttataacctgaaacggaggtagtatgtatcaattgaacctttcatgctctggataacggatgaaactaaagtagaggtagctaggaacatggtaaggcggtttaacctccaaatctgcctttttgtttggtgggagctagagtttctggctagcttttcatttccttcccaacgaaaatgacatctaactttgcttcggtgaggggattctacttttcaccatcctaagcctaatgttagaagggcaaaaaatgaaaaaaaaagaaacagaaagagaattaaagtgtttctatattttctctacgattaccaggcaaacgtttattctttgcttcctaaaataaactaacataatataagataatacacatgttaaaaatttgtaatccgacaatgtgtcacactttgaaacggatctggtgtattttgtgaagccttgaggaaacaagccccggttacgcaggaacaggagcgtgtgattatacaagagacgcatgtgtcgtgcacgaaactgagatccggccttttcaacgggtagccgggtaggccacctacgcgtttttgtcccggtgctagtgctacgcctgcggcacacacctggcgtgagtggcgcgggtggcggcacacaccggcgcgcgcgcgccctccaaatccgaagcgagaaggggggtaaacgacggcggcgcgtcacatggcacgagctagtcccacctggcagggccaccaccaccacgccgccacgcccacgcatcggatcggctcgcgctcatgtgatccatggcccgggaccagagacggacggtcgtacgcacgcatctccggtgcaggagccggatggaaaaggttagtactgccgtgtttagttctaaaataatcctttatatttctagcttttctatcacatcgaaacttttctacacacacaaacttttaatttttccgtcacatcattctaatttcaaccaaatttttaattttggtgtaactaaacataggccccgcgcgttcactttttttttacacgtcgtttggtttgatggcaatgcaaggggctgccacgttgaatgttggatgtgttatagggagtagtagtaggtttttcttaggtgaaaggcaaacacatgctacatcttttggccgcattgttctgtagatacgatatttgatagtgattggggttgaaaacagtcatggctattgatgatcaaccgacgctcgtttctggtttttaccgacgtaaccatatagaaaaggtaaccgagataaaattgaaaatgacactaaaacgtattctaccaaccgtttccatattttacccttttctcatgaagatttaccgattctgtgatatagtaattactgtatcatccgacccgcatctgaccatggctcatctaccaatcgtgtgtctaatttttctccatgcaagctagtttttgtccatgtcggaccaggcaagtaacaactagagaactagtcggacaagggttgtacacaccggtcgtatgtatagccattttcatttttgaaacccctaatagttttgctataaatctgtcgtcaaattttttacttacaatttgacgttttttcaacctaccaattagcacctgattaaggcaaggcactgataaccaagtgaggtattgtacgcatctttttatctttgccactgtatagaacgaaagtgattgaacgataatactacttttaatacaggtgagaaatcttctgtgatgtctatttcgtatgaccagcagtgttttaaaagttacattaaagttacactatagtttatatgtaagttacaatgtaattacactataattgtataaagttatagtcctatataactaaaattatatttgtaaattcagttgatatgacatgtaagtatactgtaattttgataaaaaatattgtgtaagtaaatatgcattcgttattttctttaaaatataaaattacagtcatatataactaaaattatatttataaattcagttgatatgacatgtaattatttaaaatataaaattacagtcctatataactaaaattacatatgtaaatttagttgatatgacatgtaagtacactgtaattttgataaaaatgttgtgtaagtaaatttgtattaattattttattttgtagtccgttggatataaatctaagtatagaaaaaaaatatgggtgatttcttgttaaaaatcacccgacaaatgtataggcagttccatccctaatatctattgtctctgtttgacccatagttttgaggtgcaacaaccgctcaaccaaattcctaatttaattattagctagctgggagaaaatttgtaatttacatactgtaattttaatttgatttggtcatatgcagatatattaaattaaataccatgtgattttataatccaatatttctgacattcattacccgtctccaattgataccgacatgatttcatcactatagtttcatttctgatttttcgatattgttccgttttcagatttatcgttttcgaccatgttttgagagaaaaaataaattatgaaaacggttaaggttgttttctgatgtacatattacagcatacatactagactaactttgaattaagttgtgtattttgttgtaacggattgccacaccgataggtatggctgtcgggttgtgcgggtggcacagaccttattatacatacttcgaaattcaaccaccgaatgacatctacttcctccgtttcacaatataagtcattgtagcatttcccacattcatatttatgttaatgaatctagatagatatatatgtctagattcattatcatcaatataaatgtgaaaaatgctagaatggcttatattgtgaaacggagggagtatacttttaagccagtgctaaacatttggtgtagatctgtaaaactccgagcaattcatacgacaacccctcaacttttgcgaggagccaatgagccactcttttcttttttttttttttggaaagaatacactcctgtccccgatgtagatgaaagatactccattcttgttccatacaaggcttcataatgtttgtgcgattttttcttttcttttcttttaaaaaagaaacctgagaatgatttgtggttcgtacatgtgttggtgattgcaacgggccctgcggtttgagtttgattgggcgtaacaataattcatgtataggcgctggaggaacagtggaaggtgagctagatgccatatgtagcattgtagcgtgtcaagcgtgtcaatgcggcgtcccatcggcatatgcaacttgttacttgtaactgccggagacacatcgacaagctaggcagaaatgtgcgcaaaaatgatcaatcaaaggcggccgatcgaggcatatctgattgctcatacaccaggaaaggtttgcattggttcgtggtaatttgccattgcaaggaatgatttcaatgtgtccttggatatctttgcagtcctataattgctaccgcccttgattggatgatgattctcgaataattgaaaatggcactagcatttaagtttataaacttttaaccgcttctctttttacggtaaaaatttataaatccttaaaatatgttatattatttaagtgtattcatcatagcaatttgtgattcaagcgagacacccatagaaagtgtaagttattcaagaacaggaagtatgatgaaagaaagaaaaaagacacatcggattttagtgggggtaaaaacaagatgggtatttctcgcccaccacccgaccatattattttaagataaatttgtttggattataaattcgggtacttgaatttttatatagttattgaaatcatatccgggtgctttttattgatacgggattgaaagatggtatccgacgggtaaataaatattacccggtaaactatccaaatattgccggttagcaggctttttgtttagtccaaaaaaaagccatagcccacgaaacttacatcaactcataaccaccataaatcaagcacaaaacgggagtgctagtgctaaaactagtaatggtgtgatggagtaatagatattatctatgttgctgttgctatgccttaatctagttgcattagggattgaatggcgattgaaaatttaccgtatatgatcgtccctttgactcaatattcggttaccgatatatttcctccgtcccaaaatgtaagtatttttgaggttggcatgggtattaaaaaagtagatgagaatgactgaagaaggtgtgtgattggttgaaaagagaaagtaggtgaaaaagaatggttgtgattggttgagaggagaaggtaggtaaaaaaatagcttcattttggaacaaagtactggctagaaatagctacattttaggacggaggtagtaatacgtacctgcttgcaattgctacatattcatttcatatttataatcgatattatctgtatttgaatccgtatttaataattacttatgtccgatccaattccgatcataaaatatgggttaagatataagaaggatcgaaacccaacccgattcatccctagtttttataccggtcatccatgtaccttttgagtttcaagtcaactgtagtattattcaaaatagtatcaactcttagatgcttcgttttacgagcgactatgaagatgattagagttgctatcgcctactcacaatcgcagtacgtctcagctcacaggttcagcatgacatccttctctgttagtcacgttgagaatgctagtaaccataatatgcttaaatagagtattaacattgaacatatggagcccagcgtttgacgacatacttcgagctttcagattatttatttatttttccttcaatctctttgactctagtaatattaaacaagtgaacttgcatcagattattcttctttcctccagccaccattctttggaaccttgaccctcgacacccccccaccccccaccaatgttttgaacaaccccaacatctttaaacaaaggaacaaactgaaactactcttgtatttttacttctatcactaacagtattcccacggtctttgaacaatcaagtcaaaaataaagggataaccatcactgccagcctgccatgtcaacatcttctagttcctcctcactagagaaaaagagcctccaaacaaaaaatcatttagcaatttgattggactaacagctactatctccgtcccaagacataaaatgttttaaaattagacatgagtattataaacataggtgaaattaaatatgaaaagattgtgattggtgaggatactaaaaggtaaaagatcgtttacattttgaaacaaattttgaatgctataaattgtaatatttaagcacggaagtagatttaacaaacaaattgtaatattttaaatactaaaagtaaaaggtcgttattgattgagaaatgaatagatatataagttgttatattttaaaacaaaatttgaatgctagaaattgtaatatttaaacacgtacggaagtactcctacttgtcaccacctgtaacctcggccccatgtcacatcagctgaaatattttggtcagtcgtggcttatggaagcttcagattgaccagaaagggagcagaggaaactgtgccgagaaaagaaaaatgcttctgatcgcgagaggttttcaggattaattcatgggaacatggcgtgtgtttcatgatgttcacaagccacccaactgtgacgacgttgctgtgtaaaaaagctactctcgcagtcagcaggcgagaagccgagagcgacactgtctcccttttccagcatgccatattggtctgcgtcaaagtctcaaatatgatctaagcgagaaaaaaaaaactccctttttcacccgattttaaaatacatgtaccatatcctcgctccgatcggattccgggtaaatcggtcagatattatttgatctatttttacccaaatttgtgtgtgtgtgtgtgtgtttgggggagggggggagggggctaataaaatttttttagagtacacggtataacgcagacactcacaacacacgcatactcacccctatgaacacacgcacgcaaaccctacccctatgaacatattcaaaggctgaacgaataaatcctggagattgacgaagtcaccacaggcgcattacaatttttatttgttatagtataatcatttttaattaatcaaagtgagacaatcttagtcaacagtgacaattattcaagaacagagagagtaaacagtgctagtgttgtgctccctctgttcttttatacttcatatttattttgctcgctatatggttagtttgaggcacttttgatgaaaaatttaatgcaatttccatatgagaaatttaaatatcatcagtacatacgttgtcaaaatattgatatattaattgcacgcattctagaatgatgatagggtgaaaaaaagaaaagttgaggggtggaatagtatgggttgaaccatgaaaggtggcgactttagtgacggtctcgcaatcgcaaagatgaagtctcagtttctaccttctcgagaaagacgtactagtactccctcttattcgaaatgtttgacgccgttgactttttagcacatgtttgaccgttcgtcttattcaaaaacttttgtaaaatatgtaaaattatannnnnnnnnnnnnnnnnnnnnnntatagtcgtcgatccaccacctgngcacag

SEQ ID NO: 4848 - DNA, 28502 bp, Oryza sativa
gcacctacacggtgggatgtgtgggcgttttgtggctacacggtggtggtggtgccgtgtggctggaggctgggcgggtttctggtagcggctaaccgggtatcggttgcaaaagaagggttacacataggttgattttttgttccaaacttaaaggctggttagctcgattaagagcatcttaataatattattgtaatctagattatttagctatatcactataagctggattataataagcataacctttatgtctcttaattagtagctatttgttagctgttagctatccaataattttttaaaaaatcatctttaaagtggattatcagattatagtagtatggcttatagattgtaataatctatcataataagctatctatttgtttcagtttactcataataatcctaaactaaatcaaacagggtcttagcaggtttttaacttattattgtttaactcgataggtttggagtaaagttgtggaacagtgtaaaatcctgttccatctttattttctgaaagcattttagcttgctctactttcttttcgagtggattgcagctttagaagaggggggcaaacttaaaagaactctaaacatttaatcatgtaaaaagataataaacatagatgcttaggtttaaaataacacaatatgtattctatgctatatcatgaaaatatgaaaaccagactaaaaatattaatgttttcacttaaactaatgttgattgattaaacatgcacactattaatgttgacaaataaaattgtgagaccgactatattggatttgtttgtatgcatgtacgattttagtgtttatataaaccaaattaatagtgaattttacatacgtattacttcctcctccgtttcatattataaaactttctagccttgcccacattcgtatatatggtaataaatcaacacacacatatatattaatatgaaatagagggattattttatatcgtaatttttatatttgaatttggttggataggttccaccataaaaaaaaccaaccagttaagctattgcttaattcatgattgatcgaatatataaggagtataattatatcaatgcatatataagttaatggttgttcgatatgtctaacgcaattgtgctttcaaagtctactttatacacaatactgccatggcttcctcttcctttgataatataatatatagataaattctctaagataatttgcacacaatattgataatttcttttcacattgtaactatgaagataatctctctaaaataacttgcacacaatattagtataaatatagagataattcatatcttatacattataccacttagttttctatctattactctatcttataaatacgtagatgattaatttagaatggagggagtagaagctaagagttgtgtattaaatttaatttgttggctcgtgttaaattacatgaaaatcccgttcgtgaagataatacctttctactgtttttgcatttagaaatttagcttgtataaaacggtgttacaacttgaaaattgaagcaaaaacatgataaattgctagtttcctacggacgctaaacgagaccgcgacatttctaaacccttaaaccctaatcccctcctcgctcccgcctccatccctgctcacctgattccccgacaccatcgcacccagccgccatggcctcctcctccaagctcctagccctcaccctcacctcctccttcctccgctcctccctcctgcccgccccgtcccgccgcctccccaccggcccactcctctccctccgcttctgctccgccgcgggggatgtcgccgacgctcctgccgccgccgcagcaccagatcatccgtggcccgagtggggcgatttcctcgagaagcttcgggccaaggggtacttcgagcagcccaccctcgcgtctcgcgctgatgctgcggagggggaggtggctgcgaccgccgcggcggcggcggcggcggcgggggaggaccctggggcctcggccgacaattacccatccaaggacctgaacaggttgaagaacgcatgcctcaagttcggccgagagcgcttcgatctcctcaggttatttgcccgtgagatggatgccttgcaatttattatcgcctcggttctgtgcatgaactgggctttaattagtttaatactttgcttagtgggtgaggtttttgcgttagtcacgcacttgaaattgttgcggaaatgatcatgtctggtagaaaagcagtaagattcggtaacttggacattcgtgagctgagagtagtcaattgttctccctaatcccaatgtcccgagaatcccattagcatggcatgcagtgttgatttttctgtgtctacattttggttagtaagctaaatggtttgttttgcctttctcctctatgattattgtgcatgtttggtaagaacttgtcgatgatcacgtccctaagcatgaactcatttcatagtgctattttattaaatacaaaatacattttatccagagaagctataatataaatgaaagctggagtcatgtgtgtcagtggtataactgattctttggactgtttgtgcccactacttttgcaagtactcatttctttctatgttggttggatcttaatttgactggattattgggccagtgtccttcccaagcaggatatccgtgctattgttgagtgtggctgtcctaacatcttccggaagcctgtgaattctgcaaaaagactcagagagtttcttcagattgatgaaggagatgtaagttaattgttctgttctgaacatactgtattgccgttcttcctgtagtggactcttgatttttttcacaactgtcacatttctccctgcgatggacttttgacttttcctctatgcgtaacgtgctgcttccttttctcataatttactttgactttgcaaaaaacattcacaatattttgtgctttatacaggcctgtagtgcttgcaaattacgtggatcttgtgataaagcctatgtcattccgaacgctgaagacgaagctcgtactgtcgatgttatgcgcatactgctaaattatgcaatagatccaaccagcctttcaggagaaaactctgttaatggtggtgttcaagaatctgcgagaaagcttctttcagagcttactatgcttagcgacacaacaattgatccatcaattcctaaacctgtattccaaacttctagcaagaccaaaacttttgacaagggcattgcaaagcctaagttctcagctggaaagggtagggaaacaactgaaacagaaatgaagaagggtgattggctttgcccaaagtaagtcttttatggtatagtactatagtaactgggtgttatgcttccatgcctattgttatgaacctttattttatgagtaaattccagaaaaccttacggtttatggtcaaagttgcagaaaaccacaggtgctatgatttgtgacacttaaccacaggtcttatggtcaatgtttcataaaaccccaccttattcaaatcttgattagtttcagcatgtttgaaacatttttttcaatgtagcgaagagttaaactatcagccttagtcaagaacttaataattaaaattttcatatgcaccatgttttagaattttaagtaaatttgtgctcaacatacataggtcataggggtgaggatttgtgaaactttagaaccataatacctgagattatgtgtcaccagtcataatacctagggttttatgcaactttgaccataaaacatggggtttcctgaaatttactcttactttatttatatttaactgtcagattacaccgatacattatcatatgaaatatgtgaggggctaagggcataaattggccttttgatgatcccctcaggtagtttataaaaccaggaatcaataccattgttagcaccagttatttctgaccaggtttatcacattctgatgaattgctttacttttagtgcttgccacaagtaaaacaccatgagtttttagcttttcatcatgttgcagaagggcatctttgactaccattttggatttcattcttattcccatttgaatgctgttaactaattcatctaataagccatgccatgacattggtttgtatgcctgtttgtaccatagaaatgttgctaatcataatataatgttatgactacacttacaaaaacgatactaacctctgtcccaaaatgtaagggattttggcaatgtaaatgcatagctttcccttatatttttgggacggaggtagtacaactcctacatggttctgtttattgagtattgtactatttgatagctaagattttctttggacttagcttctctcaagttattaagctttctgaatttttgtttgagctgtgctgtatgtgtttgattcttgcgtaagctgcgagtgtattctactgtagaatgagaaaaaaaatagtgctaatagacttggtccaatatgcctggccgcttggcaataccatcaagatgtcactgtataatgctgtagcatatgttatctactgttctgtgttaggcattgggccaggaggccacggccgatgaccaggcccaaggagagccctcttcagatgacgtgaacagtacccgcaaggtactgtagcagctgttagagttagttgcttggagataagattagataggattaggtgccagcctatataagggctaagtcttttggaattgagttttataaagaaggttaaactctagtttccctcaagttctctccaacctataatctcctctcatcccaatcaatccgatgccattcggctatcttcccggtggtatttacccaatgaaatcccagcccacaacattctgcattattagcttgaagactatttgtttgtgcagaaacagcctatgtaaatttgaaccagatccagaagtactgattatttaaagtaaggcatgcttggaagtacacgtttgaaaattcatatctaatgttgtgatatgattacctgtttcctactttgtccacaatgctctgattattacaaggtggatactaggagtagaaagaaccatttcatactaatctaggagccttattcccgatgttgtagttaaacctataggattcattgtatgcttggttgtaacagtttctcaatgagtgaatccagataatctgggtttcggcttgtagtcgctctttggtactccctccgtcttaaaatatagcaatctagtactggattagacacaacctagtacacgaatctagacctccctatccaaattcatagtacttggtttctatattttgggatggagggagtacatttatagtgtaaatatgtctttgcttcaacaaagaaaattgcacggtacttaaagtaagtattgagttaaatggttggacaagaaacctctagtattactatggactttacaatatttgtaatgttctttgtggatcatagaggcacacctcttagatgatatcaggttatggttaactatggtgttagaagattatgatattatggtggcctcttttatcgtttacttcactgttattatttttattccccatccacagtgtgtgtgcgtgggcgtgtgtgtgtgtgtgtgctggactgttgatgcctggttatgccttgtgaatgaccctgtcctaacatcctctcattttggcagttgcaacttcttaaattttgctcgaaatcggcactgccttgaatgcaaagcagatggaccaaagaagatagaaacagctaccactgaaatgaaaacgggagactggatctgtccacagtaaccatcgaatgccatatttgttttcttgtactgttcaacattattatatatttgccttgataacttatttatttttgtttcaggtgccacttcatgaactttgcacggaataagatgtgttttaaatgtgaagaatctcgaccaaagaggcagctcatccctggagaatgggagtgcccctcgtatgttatacgactacctcaatctttcttactgttcatctcctcaacacgctaactagacatcatctcctcctatagatgcagctttgtgaactttcgacgcaacaaggtctgcttgaagtgcaagcatgaaggccccgaaaatgatacccatgacagccagcacggacacaataggtggaggaacacgagaggggctgacagaagtagaagttttgatgactctttcgatcgggaggacgatggctctgatccagacgaaggcgagcgcagacgtgccaaagtgcgcactagggcagcatcaaccctggggagatccactggcaagagcaaaatttttgactcgattcatgaggatggtaacggtagggaggatgacagcgaggatgtcctgccgtacgaagggcagcgcaggcatattgtgagcaaaagggcgacaccagcacagaggagattcactgctggtagaagcgaggatatttgatagtctgatagatatatataacttcgatatttttccatgtagcgtatagtttcattatgtactgtgtactatttactcgagcactttatggttagactagcttggttgtaattcatactgcttagttccaaataagttcattttttatcaatcccataaataccactacaaaacaaaaaaaaaactagaatacttctactttatcaaatcttaatgtaattatttcggattttggagctgttcagattgtagccaaaataaaccttattgaattttggcaatttggcaatattgccaaaattttagcagaatttcttatgtatttactaaaatttggtaaaaaaactaaatggatgcacatatttgacaactctaccaaaaaaatagtatggtttgaaatgacatcaatctgaacgagccttttatctacttctaatacagtatgttctactttcacaaacttcaatacaatgattactctaaaattaaatttattttgggacaaatggaaagagctaaaaataaacttactatggagtatggatggagcaagtcattttgatctccatatgctccgctgttgacatctaataaacatattggatgttacctgtagttcaggtctgcaggcaaacaagatttgagtacaagatttttttattttttcacgtcttgacaagttttgtttgtcgttgatgctgtttgtcgacgactccaatgactgccaatctgcctttagcaaatcttggtcgttctaccaaacgttttggactatatggtgtactccgtaactggcgaagttgacgatactctttcacacttgtctttcactagagcgtttgatgttggaatggacgctcaaataggacggaaaataatataaaaaaacgtactgcattgacgttgttaatcatttcccatcgcaggacaagacatgataaacttataaagaaatttacaactgcacttaacactgatgatgtggtgaaaggtaaatcttaacagtacaacccctctacaaaggaagtagagtagaaaggaacagggaagactgcaaatccatctccatgtagtcgtatttttaagatggaactacaaccagccttattaacaccaaaggaaaaacagagactaaaatctagctgactgaagtcacaagacctatacgcctataggcaacatcacaagtcgcaacggaagctctcagctggtcagctcatggatcaactgaagagctcagatggattccctcaggaccaggttgatgccgaacgaagccgtgcagatgatcaacccaaagatcgccaagaagttcagccccctgaagcatttgccaaaaaattaatccgaccaggttagaaccactatgatcgatcagaaaccaagatatgagatggttgacaaagtgataggtgtgccatttggtgcaaattcagatgaaacttcagttcaagtgatcctttctttgctactcaatgcaaaggacaccgatagactagactatcataactgtggtgattggtgcagggttgcaatctgcattacccactgacgtacgagtcaacccataattaatagcgatttagcaacgactcgagcagtctgaagtctgaagtctgaagtctggacacaccttatatatacctcttgaaatgagtaatgaaatactaaatatgtaaactttggaagtttcatcaacgtcgtgccaacaagtagctgcgatctttgacagattataaaatgaagagatggggacatttgcacgatccgtaccatgttgaatagtatactgtatgatccacttcaaagctactccacgttgtcacccactcctcaatcttgacatatcaccaattaaacacgcacctttgacatttttctttggtgtactacacctactgtatcctccacttaattgagcattgaccacctaccccacttaataccatcagtacttggggaaccattcataaatgaagtcaaagttcagacttcagagtgttggctgattggttattgctacccaagaaacgaacaggactagcattctagaaatcaaggttaagtttgaactagctatgcatacgaatcatctttcgttagagcgacagtttaattaccagcacagcacacagaataaatctccagtaggaaaattcgcaaaaagaaacgtacccaatcttgaggcggttgtccgggatgccggtggcgtagcccttgaagtagaagaacctcgcgacggcgtagaacaccccgagccccgcggcgacgagcgggtgctgcagcccgccgaccagcagcgtgacgaagaacagcggcatcatctccagcgagttctggtgcccccgctgcacacaccaccaaaattctcatcggtcagaagaacggatcgaggagcaatctcggggttgggtggggcgacagactgacagacctgcacgcagttgaagagcttggcgtccttgttctccgactcgaccgcgtacatggtggggtagaacaccttgtacctgatggcagcagcatcagccaagaacattcagagaaaatcccaatcgaaaattctctccaaatcaagacgagcgagagcaatgaaccaaatctgggaggggcgtagactcactttctgcgggccttgccgacctggaagctcatccagaagttgaggaacgcgtaggcgaccagcgccagcaccacgtacccgtattccttggtcagctcgatcgacaccgccatggccgtcaaattgttgcgatttcttcttcttctcgagagggaatggagattggagaggaggaggggattgtttgtttatggattataatgggtttttggatttggatttggaggctgtgcggcgtggatgcctatcttatacgggcagcgggtgcgtctagaaggttccagaatcttgttctgtgcctgccctccggcccaagaaagctctgaccaattccttggacctattgggccactgctctttattttttttcacttttttttctttctattaaagatcttttttttttcatgaggacagatgatgctttggttgtgtggaaagaaaaggatcgatcgatttggagatcgtttttgctactgtttgagtaaattttgtccaaagtcaacggtagatccgtttttttcaatacgtcatgcctgatgcgatattgctaacggatcctctctgcaagggatatttcagtgtgtttgaacgagaccagcacccgtaggccgtagcccgcgactccacgacgtggctttccaaaaatcaaagtgaaatgacttctcaagattgccgtcttgaattcatcggcatattggcaattggcatagcatttcgttcttttttggagaccacgagcacggacaactcgaggtttacgtttggaatgtctcgccgcaacgagatgtgctatttctgttcttgttctaaaatatatagttacctaatatcttgttgctacttctgttctaaaatatatagttacataatattgatcgataaggatttgtatatattcataataataagatatgtcacatttgatactaagttgctatatttttaaacagaggtagtaaattatttccatttatttagcagagggagagagtaatagagcctgagattacagatcagaagagcatgcagacgcatagaagctttggaattaataaggtgagtttttctctgatgagttcttcagaaaagataaaagcttgcctgctatatttctgattcatcgattaccagatcaatccatatttcgaaactatatatatgatgaaacagtatagttagtacatcattttcaagtttacgagatagactcgctaatttcgtgcctgcgtcatggctgatcgatgtgtgcttacggtaagacaatggttgttaagtcttccattggtctctcaaaatgtattttccacgcgcagctggtagagcagctagagttattaacaaccaaaccatggtcaatttgatcgtactcttgcagcacaagtcgcaaagagttctgtatgacttaaattttaaattcagaaaagcccaagccagtgtaccaaatgtctactctacatgatgccaaagaaattgacgggacgtcaacagaagatttggatcagatttagtaccaactaatcggctggttagtcatgtgacttacaattattatatctccatgttcagatcatcaaagtcctaagaacattcgtcagtgcgcaatgtccggtgttgcggtgttccctaatcggtaatcggcgttgcgctaacaaaatcaccatatactactccctccgttccataaaatagagaattttaagtttttgcttgcactgtttgaccactcgtcttattcaaaaagtttgtgcaaatataaaaacaaaaaattatgtttaaagtaatttggataataaagtaagtaaaaaaaaataattccaatttttttttgaataagacgagttgtcaaatagtacaaacaaaaactcaaaatcccttatattatgggacggagggagtaatagataacactaaggctgtgtttagttccacactaaaattgaaagtttgaagaaattaaaacaatgtgacagaaaaattgaaagtttacgtgtaggaaagttaaagttaaaagtttgaagaaaaaaatggaatctaaacatagcctaactgctatcttcgctaaagaatttgcagtagatatcatcatcagtggcaaagacagggacttctcttcagatttcagaacaaacgcatcttgtcagcgtcaacaatgcacacacaattggcaaaccgagtcgtgtcacaccggcatagaacagctagagaatcctctaatcaatcatccaaaatgctaaaaactgagaacgaaccggatggaacaagatagagagagtgtgacatttcacagcattttcgctcgatcgagacgtacgaaacagtcttgacatgtttctccctcagtcacacggcggtgacgaccatcttcatgccgaggttgcagtggccgtagcgggtgcagacgaagaagttgtcccccctggcgagcctgacgctgtcggagccggaggtgtagtacctcgagaacggcggcgggttgcagtcggcgtacccgtcttcgtcgacggccaccacgttgtgcatccacggcaagtacctgaacactgccatgtccgcaaaacggtttcagttacagctggctttgtctgatcgatgagaaaaatgttcagagattgatcgaaatgttcagagataagtactcctatgatttaccgaggatgtcgccggcgtggaacttcttgccgctgggccagctcccgctgccgagggaccagccgaggctgtcgccgacgtagtaggtggcggcgtcggcgacgccgcagccggagaggaagatgcagctcacgacgacggcgagaaacgcgacggcgacggcgcctcgcattgcactgcctcttccccgagccatcgatgccactatctcactggtcactcactcactcactgactgcaaccactacactggttgggtcttgagctcttggcctgatgcttctgcctggaaactgggcaaaggaagagaaatctctgcactagctggggcctggaggtaacgatgccattgccgttgccattctatagtgagctgaagtactcctacggaggctggagtgcagtgtcagtgtgtagctggaggctggctggttgccaatgccgggggagaaccaatgccaagtctggatttctgataatcaatgctgtgcagagagggcaagcagcggtgacagaagactgtaaaaagtgtagcagtaaatgtgtatagcttcaatgccgagcataggacacgggcccgtgatcacatgactcacgagttttcacagtcacagctgcagggctatcgggttgtagtccatcgcattgggtgctacggccgcgcagcgctacgagtaaagaagaaagagcaaatcttttcttgttgtcttcaagaaatatatccagtcgccggctcgccgccggccgacggatccgccggaagggcaccatggcaacagccgagcaacaatttgtcatcgcctactattccgtaccggcccgctacagaaacgggccgtgccgaatggcggcccaagcacggcacggcccacgagctcccgtgcccgtgcagtgctgggctgggccgttggggccgtatcctggcccattttgccaccaggatccctagttctctagtccctagtccctactagtggactggaccgtaatttttcagataggtccttgatccaacggctgaaatatgcaaacaggtccctgtggtcggtggtgtgggagtccgacgctctcccagctctccgcgcccctcgccgccggcggccgtttgccgtcgcggatgagatcgccatcggtttccctctccaaatcaagccccaatgccgccttattcttcatgcctaacgcagcccagctcagctacgcccggcacgcaggccactacgattcctcgttgacgacgccctcccttccccttcacgcgtcggcggcccagatccgggcgagtcctcatcgtggcgggcaaggggattcaaaggaaaatttgtaagaggttggagttcttgctagctttaatctaaaatctttataggattgtccatttcagaggagttgataggattcgatctttttctttcaaaggctcacagagaagttttttctatggagctgaaattcttatgttttgttttaagtcaaacggggccttaaaaaaacaacacaccaccctggtaaaaagaacagcacctggatcaacctgacaatgagtcaatgactcaggataaaataagccgatcagctgtaggaatttggactggagtggatgggtacgacttatctgatggtgaaattttcctttttctaaagaagatgggtagcgtacatggtgatggtacaaaaaattacccaaaaaaattatgccttctgaaaaggatccttgaaaacctccatggaaatacgatggatgctgctgcttcatacctcggacaaccaaaggggagaggagtagcaggctagcagccatggcagaaggtgcttttctttctagcctcgttgaccgtctaagcaccacagccttgtcggggatcacctcgttgtggggcgtgaaggagcaggtggattcactgattcacgagctccaggcagtggaatgcttcctcaaggatgccgacctgagggagatccgtcggcaagccacatccaacaacaactggttctggttacactccctcagagatgccgcctacgacgccgaggacctcatcgagagcgtggagctccatgaggggaggtatcacactctgaaccctctcctccagcccttgaactcttacagatttgccaagcaaatcaacgagatcaaatccagattccaatcgatcatagatggttgggccaagaatgcttccatgttacgtgagctaagggatatgagcagcagcagcagtagtgtcacgtctgctgccgattccttgtggaggcgttcttcttgccacctcggcgacgacgtcgttgttggtcgggaggaggaggccggcatgatcatcgatagattgctgcgctgcacagcacaccgtgaagtggttgggatagtggggatgggaggggtcggaaaaaccacacttgcatctctggtttacaataaggtttctgcaatccaaacagggggcacctcattgcgtcctgattcaccgaaaggaacgagctctcgaagtagtgtggagatgtattttgatgcttgtgcttgggttccagttgggcagaacgcagatgctttaggcctcttgaagatcacatcagctcaaattggggttgagttgaactcgacacaggtagctgcagccaaaaatgccatgttcaggtttctgcagcataagaaatacttgattgtactagatgacatatggacgacagaaacttggcttgaattaagcgaagctttccccaaatctacgaatggaagcaaaatcttgctgaccactcgctccaaggaaattgcggtttctgctgacccatcttcccttccctatgagctagatccactgagtgaagaattgagctttcagctattcattaccaaagtttttgggttgaatcatgttgacacaacaagttgtccaccacagctcaaggatgtagggcaccaactttcgaagaaatgcggagggttgcctcttgctcttgtggtattgggaggactattatctgggaaggaaaagcaattcgaagtttggaggaatatattgaagagcatgaagtggagcaactacgaagctgggaatcagtgcttggagatactggccttaagctacagctgcttgccttatcatatgaagctgtgtttcatgtatctaggtgctttcaaagaagaaactgaaatcagtgtctctaaactgataaaactatggatcggagatgactttatacctcagcaagatggaaaaacaagagaggaaacagcaaatgactatttacgcgaactcatacaaaggtgcctagttcaacctttgttgcctgcgcataagcagggtttcaaaagggtccgcattcatggcctattatgtgagctagcaagatcagaagcaagagagagtcgattcttttattgtgaaaatggtgatgcagtctcaagagcagaaggaaaatactatcgtcgtctcgctctccataccaaacttattgcatttcatgaactaagtaacagtgagaagctaagatctctgctaatatttccaggagtaattgaatcttgtgtgattactgttggtcatcaagcattaaggccttttagcagggcattttgtcacgctttctttttgtttcctctgtggggtttccagcacaacatcttggaacagttaacaagcatgcaatacataagagttcttgaacttgaaggacacgagagattggcatgtgatcttaaaagtgtccaaagtaatctgaaccatttgagatacatgagcctgagaaatactaatcttggtgaatttccatttccggaaagcaattttccgttgctacaaacacttgatataagggggacgtttattagaaagcttccaggtatattggagagccttgatactcttcggcacatctacctgaattggagggtatctcttgacataagacgccttaccaatttacaaacattacatggagtcataattctccccaattcacaagctgaaaggaacttaatggcattaacaaatctgaggaaactacgttttaggacctggcggggagttgaatacagaccagagtccccaaatgggtttgatattgatcggtacaatgcacaatcgagtatggggaatgaaaaccacgcactagccgaatctctgaggcagctagggaatctccattcaatatttataatgatgccgtttgcctcatttcaaccaattacttcagatatagttcaagcagtgacgagccatgagcaacttcataagctaaaactacaaggaagagtacatcgcaatctcctgctagaagatccacatttcagttgcatcaaaagcatcacattatctggctcgtggattgttttgagcccgatggaatcactaggctcactcacaactctttatgaactcaagctaaaggatgacgcgctccggtgctcagaggtctcatgtttacaaaacagtttccctgagctgcggtacctgaaaatcagtggactaaagaagcttagggtgttccatgtggggaatggctcatttccgaatctcacccgcttctccatccacgactgtacagaattccttagcacggttgaggttatggagcatgctacaagactgcaagttctgaaaattaaggaaatgccgtcagtcctgcctgatgttacagatttttgccacagcagaaacatcaaccttatcagctgatctggcatcaaagttatgtatagttgacaccattactgcaaacaccgtttatttttttatctcgttcctttttagtaaaattcagctcaggttcttctgagttctgatggcaagaaaaaagaaggcttagctgatctgatgacaagaaaccatacaacgttccaggagaacatgatccaaagccaggagtccagcacatgatagctgtttaatttctttgcttgagctcaatgtaacccaattgtacatggaaaaagagtaatgctagatatttggtgtaaactttgcaatattattgtctactaattattctctggagatagatgatgtcagtaaactgtagtagaattggtgatgagaagtgagagttgtacagttaagtgttgtggccacatgtttttcaggagttcagaaatgaactggtataccgaattggttcagaagttcccactgccgtcttgaataacagaaattgcatacttcacactatgagactcgagaacaaaggcttcattactagaaggcctagcgaatgaatagtaaaaaaaaatgtttcattactagaaggcttactagagcacacccgcgcacactgtagatcgtagtaaaacatacaagtattgtcatcaagcatttgcctgtaatttctaatgcttcgatctacaatgtctggcagagtttgcaagtagtcaatggacttgggttacactaggcctgaactgaacttgtagctatgaaatctgaattctttccagccagaacgagcataactataaaatagaaattgtttgttcttgtgtgaataaaattgctgttattcaagacggcagtgcgagcttctcaatgttgaaactaaacatttgactgttattagcttctgcaccaattagttataccagttcactgaacttcttctctcaactgccacagacgaatgtaggatggtacaaacatgcatgaaccatcgcattcacacaaagcaattttcagaaccttgtactacatatatacggctgggccagaacgcagctgtttggcttttattaaattcttctcaaaatacacatcacataaatcatatattcctctctatacttgccaacaatcaactaacctgcaacaaagcagaggcctaaacacgaagacggtcattcagcaacgtaggacactgacagaattattggatctacttcccggatatttagagattgccactactacattcgatcccgccggactccggcgaccggccggccgatcaggcggcggtgacggcgatcttcatgccggcctggcagtggccggggaagctgcagatgaagtagttggtgccgcgcgccagggtgacgcggtcgctgcccgacttgtacaccttggcacccctcggcgcgctgcacgacttgtaccccgccgcgttcaccgccaccacgttgtgcgccgacgggctgtacttgaacactgcaacacgcatggatacgcacaacattcgtcacattgatgagatcatgagagcgatgcgagatatatgcaatcgtgtcaagattattatctcccgattaacatttgattagcagtaatcatcgatctacagcctaatcacatttgggtattcaggcatgtaaaaaattcctcaagttcgttatgtgaggacactttgggcattcagaaaaaaatggatcggggtaacgacgatggtatatttttctaggataaaggttcgtcaatggcaaaacatcgaacatggcatttgtctgtggccgtgtgcttacaaggggaaaaatacaatgctctgttgcagcctgtagaggcagttttgtgcacgtcacacacagtagacgccgaactcgtcaagcgaaagagatatttacaaaaaccatccataagtcacttaaaacttaacatttcacattataagttattttattaaatacgcattgactactcaattttgttctaaagaccatcccactgcacacatgtttaaccatatcaatatatttttataaattgtgagccgtcaatacgatctttattgaatttaaatacttataggagtatagtcttgacctttttttagagattctacattgaaatatgaataataagtctaatgcaagtacttatccaagattggcttagctagcttaacctttgatggttctacatcagtgatacggggccctttcagttcagtaagtgcacattagtgttttttacaataatttctaggggtgaacagttgcaactaaataatttatggggcggctttctgtaaatttcccccaaaataaaagttgggatagtcgctagtgccaagcaaagcaaccagccaaccatatgcacacgccgagccgcgagtggttgctcgatcgaccaggtccaggtgcaatgcaatcggtcagttggtgactcattcatgagccgcagtgcagtagtcgtacgtgtgtcacgtaaacagttaggtagcgcaccacttacgcgccgcgctagttggcgacacgaaaacggtttaaaaaaagagaaagcgttcaaacgacacgatcgacgagaaactgaatcgatcgatcgaactcaccgagcacgtcgccggcgcggaagcgcttgcccctgagccagccgccggagttgaagccccagccgccgcggtcgccgacggtgtacacggccgactcggcgagctcgccgtggaggagcacgcagaggaggaccatcgccagcacggcggcgttgcgtcgtcctgcagcactgccccttccctgagccatcgccagtagctgatcgctttgcaacaattgactgaccgtttactactgatctcagctagggggtgcaagtagtgctgagcgagtgagtgtgaggcgagtggtggtagtgcccaagttctggcgacgcgagcttccctttataggggagtagtacaccccacccacccaccgatagccatcactgaacacacacttactcctacatgccatgaaataaataggaaattgattaattaaccaaaattagagcttgtggctgtcaattgtacatatgtgtgaaaactgtgaaactgagctcagcgaccgcgtgggaattgggaatgataggatctgcgacgcgccggcgacacagtgcaactagcgagctagcctggcagctgggaggaaaccacgacttagtgggagtgaattttaatccctcgaagagatattcctgtgtttttttcctttcaaattcgatacaaatagttaaaaaaaattataaaaaattgataatataaagtatatagtaaaatcgataggtaataaaaattaagtttaaatactcggctttagtgaaaaattcagatgtgatccgtataatactattcatatgctgatatttttatatctcgatatatgagttgagtttgaacttaatattttgtggggttatatagatatgttgtataagtgttattaaatttttccacaattttttatactccctccattccattatataaggcgcaactattttttttaaatgtttcataatataattaaggaatacatgaatacatgccattaactagcattttctttcgaatcctccatactcaatatatttaattctattggttgcatgagtgatccaaactatgagatgataataattatttcttggtctttagattaagagtggttgagccttttactccctccgtactcataaaggaagtcgttttggacagcgacacggtctctaaaatacaactttgacttcttatttctataaaaatatttattgaaaagtgatatatgtatacttttatgaaagtatttttcaagacaaatctattcatataatttttaaattttcaaactcaacaatttaagagttattcatgatttatatttccaaggtttgacttaaacattgtcctaaacgactatctttattaatacggtgggagtattttggaatggaggaagtaactatttaaataatttttaagcaaatgagggatatcccatcgagtgatcaaaatagtttcccgaactttggtagaccaaccacccacatggcggcaccgagaagtggacataacttttggactaataaaccacgaaagttgagcgcaagctggtcaagggccgatcgagaggaaaaacgacgagcaaaacaccgctgcgatgggaaaacgaagagacgacggtgcggggttggggcaattgagggtacgagtacgacgactaatttgtactacgtacgacgccggtcgcctcgctgtctcccggatgttgtctggtacgtttccattttggtagagacctcgtcgtagccagttaggtcaagtcggttcgctttgactttgtgggacagtcctgcttggttagactgtcagtgcgtggtcagcttacgtacgcgttgggctgcaaggtttgtgaactgaaaattgctcttatacctaaagtttagttaagggtgtgtttaagaggtgtgctcgcatttgtcccaaagtttggctttgtaaatactaaaattgtcccctagcttatgtgtctgcttctgtttaggactagtcgataaatcttcttctaaaaagttattaaacataaatacaatataattataattatagtgtaattatattttttaaactttatataactacattataatttatatatataactttagaaaagggtattagtgatgtggtagtgggttcatggaatcgaagctcttcacctatacatgtgccgtgttttttcctctttgcacgactatcgaagcaaatctaacaattcaaattacgtgaaggttacatacaagtaatattaaagttacatgcaaattataatgttattacattacaattataatatatttatatttgttaaattttaaagaaaatttgtcaacaaacatataacaaaatcattttgttttgccaacacaccatgtaaagcaccaaatttatcctcttcttcatcctttcctagctcatctccattctcttctcactgcctaactctatccatacacatcaccatcctcagttccaaccaattgtacatctcagctgcaggaagctcgttgcacgaggggatggccaggatgcccatccctacagctaaagctcgctataagggcaatagcagtgcgtctggccctcatcaagaagcccaagcttccacgtaggtaaaaagcaaatgaagctcccatctttcagtgtgcgtgtagttttggtgggcatgttaccatttttttctcaggccagccccaccatgaaatcactttccccactcaactctttcctcaatcgaatctcacacacctaccgcaccgcgccgctgctcctttcccaacctctataccgcgacgccactccttccccaaccttagcactgcgccgcttcagatcgatccagtgctgcagcttcctatcgtcctcccggtagcactactcgaggcaggaccgggccgatgagctcccaaagaaggcagagatcaggatgggtgagatcgatgcagccggcaagctcctggcgacacggattgaggcgggacagggccgacgagctacctccagggccgcagatcgggatgggtgaggtcgaggtcgtcgtcgccttcattcgtcggtcttcctagtatgcttcctgcttgcctccatggctccactgctaccaccatctcctgctcgagcttccaatgaattcggtcatggggggaggggccacacgcccctgggaggggggagggggaaccacaacgcggcaaggccatgacctccacaacatggcgcgccattctcttgcctgccctcaagttgttagagagccgtcgaaataacgagtgcccaaactaggctctgcgaactttgtttggtcacacgcgatgtctagctggccgcagatctccaatgtgtcgagggttggccgaatgacacgtcggagcactgtgaatgacctgaaagcttatgcaggctcccaacgaaaaagagggtacgcatgagttcaagtgtgaggtggtgctggtgaagcccatgctcagcatgcgtcagtggtggagcttggtaacggctcgatcagggtggtcagtagaggaataagatgaggaaagggggctttattttaagggttcattagatccatgccattaaaattttaccggttttgaaatataccattactatttgcgtatttgtaacgatgccattgctacttgtttctaatcttagcggtgccactgagatacgcattttgcatgtattggacaaaaataccctcatcttctacctctctctctcttccccatcttctaccgtctctctcttctcactacgccgctcgctccgccgccatcccgctgcgcgcgctgcagcttgctccaccgccgcgccgctgctgctgccgccgccgagccgcgtctcgctgtcgctgccgagccgtgtcgcgccgttgttgctgctgtgccgccgcgccgccgccgacgcaccgtgctgcgttgctgccgctactaccgttgacgcgccgcgtcgcccctgagaaggaagagaggaggaaggagaaaggggaagaagtaagacgaggggaaaatgggtagtttggtccatttttatctggaaatgcatccaaggggtaagtagtggtatcttttgaatatgtgtgaaattataatggcatatttccaaatacatgaatactagtggtatatttcaaaaccataaaaattttaatggcatgtatccaattaacccttatttgaatataggttgtgtttagttcacttcaaacttccaacttttccgtcacatcaaatgtttggacacatgcatggagcattaagtgtagacgaaaaaccaattgcacagtttgcttgtaaattatgataccaatcttttgagcctaattacaccatgatttggcaatgtgacactacagtaagcatttgctaatgatagattaattaggcttaatagatttgtctcgcagtttacaagcggaatctgtaatttgttttgttattagtctatgtttaaatgtgtgtacacatacatcaaaaaaatttggatggggaactaaacacggccatactaccttcgtcttagatataaaaatctaaaatcggatgaaatatattctaatactacaattctggctatgtctttttttttcagattcataatattataaaatgttttctttggatctagattcatatatattttagaatgaagatagtagatggcattgttgatttttggctaagtttaacattcatattttttttaaaaaaataaatataattgattttagtgtgaattatattaatattaattagacgtactttaagcatttcttatatttctacgtatttactaaaaaatttagtaagttgaatagtaaaacgtatatctaaaattcacggtgtcatccattaaaaatcatgaggagcatttcacctggtttctggcaaaagaaaagacgtacagacaccttaactatggagtaattttgcaaaccaatgagttaattatttgcgactcttacaagtggtgattagaatttgtcactggacccatatatcatagacacatgaaggcccacatgtctattgagtgacaaataattaagagcaaattgcaccggctgtacatgaacttgtcgggtgtgtgcaatctagtgtatgaacttgtaaaatactcgttttggtatatgaacttatcttgtgcgtgcgaactaaggtcaaaagtacaataaatgcacgattaattttattgatttaggtgctgattaggatactgcgtaaatatatatacgagaaggttgctacttagacatacacctattcaataaaaagataaaataagataaaatgagatatagcgattgtagagaaagatataaaaaaactgagcaataatacaaggttagaaacatacggaatttaagataaagtagagaataaatttataaatatagtatgttttatgcatactcactgtacgtatgtacgccaccttctaaccaacatcagctaggtaaatttaaccttgccaagccattttggcacggattagataagttcgtgtactaaaataagcattttacaagttcatgtattaaattacaaccacctaataaatttatgtaccaccaatgcaatttactcaataattaattgctacatcttaaatttacgaaaagttaaatttccccaaatgtaagtacacccttcaagtttagagtttagccatgaatgtttggatgtatcttatgcactttgcacctgagataggtctttagttttaggatagcgggtattgtatttgtatcatctcggctggaaacgaaacttccattaattgagtgattatggaggttgccaattcaatactaatgcacatttaattgactggttgcaagctggtagtggtacaccacttgccactgccactacatagtactagtacatatattcgatttttgtaattgttagttagggcatgtctagatcccgcctcaaaattttacaccttatcacattgaacgtttaaatacatgtataaagtattatatataggctaataaaataactaattacacagattgtgattaatttgcgagatgaatcttttaagcctaattgctccatgatttgataatgtggtgctatagtaaacatgtgctaatgacgaattaattaggcttaataaatttgtcttacggtttactgacggattctgtaattagtttttttattattgcccgaacaccccatgcgacaccctatataatacccgatgtgacacgcccaaactttacaaccttatatctaaatacccccttaattaagtggatgttctattgtactacagcatactgcaccctctgcatgcccatacatcataaaaacactatgaagattttgtacagaactaagcagccttattttttcgcttatgcttatgcttttacttattagctatactttaaatttttaaacttaaatttagagttgattttgaggttttctcattaaagtttatttttcagcatttgcttttagattgctaagaacatgtatataaaatttttatttataaattattttttgtttgtaaatatgttgtttggctaaacgatgggagacttcttctgtgcgtgcatgtcactcgccaactactaactgacttgctttggatggactccttccagaatgtttaccattccacgctcaccctattttcttgttacgcttaatgggaaactgccaaagaaagcaggtcaactcgagtccccgaagtccaaaccatttgagtgcagtttccaaatcacattcatgacgaacggttggatcaatgagctcccatactgcaggcctttcgcagcacgtctggtcctgaaaagaactttgaagtggttggctgcacgaaagattggcacagaagaactcggtcgatcgtgtcgtctctgaattgttaggtgtcagataaagtactcatgcgtaagaacacagcatacctaccgcatgagagggggttccattgctccaacgcatactgtagatgttttatttgtacatgttgatcattcaacacttccagtatgtgccacactaatgaagaagtgacctttgctaggtcatgtagaaattaaattagtcccggttcgattagaaatcgggagtaaaaatatctttagttctggttttaaagctcacagatactttttgatttttagtcttagttggtgttaccaactgtaactaaagataatttttagtaccggttcaatagttgtcaggtcccaacgaacttaccaaccaggactaaagatagatctttaatcccgattggtatcaccaaccgggaataaatatctctctcccacatcatccccatctctcgctctctcttccttatctcctcgttgcgcacacgcacgcctcctcttatcttcttatcttctactccttctcctccttccctccactctcctccgatcctctcttcccctccacctctacgtcggcggcaggcagcgccagatggcaggggatgggaggcggggggagacagtggggaggagagggcagcagacgcgcacggatgggaggcggcgggcagcggcggcgcacacggaggggaggtggcaggcggcgggcaagccggagggaaagcgatagccggtgggatgacttttagattttgtgatgtaaatttgtggatgattttagatattttttgaatttgtagatgattttgtgatgcaaatttgtagattatttttagatgcttttgtgaagttgcggatgattttgtgatgtcaatttgtggatgattttattattgagttcggttcaaaatcaatatacaagtagcaaaaaataataaaataaataaaataaaaagcgtaggccacgtggcgctaccatatttagtcccggattcggggtcctggtttgtaaccttggactaaagaccacttctccagtagtgccagttcgatagtactccctccgtcctattttaagtgtaaccataagtttctgttgaccatctgtcttatttgaaaaaattttataattagtatttttattgttacgagatgataaaacatgaataatactttatacatgacttatatttttaattattttaaaaaaaaattcaaataagatgaacggtcaaaattgtgtacgaaaaattatgtctgcacttagaatcgaacggagggagtagctacgaaggtggagatatttaaccatttgccacatttagatgtggcaattaactttttgccactggacccacatgtcatacacacatgtgggtccacatgtcattgagataggggtggcaaatagttaaaagcccccgcccaaatgacacaacatgcatgcaggtctcatcagtcactgtattggatggaggccctgtttagttcccaaaaactttttcccaaaaacatcacatcgaatctttgacacatgtatggagtattaataaatatagataaattaaaaaactaattgcacggttaggggggaaatcgtgagacaaatcttttgagcctaattagtccataattagccataagtgctacagtaacctatatttgctaataacggattaattaggcttaaaagattcgtctcgcggtttccaggcgagttatgaaattagttttttcatttgtgtccgaaaacctcttccgacatgcggtcaaacgtccgatgtgacacccaaaaaatttcttttcgtgaactaaacaggcccggataatgcttcaggaaaggaagaagagaacgacagttcggtacagtgtcaaggcgagaagaaacagaaccatgctgttgtaagagcagtagaaagaagagaaaacacagtacaaacatatcatttcattattccagttgtaatttctactggatactaccagtaataaaccgtcgtaaatgttttaattgtaatacttcctccgtactcgtaaaagaagtcgtttagaacatcgacacggtctccaaaacacaactttaacttcttatttctataaaaatatttattgaaaagtgatatatctatacttttatgaaagtatttttcaagataaatttatacatataatttgttacattttcaaactcaacaacttgagaattatttattgatttatatttccaaagtttgacttaaacattatcctaaacgactttctttatgagtatggagggagtatatggttctattgttgttgaaatgtccttttggatcgatccaatagctagctactatctccttttcagattataatacattctagcattgtccatattcatatagatattactccctctgtaccataatataagggattttgagtttttgtttgcactatttgaccactcgtcttattcaaaaaaatttagaattattatttatttttttatttactttattatccaaagtattttaagtacaactttttgttttttatatttgcataaattttttgaataagacgagtggtcaaacag

SEQ ID NO: 4849 - DNA, 43119 bp, Oryza sativa
ggggggtggtgtttggttagaggagatcgcacggagggggactgaccgctctgtcggtttttttggtaattttgggtgcgtctgagccaaccgttcgggcaagagctcgtaaaccctccctgccctaaaaatattttcagctcactgtactaaaaataaatttatttttaataattattatattagagtagagtactagacagatctatattgtttattggaatttaacgaaatagggtaatctagttcttttgtttttttaaagtatggaatagataaaattgaatttattttaggacggtggaggtagtacttcggttcaaaactactccaatgctatggctcatattgatatatgaattttgaactagtaaacaattgaaatgttacgtaagcatgatcaatagataatatgcccaatagtagcatgaccccgcctcctttccttcacagcgttcggcgtcctatgcatccaaagtcattgtgttttggcggtggaatacataagtaaacaataagtaaacaatatgttagtatttagttatgcaaaacattgttgccaagacttactcaactcacgactttcacctgcttccggtgataattaccactatcatataaatgggagagtagagtaccaagatatagggattagctagcagatacggtttatttattacctttacttgataaaacatgagaggtgtaccaccttttgcctaaagtaaagaattcaaacgtttgcgacccaatttaatagcgccagggatgatttaaacacatccttagtggaacaacggcttcactcctaaaatgaaatcattaagaacccacgctcaatctctccacattgttagtccctcatgcagctttgaattaaatatatgatgtggcctcgctcattttttaagggttgtgtatgggctcttccctatatccgcaaagagtttagtttaaaactattgtgtctgtttgatcctaagctgcaaatgagtggaatttgatgttgaatttcaatcataaacttttgagagcaggaggttttgcctcaactcaatccatgaatgttatttcatttccgctgaattcaactcagtcttcatcctaccctagagttatctctcaaagttgaagctaggaggtatttgatttattggatttcgagccccttttcttgctccttgccattagcgcaaccctttttattttcttagctttatttgaagtatggtttgttacctgaaaagatactcatcatattgctgcggtacattgggcatattagcgggcctattccatcttagtatccgtccacctcaacgtctatacaaaggattacgtatggacaatattgaaactgtactttccagtagtatcgctgctgtttttttgcagctttcgtagttgccggaactatgtgatatgggtcagctctcgcaagcttattagagcattgaattgagctctactaagagtaagatggcttttattctactaaatccaaagaatgctggctagggtgacgctcgtgcttctttcgagtaaggcaaacttagtaaggggacttgtcttgtatagtgggcagcggatctcttctgttcagttctttccctgctacgctactttgtgatgtatcctgcctgccatcacttcctatcgtcaagtaagctgattgagtgattccaggtggtagtcatccttgtaatacctcatgaagaagcaaggctgcgctctgcgcatattgttcttcagatcgattgtgtcacaaggcagacagatagactcctttcccgctgctaagggagagcaagaaactaaatcaaatgattgtttttttcaccagcgccctttttttgcgggtactaagagtcctctcactaccaatctgcagacatcatcatttggttgggtcttgccggtatcaacatataataagcactcttatcaataaattaggttaggtattgtgcggttacctaaagatacctgctcaacgtagatgcaggggtagaaaggctgattcaaatttagcgccaactcttttgtagtgaccacagagtcccgggttgctttggtgcacccaacccgtaagtattgtgttgtacaactctcccccaacgtagattggtggcaatcaaccatgaacaaagcactacggtattgactcccaactgaatcttctatacctttaaaaataagcaaccataaaaccatcctctcagcataacaatctataataggcagataaaaaaatatctagttaaggtaatcaacatatcaaactgttatatttatctcggaatgaatacctcaatactatacaattaccacatcatgcatttgatatatacataggcaaaacaatacatgtgtaaataccaggtgaaaaatgggcacgcatagcactcttgtagtctcagtgaaatctgactacggtcaatatgaaatagattatgaagcagattatttctacggattatctacttcattataggaataaattaaatattttaataaataaacctaacaaaatcaagtggtctcattaatataataaaagaaagttttggtagaaactgtacttttttagtgtggagcaaataatcccattcaacaatccagtaaataattaaaaacaaagcctcaaatccaaggttagtcataacaagagaatgaaccattcaaattttcaaaaccatctgtgtaaataagcatatgtactgcattattataccaataaaattgctatggtagtccctggcaaactaatttttgttggaccaaatgcaacgggccggtaagccaaacatgtagatttatgcacctgtttttatctccttgggacttttctttaccaaagaagaggacaactgatccatttcttatcctcaataactgcaaaattcactaatctataaactgttcttgcccgagcacaatccacacacgtctggattgaaatttacaacactaagcgtaatttgttaacttggtcattggcaactgttacattcatagttactaatgaatgtaactaacacgacgccgaatgtttacatgagtgaaacaaacattggtacataacgtccgagcatagcatttgcatgagctgatcagaagtcctcaagcatgtatcaagtgtaacaacagcctcgaggcaaacaaaaatcaagggaaatggagaaaaagtgaaacaaaaactcaaccatgtataacactacttattccttacaatcagtaaacatcctggtaaaatatatcatagcgaagtcttaagagagactagaaagaatataagggagcatatctaccgacgcttatctcgactgcgtaggggagcagaggaggcctgaagcatctgcaccaaccacggcaagctcacatatggtacaaagctgcccttcgatcgaaggaacaaaccgggagccacagtacgggcaggaaacatccttctggccacggtagattggaacatacgtggcgccacagacaacaaatggatttctgtagtcatagttcagctcagagctatccttcttgccactgcactgctgctgcacctgtcgagccctccttgcttgggcctcattagggttgttctccagaagcatccttgcaaagtgctctgcagtagcgaagttcttttgcttgtagcacagacccatagcgcttccaagcacaagcctcatatgaactctctgaagcttgcagttagtgaaataagcagccaattcttgttggcggttgacatcatctctcaactccttcctcttaagttccatcctcaggccaagaacatactccctcacaatctcgatcaactctttcacttcatccacttccctcctcgagtctaccacgataagagggatggtatgcaagatgctaaggaactgcctcagggcttctgggaacttaccatctgtggtggccttataggcagccttgagtctgtcttccatttgtgggaaggtgaaaacaagtgcaggagggcctctcacgttaggacttgcagactcgctccaacctttctcaacagcgattggtattatgggggcagttgcaagtgcacgaagatatgagtggctgcccatgtgcagatcaacaaacaggggcttgaggggagcaaagttttttatgcccaactggcggctaagcaacctcattgcagtgtcaaagttccctgctgcggcatgctccccagcaagagaagatttctgagtccaaatcaggctgacaggcatgcctggtggaggagcaacgaagaccgctgagcgtgcattgccagcattttttggggtctctgcttcaggcagaagttccagatcttctaggtcccaaccaccttcctcgccatcctcctcatttgcttcaccctcctcagcatcaaaaccgtcaccaccattcgccatcgcttcgcttgcatcaacaatatccaggtcctcatcaccccagtcagcaccagcagcttcatcgtcttcctcaagttcagccttcccagtagcatccagtccaccctcaaagataccatgcatcacccgaagcaatggccaatcaccactggctgtaagaggagcaggggggatcaaaagagagcgagcttttccttcaggaagagaaggaatattttcacccagctcagcggcaagcctatcagcaatttctgtgagcccatgggtggtagcagtaatataagcaagaggtagctgtccagcattctctaggatctcaactctcttcaacgcatcaccaagatacagagcattgtggaattgacccatcaggttattgttctgtccagcaattttgcacatgaaacccaccttgtccatgtaaccagtaataagatataggaaagcaagcctctcaaaattcttcgtacgttggtatgcatattccacaataccaacatttccctgcctcagggcctcaattcccaacctgtaccagtgatccttgtcatcaatctcttttgcagaagcaactgcgatttggatgttaccactctcaagagcaaggttaaatcttgtcttctcatctttcacaaagtggagggcaacttctggaaagcctttctgttgtaaataagaaatcacagcttgcccacacagctgggaattcttgatcatactcatcacatgatcataccgtttgcgtagaagggccagcttgaaaatgtactcagatgcatcaactgtgaccagcttgttcttaccatcacgatctagacagaatatattgttcccaataacccttgttatgtatataggaacatcgagggttttaataatcccactatctccattgggaaggcaatacttgatatgattcagggtagtgtaaataaacacaccattctcatcccaggcaccacttttcacacgaatggtttcgtgcagtgtacagcgatggacgagcttcttgtttgctataaccactgcatgcttgctcagcagtgcgacagattccatatcactagaccaaacaacatatttaacagaaggtgcctggagctcaccaagaattaacctttgctgcagatcaaagatggtcactcggtcttcggctttgcacagcaagttaccagtcccagcataataaattgcatccgtggcaataggaagagggcttttctttacgatttcattcttaagattcttcaccaaaacttgattgctactcttctcaaggactgcaaacctgttgcgtgccacgaaaacagctgacccaccagctcccttctttgcatcctgcaaatagtcagccctgccagcagaatccttgggaacaatgtagagttcgtatgagcctccatccacatcagagcaaatcaggacagcattttcagttggactgtaagatagtgtcttgggtgactggttcaagctcactgatccaggtcttcttattggagcaagctgaacttccttctgtgtggtgaattcaaaaaaacgaagaaaacggtccttcacatagaaaacagtatctccactcacagagaaagctggacgttccctctccaatttaaacacaatcataccactgtcatgaccagcggcaagaagattcatctcagggtgagcagaaagaatccagaaacgatcatgctcccgcctgaacgtttgaataccggttcgctttgtggcatcccagatgcgaatgcttttgtcctctgagttggacactatgatgtcttgctttgcatggaacatcacacaggacacgttattcatgtgcccccgcaaagtatcaacttcccaagccttggtgtctgtcaaaaaacagcacatttagattgcatcacctattatccctttaaataatgcaatggtgatagtggaagtgaatgttccacaccccacaaagtttgcagcacatcttttttacttccttgaagttctttagtttgttaatatcttattctcatctctaaatcaagtttatcacagaaaggtctacggtggtaaaactgacacatatatatgtagagtaatgtaaaaatcattagtgctacttgtacctagaataacaaagatgaagggtgtgttgaatgaaaaagtcataattcatttgtttcaaacaatattagcacatgtacaattcatcttgcctgttgcaagtagcaatgcatggttatttagctagttcaaatattttgattgctggcatgcatatactttttattttttttaagtttgaacaatatacagaaaagtaaagtgctatacagcaacaataaccacctttagtcctactggcactagtttactaactggaaacatctcttgcattctgcttgtttgctgacaagttagttcagattaatgtagacatgggggaaacgctaattagttcttctgtcaaagaaagacaaatcaaggaacacaaaataattcataataaaagcagatgcataattctgtagctctgttctatgaaaaatgatggatgcaaacaaaaataatgaagttgtttatctaaggaaaaaaaaggatgtagtagcagtattaccattcattctccatatcttcacttgccgatcatctgccccagaaacaattagtggcaacgtgggatgaaatgaagcccagttgaccccacgatcatgcccttccaacacatattttacaaccgcgtcaacacctccaaacagatctgtgttcatctgggtgagacgcaggatgtcatccgcaggtgacactgacttcttcctcaaagcactaatatcccagacacggacagtctgatcaagagatgctgaaacaaccagatcctccttagggtggaaagatgcacacatgacataatggttatgcccagtgagcacagccacacatgtgcgtgactgccagttccagatccggattgtctggtcatcactggcacttacgatccacgggcactcgtggtggaattgcaccgtgcgaatgtagtcaaggtggccatgaagcgtgaagaggcaacggtgtgtcttgtaattccataccttaatcttgtaatcatcacctgcaatgcatcacggaaaacttagaagagttcaggagttgttcgatcttattttatgacagttccaaatcatatgggccactgttatgccaacaatacagatgaaactggtgtgtgacttagtttcaagttccaacaatccaaatgttccatgattgccaaccccaccattgctatggtatcagaaatacaaccatggaagctgctactcttcagttaaagctatagatcgactctcatgtttgaaaagattgtaaaatcgatggagatcctgccatcctgctggtcataaacatgaaccaaatggcccctgaaggttacaaaccaacaatccaccgaacagttcagcgtaagcagatatgataaagctcgcaagcactagatccgactaacccaacccaccaaccaggatccttgacaaccaaccaccactccaaatcaaacgcgatctaatcggatcacagagacaactagaggcctcgagacgtcctccgatccagggcaggatccgagcgaaacaagcaacacgccacgaagcccatgcccgccgccccgcgagggagagagatctagcgggtctactcacctccggagacgaagagcggctgcgtggcgtggaagtggacgccgcggacggggccgtcgtgctcgtcgaagcggtcgaggagggtgcccatgcggtagtcccacatctggatcaccccgctgtggaggctggccaggatccatggccgccgcgggtggaagctcagccccttcacccggttgctcttcgtctcgaacttggtcagcatcttcgcttggccctcccgcccctgatcgtcgtctccggcgacggcgggcgcggcggcggaggcgaacccctagccccggaggcggagacgagcggaggagaggggaggcgctggatctggggcggggtggagggaggagagagagagagaggatggcatggttgtgagattgccacttaagcagtcacttccgatcttagccgttcaaggtgcaatcaacggcggatgcatttccctgttttcctaaacaccagaaccgagagaacggacaatatgccactctatacgtggggattcgataaaatgccactcaatatgatgcaccggataaaatgtcactcagtatgttggtatcaggtgaaataccactttgaacctatgttgatttatttttggatgaaaagaatgcttgttgtatcaatcaaattggccagacgcccattttgatttgatatcagcgtagttggcccattttgatttgatattagtgtagttggcccattttgatttgatattattgtagttcaaccggctaaatttcttgtggtaaaaccaaccccctaagtttaagtcctagtcttgacgttagtgcttataattatggctagttattattttccagtgatagataatgaacccgccaacaatgaaatgctcgtggtgacttcgtcaatcttaccgacccaatctttcggaggtgctcatagaggtaaggtgagtgccgtgtgcacgttataaatgcttgtgtttgtactgtgtttcaaaaaaatatatgccttaccaaattattgataccttaaaagtactttagttcctattaaaaagcactttggttagtgtttggtttgctattaaagtgttccaataacacatgtctatattgcttttttaaaaaagttagtgctcgtagtgaacttgccacatcacctactctcattataaattttacaaaataccctttattaaatgtattaatattaagaaacaatcaaatctaaatgaatatctgtcaggattacggataagacatatctcgtatcctacaattaaccaagtatattagatcggtatacctcatatcccaagatatgtttctatatgcgataaggacatatataaaatattataggaaatatccttatgagctggagactactagagtcctactcgggaaggactaggactattctatatcgtgcagggttcattgtttccgagttcaacttggagactaaggcaatccacggtataaaaggcatacccctggaggggttctggattatcgaatcatagcgccaacacgccgaccatagttttcgaagccgaaggacccaagctgaagccgccgggagatctcatcgaacaatctcgactagggtctcgtcggtctcaacgagttcgtatgttctctctgtattctgtggtcttccatatcaatcccatataaactgaattagggttattattttacgaggggccttaaccaatataatcattgtattttgtctattttaatgtcgtatcgtatagatcatcgtaccaacataccctaataccctatttatctggtctacgggtatcccccgttgacaatatccatatataaaatcaaaataaggggaatatttcctatagaaaaggaatgagtaacacatttcatgaaaaatttattttagaaaatattgtaatgtattttcttttatccgtagcaaaacatatatattcaattagtagataaaaacaaattggcagtactgaaatttgcatgtgttgacattgctaatattttgtcatggtagcaaactaaataagcccaccatcttgccaaaattttgtttaaagagtggccacgtcttaggcaagatagtaaatattaaaccatggcatgattgaatagctgcttttaaaaagttaggaaagtatagtagaaattaagcaaacaccctatgcttctgttgtgtcaatgatttcttaagacagatttttgatggtacaccaaagcttcagtgtagaggattaggattagtgactttaattagacatgttgttttgcgtcgtgacggaggttcaaacgtcccaacgtcaagaaaactaacttcccaactttagcaattgattgcatgctgctctctttgaagtttggaccatacatacatacatacatacatacatacatacatacatatatatatatatatatatatatatatatatatatatatatataataagctaaaattggaacgatgtgatgaaaaagttgaaagtttatgtgtagaaagttttgatgtgatgtaaaagttggaagtttgaagaaaaaagttgggaactaaactaggccttaggtttaaaaaaattgcaagtcaagatttaaaacttttaacttagttttaaaaactttcaagtgaagattttaaaccttaactcaaatttaaaaacttttaactaaaattttgaaagctttttggatttgaaacaaaatcagatcaatatttgaaaaatatcaactcaggtatgaaaacttttaaatcaaaattaaaaactttcatcttaaaattcagaacgttcaaataaaatttgaaaactttcataccaaaattcaaaatattcaactcaaatttaaaaaaactatcaactgaaattggagatgagaatatttaatttctaaactaaaaaaatagtgaaaaaagtcaaaaaccgcgtctggtcaattagctttggaaagagtacgaattaccccctcacccaccccgtactatcgtggttgaccgaattaccccctaaactcaaaaaccagatatctctcaccatgaacttttaataccggataagttacccccctcgatccaatccattgtaagcaaagaagtcatctaaactcgaatattggatttcaaatcccgtctggttttcgcgcctcgatcaatgaaatctcactctaatactgaaactttcaggctctcgaaacactcacttcatagcacataatatgctatggtccttcaacccttcacaaccaagactatcgacgactcaacaagaaaagaaattgacaacattaaatattttttacataataacaaattttattgaagttaatcaattacataaaaacgataaccatcaatacccttttacagtatcatatgtcatacactacccgaattcccgaaaccatgttcaacgttcctttccattcagacagatccagcaggctcagcctcctctcggttgcacagcacaacactaggcataaaatctcatcatcttcttctcgttttccacacgcatgcttttcaaactgctaaacggtgttttttttaaaaaaagcttcaatacgaaagttgcttaaaaaatcatattgattcgttttttaaaaaattaacaaatacttaattaaccacacgctaatggacggttcgatgaacgcatcaggttgggaagccaggcttccgaacgcagcctaatccagcggcggagtactgcccaggagaagcgttctgaacacatgccccctcctgaaacggcaggaacatggacgtgggcacgtaacagcctgtgaatgcagccaaacaccgctgaaaattcccaacaaacttcgcccgtttccaaaggctgctacgacttcaccataaacaaaagtcacctacccacagcaagaagcactcactgatgactaatccctgagagaacttatcagctaaacacaatcaagtagtgtaatcaacagctggaacagattttgcccagcactccatccatccgttccgaaataaactacactaaaataaataatgtgttatttatatgacagtaccttgtcgcaaaataaagatatttctccacatatctcctcctatcaaccagtcacaaccattttctttcacccatttttatcttcttaaccaattacacccttcctctaatcattcttacatattttcttaatatctatattaaccctataaatacttattttttgaaatagagaaagtataacaaatattgatatatccttagtttaatttattttaaaacggagatatatcttagtttttttttttgcgtgacagcctgacaggcaagcgtgagacagaccccgtgaatgtgtgatgccccccgagtgcccagggaccctacctacctccacctgcgacagctgctgctgctgcgtgaaggcacgcccatgacgaacctaggacctcgtcttcagtgtcgccatcacccggcagcacatgagcacacaacaactttgatcatcatcatcaccattgttatgcatcttatccggtggagattggagaaactgattgagatcctcctcgttgtcgtcgtggatggaaggaggccttctttctttctccgcgtcagcaggctgatcgctcagtttcggtccaaaagcaaaagagagagagacatcgcattctcagattctccgcatcgtctgtggtacaggaaatttgcgtggaaaaattggtcgccgagcaggtgagcgagcgagtgaccgcgatttcggtcgtgttcttgtccgtaagtctgtccgaatttatcagattgatgctgcagattgcgttcaggtctttcgacagtccaactgtaacatccgcggttcatcacactgtaacttcacacgccaacagctcagacatttctaccaggagacgaaacgaatagattgacagctcaagacacgctaagcaacgatattggaacacttcatcaacaaaactcgggtcacctttggaagctagtaactgtacaggattttcaccggaactagttcaattcccgtgagaaaatcctccgaaaatccttattccataggagggatcaagctgaagacgatgggcattgatcatccttatggatcaagctgaagacaatgagcattgaccatcatcaattttgcagcaggaacaacagcaaacaacagggaagcagtgagtcctttgcagttcttgcttgaaatcaaccactacaatgtcaaaagatctaggcagaagctaaaatgatcaatgatcaatacagtcatacactgaaacaagaagcacaaacccggacagtatctcccccgaatcaaaacgatcaactaaaaattgcattgcaatttctgggcgtgcgtgacaacagatacaggatacaccaccgggaagcaaaggctgctccggcgacaaaagggtagcagcaacaccacgaactgaaaacacaccacctccggcggcaaccggcaatcgccgtcgtcgtcgccgtcatcgtcatcgtccagcacctacacacgctcctccctgaattagaacaacacgaacggagaaagaactccacatgaaacaacagcagcagcagcaggaaacttgagtgaaatgttagcgattcctctttcggccttgggcttgggcgtcgtcgtctcacacgaagccgacctcggcgaactgcgggcgcggcttggccgtcgcgccggggcgcgtcggcggcggcggcaccatcccttccgggagagggttcttgcgcgggcgccctcgcgggcgtgggatcttgggcggcgcgtgcgggtcccgcggcttgggcgggcggccacgccggcgcggcacggcgggggcggcggcggcgacggagccgtcgaccggcgcaccgacggggacggggacgggtgcggcggcggcgggtacggccgggtagcccggggggcgcaccttcgggggacggccgcggcctcgcttgggcggaggaggcggcggtaagtcgtcggccgagtcatcatcggcgaggaactcctcctcctcctcctcctcctccgccaccgccgccgccgccgccggatccgccggcggcggcggcggaggagtcgggcggagcgcgtacttcccacccgcgacggcgacgagctccccggcggctgacatccgggagaggtgcgccgcgacgagcgcggggtgcgacggcgggaggaggccgccgccgccgcgggccgcctcgatgcggcgcgcgatggcggcctggctagacccgttctcctccgccagcgacgcgatcgcctccacgatcatctgcagcaaagagaaggagaagacaacccaagaaacccggtcaattccgccacagatctgggcatctggccaggaacagctagggtttagaaagagagcgtgcctcggggtaggaggggaggacgaggtcggcggcgcggtggccagtggaagtggaggtggccatgcctggctggctggctggctggctccctccctctcgtagggttggggtggcgggggcgaggggcgctgtctccttccggcgttggtgctgcgctgtgcgcgtgtgggatttggggccgccgcgacgcggatctgagaggagaaggggggttgtggttgtggtcttgtggatgtgggggggaatggaatgcaagtacagtttagacaaggaatctgtcgggtggtaccgggccggacgaccggtcgcggctgcacgctctactcctcctgtgactccggtccggtttagggggtgtttgggataggaacttcttttttttttagagagagagagagagagtttagcccctctctcccaaacagccccttagtctattcgcaagcttaaattctactccctatgtactaaaaaaaactcaatttaaaagagagaaaaaaacagctaatgagaagctcctttgtcgtgcagtcttgtacctagctttgatcgcttgtcttatttattttttaaaaaaattaaaaacataagtcatgcataaagtactattcatattttattatcttataataataaaaatactaattataaaaagttaggtacggaaacttatggttgcatttaaaatatgacggatgtagtagttggtaataatttggataagctaggaaactcagcttcttctagtttctaattcattttatgaattctacaactataatttcttaaaatctaaataagaacctaaattgtttaagagagcctctagcagctgaggattttagaagaaactgcagctacgaaaacttctgcaaacataccctctcagtccggtcttagtctccggtcttactccggtctgatcgggctggttcggccggctcggttcagtgagctggtgattagtatactagtaggattaatatatacagtgataagcattgtttgagtggtaaagtggtttggctaattggctcgtatggtcgcatctggtttgtggtttgtgaaagtgtcaactgggcaaaggatagtctcatcagatgctggcgagtttggcggtcgttttcacgtgacttgtgacggtggtggtgttgcgtggtagcaacagctggttgatcctttttttgttactagtttggctaatagtggattttatttaatctctggtttctttattaaaaaaacttttaagctctgaaggggtcaatatcgtttgagtgcctatttactttgatcagcggaggctcataatttgcggtaactggtgctctctttgtacagctttaaattcaaaaaaattttgagttagattttcctaagagcaagtactagaagcctctaaacacaagcccaatatatcatgtaaacttagataataacgtggaggagagaaaaagaatagagagatgactagagtatccacttcttatgcaaggaacaacctccatagaaactctaaaaataatagagaaagagataaattgattggtgaaaaatatattgggactagtgtcctacaggcaatatactgtatatgttagtttttaaatttaagagtatataatatcgataaataagagctgatcactgcctctactataaaacttgatctaacttaataaatccatagatctagaactatgattacgttgataacatttgaataaaacattctgctttcatttcaaatgaaatttaaaattttaaatatctataacatgcaaacttatttttttctgtggatctgagatatgaatctataccaaacatgatataggtagccgaatgtccatgatatttactataactaaaaccttgaatgttcatgccaagtgtaagaacatctttagaccttttcaactctgttcataccgttttatatatagatactcgcacacaatttgcgtttttaatagtattttactcacattagggattagggatttatggttagtctttgtctattatgcaaagaatgtgttagagaacgcatatccatgttacatgtgcgtattattataaaaaaaactttagtcatttcattttttttaaatccccgtttgctctttccaaataaatgcttctactcatttattggaaacaaatgctaattctgtcacaaattagaataactcattttcccgatgcagtataaaaatgatgcgcttatttactggggttattttcttcatttttttaaacaactatgcgcatgtaaaaagataaaaagagatttatttaacgtgcagtccattacttcagtgggccgcgttctgcgcgagaaaaggattggaaaaagtacaccgaaggtccctcaacttggcaatgggatacaaaacatccttgaaccgtaaaaccaaatatgctgggtccgttaactatacaaaactagtcatcagaggcccttccgcggtttttatccgtgttttagtctacttgacggctgagtcagcgtgggacctacgtggaccccacatatcagctgggcacgtcatcaccctctccctttctcctctctctctctctctcactcttctcttatcttctggcgactgggcaagccggccggaggcgacggcgcagggcggcccaaggggcacctcttcaaccgggcgccgtcgccgcaccagaatggcggccagagcaggcgaagcggcgacggtggcgggcgagcacggttgcggagaggcggcgtcggcgggcgagagcggtgcggcatcggcgggctggaacgatgcgacgtcggcaggcgagagcggtggcggcggagggagcgtgcctgctcattggcgacgtcacgggcgcgcagctcccggatctcgtcctcccacctctccaccctctcctctccttgtggatcctgcacacgccaaattcacaaacaaaccagattgcatcgattgattatgctgctcgtcatcaagcaaccaaccaaaccaattattttattagcgggtgtgtgtgtccatggccatggctatggatggtggtcttacgagcagaggcgatcctcgaagtcggcggcgaggttcttgaacagctcatgccccgcctccagcatctccgacacctgcattggcattgcaatctcatcgatcgatgaaaaattcagaatgacaaatagcgaaatcaatgaatggagagaggtggacctggcgagtgaaggcgtcaatggcgaggaggatgcgctgcacgtgctcctccgtctccgccgacgccgccaccacctcctcctcctcggcgacggccatgtcgtcctccgtctccgtcatgggcccggtggtgatgttgacggcgaccccggaggaggccgccactccccctcccgcgctcccctggctcaaccatctcctcctctccctgtcctccgttgccctgcacgcatccatccatccatccatcccaaaactcagatcagattgagccatcaaattttcgacccaaatcaaaaatcaaatgcgcctcaacaactgaactgattgagacagtagatgaaatggaacaagtcgatcggaacggaatcgcgtggccttggttcgatcaaagcaacgaacgcagctgacgaccgaatccaatcccccagaacgaacgcagctgcatggactcgcggaccacgaccgccgccgcctctgctccatcgattcccgggtgcactcgccgccaacacctcacccgccgccaaccacgaccgcgcggccagcccagccccgcgtgagcgccgcatccacgaccgcctgccgctggtctcccgcgcggtccgccgcctgcgccatcctttccccatgccggagagtgtgatcggggaggacgagcccgccaccgcgttcacccgccgccgccgccttgcccttccgccaccctccccttctcccgtgctgcatcgtcggccgtcggagagaagagtgtgtgagagagagaaacagcagaaaagggagaggagggaaaagatattctgacatgtgggacccacgtgggtcccacgctaactcagccaccacgtaggccaaatccgggatcaaaaccgccgaagcacctctggttctgtacagttaagagaccctgtatatctggttttgcggttaagatgtttttttatcccgttgacaagttgagggaccttcggtgtacttttcccaaaaggattcggcgagaaaaacaagagttcgtaggcccatcagcccatcccatgagcccacctagaaaaaaaaaaccctaaaacacgcctgccgttttgatcggcccaagccaccatcgccagccaaccacagactagaggagaaggaacacttcgccggcgacggcggcggcggcggcatggccttctggcaggcgcgggacttcctcttctgcggcgtgtgcggcaccctcctcaaattcgactccgtccgctccgcctcctgccccctctgcggcttcaagcgcaaggccaaaggtcgtcgtcttccccatctctctccctgcaaagccctgggctgtgttcttcttgcggctgatgccttcgttctctttttttacggcgcagatatcgaagggaaggagacgcggtacacggtcacggctgaggtgcggccgattgctctaccctctagctcgcgcgaaaccctgggctcgtctgtttcagtcgcgaccgattttgtttcccctcaagtatctaaaatccataatgcgattcattcagtgtagtaatcctaggagatatagtttagtttgatttacgcgaggagtatatatggttgtgcggtggagcaatccagtcttgtggtttaggtaaaaggacggtttcactgtgtcgtgcttcagtatcgtatttcatatagaggaatggcttggtgattattgaatctacatggcagtgcactttagtagatttttagttttacaaatatccatgctgccttccttgggataatgcaatgcatctcttgggagctactccctctgttccaaaatataaggatttctaggttgtttagcaagtactctactaagattaggtcaaaagattttttttttctttattcattgcagttgtcaatttttgaactttgattttcttagattcccttctgaagcatctgattggctctgcgatcattgaagtgatgggaatcagtgcagaaatgcttatattgtggtacaacatttgaatcctagaaatccttatattttgaaacggagggagtattggtctgagattttattttatgtgctgagatgactcaaatggcaatatcctcatgctttcacatgcatgaatcaactgtggtaatggaatagtatgagttgtaggcaaacatcttatggagcagcaaggtaagatgtatagtgattttctggcttggcatttgtaggctactctgagtctctgattaagtcctatgctccatacttgtacacttctagtacttaacaaagacatagcacctaaaaggtgccaaatgaacattttaattttatggaccacaggtcctgcctttttaatgaactgtgcggtttcttgaatcttgtcccaaccatttatatcagatatgaaagaagatttccatggctatttatatgtagttgacattttgcatgctgttgacaggatattagaagagagctaaaacttgatccatatgtgattcttgaaacaacactgaaggaggaagacgtaattgtcgaaagagctacagtaagttaagctttttcatcaatatatagtctgatagtattttgtagttctgcacatattcataaatccttttctgcattaggtaaataaagagtgtgaaaaatgcaaaaatcctgaacttcagtattacaccaagcaggtcagctatcgatccttgaacatttgatgttcaataagcttaattttcctttttctagctttgatgcttaactactttatgaaaaatgtgtaattgcagttacggtcagcagatgaggggcaaactgttttctataagtgcgcaaactgcaggcatgagttcaatgagaaccagtagtcaccttagaatgagctttttgatcacttctacgattgtggtctaaaaaatggccatgctttgacatgacaagtgattttgaaatattttttttatgcctttgcttgaattatgacaagtaatggtgtgttcgggagaagggtttaggaacctcttccccgtgcatggaaaacggggtggcttattagtgcattattaattaagtactttaacgcatggtttagcagtttgccaaaaacattgtatgtgcttggaaaacgagggagaagaagttggtaaagtgtagtatagaacataccctaaagaatcacattactttgggccacatgtccaatcctcaatcatgctgtttttcgcgggtgctaattgcacataaccgaagtgtttctgttttctaaagattattaacctgaaactgcattttggaccttacggtgctcatatgagctctcttacttccctcaaatcctttatgccctcaacctatgccatttcaacctgttccataaatcatacatgttcagcttctaggagatatggcattgtttgctaactgcaaaaatgaaaaggtgtataagaaaggctcgtatggtttgaggggtgtactcttgtcagcaccaggattccaaattttgcgataaatgggtgcgtatcagtagcgctgtgactcccggtaagagctcatcttgagaggttttctgttgtcgtttcaaatcattttctgttgggactttcaggttatgaccaagttatcaaatccagtgattagtttttttaaggagaattttttcttaactagttcgagatgaagctgggacaaattcgcagtcccaattcctggtctaatggtctatatgaatttctggctatcttgttcttgagctcgagactgcagcttgtttggttcacgttctggttgctcatgccgtgccgagcactcgtgctacctccgtcccaaaataagtgcagccattgatattcgtgcccaatatttgaccgtccgtcttatttgaaaattttaaaaatatttagtcacaaagtactattcatgttttatcatctaatagcaataaaaatactaattataaaaaaaatttaaataaggcaaacggttaaacattaaacgtgaatagtataaaattgcacttattttggaacggagggagtagtattagctaaagctgattgtggtaaagagccaaagaggtcagatgagcagtcatgctcatgcgtgatcagaattcagaaggatttgaaatcctttgctcagtttgttccccttttcccaactcctatttctcgttttccgcgcgcacgcttttcaaactgctattttggtgcgttttttttaaaagtttctatatgaaagttgtttaaaaaaaatcatattattctatttttttaaaaaaactaataactaaataatcacgtgctaattgattgctatgtttttcgcgcggaggagtttggttcccaaccatccgaaacgaacacaaggtccgcaaaatgaacacttgtacactaaaattttggcgaggcatactcatttcagattgccgtagggatgcgaaatgcatcgcgagacccagcatttgtgtacgtgtatgagaatctcctacgtggatggtcactgtgaaaggccttagaggcaaggggttgtatgtcagttttttacttgcaacgtttaaccacttgttttatttaaattctttttgcaaatataaaaaacgaaaaattgtgcttaaagtactttagataatcaagtaagtcacaaataaaataattaataatttcaaaaaaatttaaataagacaagttgtcaaacgttgcaagcaaaaactcaaaatcccttatattattatatgacagagggagtagtagcaaacctacattatacatattacctcataatttattggttgttaacaggaatgaaattagacgtaatagccacctccactgcaaaacttaggcattcaccattctctacgagaaaagaactcaagaccgcgcagtctcccgagttccctcgattggtaaagatacagtgaatccattgactaaccaagcgaaccaaacagagcagtatacttgccccgagaaaatttgagcactgctatttaaccagatttatacccagtgaatggtattttgaagtgttgatagttccgagtacagggatacctccgagatgacaggaacttcattcggtcattcccaatcacatgccacaatgaaaaattgctcagaccatctacatcttcaagggttctatttgcatacagtaaccttgaccaaatcttggtggcacccaaggccgatgaagtgcggtaagagaagggaaaaaaacagcgctcctaggtgacgcattccaacttatggtcaaggatgtttcatcgatgatgacacgggaattgttcgaaaacaagcaacatcaaaactgtactcggctccgcgaaatgtaggaacaacctcaataggaacaagcccatgcctcacactttcatctgcaacatttgtagttactactggattaaaccatgaaacagcatcacaatatgacatttgactgctcatagaagaactggaaatacttacatgtacaagatctacaccacgcgagcaccttgtaaattgtttggttacttcaaatgaataaattccgatataacacgaactgctacgtctcagatttcgttggtggatcatccttcaatcctttggtgagcaaatcgtaattgatagagacaagttgtgatagattctgcagcaaaagaagttagaacggtgtgcagaatataggcacaaatgggctaacaataagttttctacccctacttttaaggattgatactgtcaatgaaacgtgacaatcacaaatttaatgagaataaaaaagaatatgtatttgttttgttggactgctagacactaagaactttggtttgtctttgtcgacactttgcccaattccttttttccactcattgtctcgctggcccacatgtcagtgagccatcagtgataaaatattcagtggatttttagattatgtatcacaaggatctaggtgctattttataatgaacattgtactatcgtttactgtgtggaacaattttgccacattcaagggaatcatcaaactacattttacaaagcacgtgcttgtgaagttgtgagcatataagttgactgacggattactagtatgattcataccaatagcattaaatatctagcgaagttattccaatggtttgagctatattacagtactgtgtctagcgaagtagagatgtgactactatgatttgaagcatattgtaactgaaaaaggtgttattactgcttggtaatgcaaatactgaggacctgttcgtgagtaaatacaagggaaatgtaaggagctgtgggtaaacttttctgcccgtaagtgaaggacatgcattacacattacacgttcattttaaaaaaggatccatcatggttactcatgcttcaatcaatcacattatgaacatgaaacaaaataggtggactgtgaagccgtaggcttactttgactgagaaattgtaaagaaaaaaaggaataggttatccaccgtgataacaccatcatgcttcaattattttaaggatataaatatgtgaaactgtaggattaccttgaatgagaaattgctgaaagaatagttgacatttgagctagattcaaactcagtgaagccactagactcatccccctatttgcacaatttgcacaattgtttagtaaaatgactgaagaataaaaaggcagacaaacaaattgtagttttcttttcctctacttatataaatgctgatgattcataccatatcatcttggtgattgctcacacagctactgctgccactaaggcttccattatcactggaatcctcaaattcgtatgcttcatagatgttttcgtccgatggattccaagaataacggctggtgaagtagctcgtgtcaaatgcactatctgaggaggggacaaaggcagcctgcatatgattccgtgttatcctcggtacacctttacaatggagatgcaactatgtttaaagaataaatagttaaccatatcccaccttttgcctagcaagggtatcccagctaatgtctttaaaaaattgatgctgcttaacctgaagggaataggattataagcatcaatcatttatgtatcataagaagttttgaataatccatacaacggatgaaggtttctaaaaccctcaaaagtcaaaatacctcagaggcgccatttgcacctagccgttggtgagggtcttctgtcaataatctgggtaaagcagtcataatatcacattagttacataaaaaacataaccacaataaacttcacaaaggattttgaaattgagcatgaagtagatagggagtattgtaataatatgcttaaattgcatgcgtaaagattccaaaaatacaaatcatattgaatagttctacctttgagcaaacagatgctataaaccatagaacacaactgaacacatataatatagcagtgtgctactgttaccctataagctgaaactggaaaaaagatagggactgacctatggcaatataaaatatagcgagtaccaagttatcaagcaagaaaatgtaatattttagagcagatgtgtccctgcctagtttgacccaaaatcctaattaaccccaacattcatttgtgttatttggaacctgaataatacagctaacaatctgacgtacattaattcacaatgctgatacgagcaacttttgggtggtgattttacagtacaaatgagggagctcacttcaattgttattgatggtgatgatcatggcaaaaaccctattgactttagtatagaaatttcatgcttgtcattgggataacacaaaggaaaatgcagtataaagacaacaatttattatataattggtccattgaccctaaaagtgacgtaaaagctgtgcaatctagcataatcatctatcacattaaaacttggaagcaagaaatagtaacatgcaatcctgtaagactgaaacatgagttactgtgtattcagaatactcgaaacatttcttacttgtcaattagatcctgagcttcagaactcatctcttctgggacatgtggccaaggtattttgcggttcagaatgttgtcgaaaattgtctacaccaaatacaacaagaatgtcaagttgccacagtttcaatacagcaaaaaacaacattgacttatatagcgacattttgcattaaatagatgaaaacccatgtgttttctagcagaccaaaacccatgtattttctagaagacctctttctctcatattctcaagagatctgaacgggagctttgcatgcttaatgaaagaactttactcaacgtcacataaatggcagagaaatattcagtacatgaaagtctgatacctgggggtgttctgcgttgaatggaggtattccaacaattaattcaaaaagtataacacccacagaccaccaatcagcactagtacctgcaaggacaatcagtactcaagagagtcaaaacgagaagacaatgcagaggttgaaagaaaactatgtcgggcattttaccatgtcctgtccccaaaaggatttccggtgctaaataatcaggagttccgacagcagagcgcttttgtctccgtgctcggtgatccatttcctcaaattcgctcatctgaggttcatcatctccatacaacgaagacccgctaacagcaggaccagatagatcatccgtgctgttgatcagaccaaccttggacaacccaaaatctgtcaactggagaattaagattgataagcaggacatatagaaggcattaaaaaggaacatattcgaaaaagaacgaaaacaatatttattgctgaattacaggttaaatgaaatgaaaactcagaaggaaatatgtgtagcattatcatcaattcattaagatatggattcacttaattagaaaagagctagctgaaatcagcatatatttgatttatgtggaaaccaacatgtcatgacatgaaagtttttatgcattgcctgattgtcatgtggggacgtcactactcactaagtccggcgccggcgacgacagcaagatacggaacagtagtttgttagcatcctttttcttagctaaattggtttgttagtttagccctatgatttgttatgatcttatctcttagatgggtatattaagctgtaaggaagttgattaatgcaagcagaatttgagatcaatctcatttcattgttcctgcctcaagggcgcgtcgcggatcacggcaccgccgcgccgtcgaggtccagggccacgtccgatcacctctttcaaatacaatcttcgccgagttcctccttccaatttgctaactcgtgacattgatacaacacagtttgaaacctcaaaaagtttcaaaactccaaaaactgattctcctcagaactctcataggatatgtgtttattttatctctcactagatgatgccattgtggcaattgctatgaactgctacatcactatctcatttggttgctggaaccaaaaataggaatatatcttctagtcatcagagaacagaaaagcgcttacctttgagaggcatgtgaatgattttttagtttatcatgtactccctccttccaaaagtctaagtcctatttcattctttggtttttccaaaagtctaagtcctatttgtagtcattatatgctatattaatttttttatcggaacccaagaagtcattttagtactttataggttgcatgttcattggttttgtcacatgatgaatgagttaactacatattggtcttggtgcaaaaagaaataggacttagacttttggaaggagggagtatctaacattgaacataaaacaagaaaaatggagagaaaacttaacgatcatgcgcacacataaatacctttatatgcccgtcatgagctatcaataagttgtcaggtttaagatctctatgaactatgtgcatagagtgcaaatattccaaagctagcacctgcagaataaaatgattatcagacaaaggaaaagtgaaaatggaagaaataaattgttagtaaaagaaacttacaacttctgcaaggtatatacgagcaacatcttcatccaagcaccctaaatttctcagtagagaatacaggtcccctccattcaggtactccatgactagatacaaattttcccgggaggtaaaagaatagaagaaacgaaccttaaaagaacataaccaattcagaaccacagtatagctttcaatgatgaagggtcgcatttgcaagttcactcaccacaaaaggattcctcactgtaatcaagatatcacgttcagccaatatactctcaacagcatttttccgaatcatatctgccttccttaatacctgtttcaaaagtaagcaactattgttagaccacatggatgccccatccatcccaaaccgaaaaacaaaagctaataataaagggagtttagcagtcaagcccccaaactattgctttacatcttagagctatcatgctgagcagaggcaaggtgttgtgtgctcagcaaaaccaaaattactataccaatttatcattacttccttttttgtgaggagtcaattcatcattcatgtgaactaaagtcacttcaatctaaaacctatgatggtcaagttgtcacaagtaaagcatgaacatgatgggccgctccactgtcattctgatcccatttttataagtaagctatgactatcaaggagactaatgcaggtaaaaataactacttagagtccaatatcatgtccagtctacaccatagtctagaaaacaaaaactaccaaaccaaacaggcaaacacaccatcaaaattttgccactaccaaaactttggcattgcccatatatttgtctcttgttggcacaaattggcaccaaaccaaacctaccaactctaccctaccaaaatgtgatagtgccaaaagttgccaaagatacggcattaccaaacttttggtagggtatcgaaccaaaatgtgatagtgccaaaacagcataatgatttaacgggagcaactaaatggatcccattggaaccgactccatattagttaactttttaaaagcaaacagtcatataattttaacatatcctgtaatcacataagttacttatctaacaagacgcagatttgattaaaaaacaagggatgcctaactaatgaaatcgagtgcagtttctttctcgaatgaattttagaacaagtgatataattcgtaacattgaccacatgtaccaaatgaaccagcggaacaagtggtacagccaggtttttgtagtatggatagtgtactacagtactataaatatgaagaggtgtactacaaatatgaagatgtgtactataaacatcaaggtgttaatcttttttgtggtcaactagtcaaactgggagcaaattaaaaaagcaaacgcgagaaataccatctctctaatcttccttctctgaacattgaaggtccacaggtatttcctttcttttgcaaaagttttcaatccaataatttgaccatgtcatgttgatcacaaggggtccttgataataaataatgaatgacttccagctggtggttctcatagaaatgtgttgtttagaaaggtatgcataaatgtacgaaaaacctcaaggccctttctaaagtatcattgcaataatatcacaatggcaggggttatcaactgaacaaaactaccgccgagtatcgacaagaacaaatattcttgagtgtgttttattgagttttggggaagaagactggcaagtcaacatatttacatcaaaagcaatttcctttccccttttttgcatgctaaaattctggtttgcgtctgaaagatagtcatatagcaatatttttggtttttggtcaagaatgcctacaacattacaggtacaaccaaggaaagcaagtctgggtacataagggaacaaatatatggcaacaaatacctttatagcaaagaggtctcctgtagttcttttcttggccaagaaaacacgtccaaatgctccacggctgataggtttaatgatttcgaagtcatcaatcgaagtacgatccttgactgggtgaacaggactagctcgtaagctacggacaacatcatcttcttcatccattacagtactcgctgaatcaactttgtccatatcaaccgaatcacaaagcagtaggtacttctccctaagaaattatataaatgtgaagggaaattacaaatggaaactaatataagtgctaaaagtgacctgcaagaattattttcatgtgcttatttagtataatgtcaactaagataagccacttgtgtagtgaactcagcagagactcaccggtggagtttttctatacgtgtgccaaatgtctgcaccgtgagagcctcatgcttcctacgattgacaatttcttgcagatcttctatgcaggtaaccaatagggagagtgccctttcttcatctagaggagtagttgcaatgcaccgcgcaatatcagcaagttcaacaatctgcacagattgaaggacactgttaatcagcacttcttgcattatattacattacaaaatcatttactactggtagatgatgcatagtgatcctaacctagattattatatggtaaataccacactgaggaccagtgtgaaggggggagtccgcttggaaagggaggtaaacatgacaggagtgaactttttaatctttcttcttgcttaattcttaaaagaaaacaaatccccttgagctcccaaaggtgcagctaagacattggagatagtagatgccatctaatcagcaccatctctaggtatacttggtaacaaagcaaactaaccaactaacagcatctctaatgaagggcttgattggtatagcttgctgcagctgcagctgtaactacagtaccaataacaggttttgtgatgaagctgctatagtgctgcggctgtgcagcagcagcaaagctgaaccaatccggcccgacatctaacgtgtggcagtggcagctaagcccacaatcatacatggcacattcgttccagccacccaaccatcatatatacgcatgacacagtggttgattggaaaaatagtggcattattaccattccttttcaacaaacgtattctgcacaagagaaactaaattttcataaacaaacaaaatattttaccatggccatagctttgctcactttgcacattgtaccttgtacaaaaataaacaccgactattttctatagtttagcctagcaaaataatcaactatctaatatatgtatgtgtgattgagagagcttacctgaggaagatcatcgctctcattaattgcacttcggccagctaaaagcatgtctatgtgattagatcttggagttgttagtggagatctaggggtcatacttcctgctgaagatgtagccattccatgatcagattttggcccaaaacgagtcttacatgtcatggaaggaaggttttttatgtcatccagtgaaatagtgctatcagcctcctggaggtagtcaagcatatcagctgagcctcttctagaccaatcagagagttttggagaggggccatcagattcttcattgatgcttgaatttgatacttttgcaacatctggactgccaacagcatttggaaggtctttttgtgtataagattctaccaacttttcaagtgcttcagcaactctaattagacgttcatcaacgcttacacctttttgatcacatctgtcagcacttgcacatattgctgagtgattttctacataatgagtagggacatattcttcacatatgcgacacattattgaaccttcttcagaaatatttggctggtcagaccagtgaccccatgaagttttgtgttgatgcttgggaggaagagattgatgtgatgtagattccactggactgttcaattcagcctggctactaactgcagggggtgtatctgttttcttattaggtgattcctctttaataggggtagggtctttagggggttttgggacaggtgatggaaaaggtttccaggaagatatacgctccctggttggagactcaacctcctttttaacatctgttgtatcaagcggtgaaagaaacttaacaggctttatctcctggcttctcttccattttaaattatgttgctcttgactgtacgattttggtacatcacttttgctgcctctggttgtagtgtcatcacctggttgagccaatatctgcctatcagcagattgtatgatcttatcacgttgatccataacaacttcatcctccgcaaagccactctctttgtgaaattgaagcaatcttgtacatctggtaaggataaaaagcatccgagtgtacagtttcttcagcacacccattgggagctcctgacgatgatcatctaaatcttgcactatgccttcacattgaagccaaaactcccccggtgtcattacacagcagctacgtgcaagtatgagcaaatcttccaaagtttccttccactcaggatgagaatctgcgtacttttccattacaccaaccaagtctcctgcaaatactgccaaatctgaatttacctcctcctttgctttctcaaatctcacctgaataacttttaacacctcctgtgttgatgacagaaaacaagattaattttgctccataaatagcaatatgaaggtcattaatcactatccacgaagaccatgaattgagaataccttcaagttgtaaatgccccgaggcttccaaaaagggaatggtcggacccccttggagttcaactcatgcgaaaaactttttatatctgcagggactctcttccttggagcactggtagcctgcatgatggccttaaagcgtggagattccgattcctttggtgtttcacagggatcatatgcacactgtggattaagatgacagtacagataggaggagtaagaaaagagcaaaagatggttttgtcattgcttgtttaatttaaaaatgtgaaatgggcttgtagaagcatcagtaccacattatctggtatgtgagttggagtcctcaaatctccagaatggttccgcaatgcattcggtttaactgtgtatgagatagattgggcacacacatatcagattttcaagttacaaaaagacacacagattatacattgttagctattgttatatgggataaagtagaatgtgctatggacaaggctacaaaaagaaatgcattttcatatgagaggagcagaaactattaaacaccggaagcacatattatagaataaattcagccagttgtagcaacaatatgaatctttatagtaaaacatttctcagcaaactactacagagtttgctgcggactccaagaagttcgttttttttaagaactagcaaattaaactgaaggatatagctccgatagacataaacaggtatttaagtaagtaatctgccacaagtcaaatgaacacctcactccagtcatatatccaatgagctgtgtatatagaattagaagctgtgcgcacaattacattaacttcaatcatgaaatcgcaggaatagcttatgatcaactgctaaaaatagcaaccaattactagctttgaatttaaattgtctacaccttttaataactaggcgggcattccttacttaaatggtaagaatcattcttacgttagcaccggtggttccaagtttagcatctagacaccatgcggcaaaatgaaaatcatgggcgccaatctccttataactcaacacatctaagttgaaattattatgtttttactgtttttaacaactaccgtcgacacggtaagctctgaagggagcttgaattgaattgcttaatgctgttctccccttactatcaatgcaagagcttggcaatgataagctaatccccctatcttccaaaaacctgtagccggcttgcaggatcatgatgcaaaaacctggaaaacaagtttaaaggatgttcagcttgcaggatcaacaaccttttgcagagctctttccttccaggctcgttgctgtggcgccccgcgctggatgttcggccgctttccctttcccccggctgccactggtcgaatctgcccatgagcttccagccttcctcccgccgccgccgccgccgccagccgatgcagccgacgggtccgcctgcgcctgcccacgcgatagattactgctcccgagcgcggcagcgatgcggtgcccctcctgcggcaggggcccggatctcgtcttaatccggttgaggcccagcgaggacgccaggatgggcgacagcgccgccgccgacgccccgcccgcgcccccatcccgaagctgcgccgcggcggccttcctcccgtccgccgacgggctcgacgaggccgacgcaggcgccgcccccgcgccgcccttggaggcggcggacccggacgcggagccgccgaagagcttgtcgcgcttcctgggggtctccgatttgggcttcttcttgtcggatctggacgacgacgacgacgacgccgccgccggcgaccccgccgcgggcggcgcggaggtgggcgtccgcgggctgttgctcccgtccgtggggctcgacgactccgacgacttgtgccgggacgagaagaacctccccttgaacaccatctcctcgccgcccgccggggaggcgttcggtcgaacaggtggtgggggcggccgagcgagcgagactgcgagtccccaaggagagagagagagagagagggagagcgtggtagtggggacaaggccgcagatgtagagagaggagagaggagaggagccgaggaggaggaggactcggccggtcggtcggggcgcgcggcgcgtgctctccctcctcatccccttcccttgcggctcacggctcgggcctctgggtgggacggtacgagagagagaccgcggcttgactggggcagtagtgggtcagctacagtgctactggctatgctaatgctacagcagctccactggggtcagcgagggagtgtggtggctttggtgggccggaggagagggggttcgttgcagcggggaaataagtccactttgactcccttcggccttgtttggtttggagggagttgaaggggactggagaggtttgaggagaattattccacatcacaataggtgtagaataaatgtttttggcttggttatcaggttgggtaatgaaagttgtctgttgtaaaaaaaaagccgtggaataaatcacttccaatctctcactcttatgcattaaccgaacatggacttaactagtgaccaaatctgattcgtatccttgaaacataatacaggatatctcgacccccaactattaaaacaggtgcagtttaactctctcggcagttttggagggcgttttcactaacgtggtagtattgacctagtctgtggcgtcgacatggcgctttggttctattataattaaaaaaatatatatgtgggatccatttgtcattcaaaaaaaataggacccacatatcatcctctctctcctctttcctccttcctctctctcctcttcgaccgtctgcaaggggcaggagttggagcagccggtggactttcgtccgcagcacacgtatgctgcatccggcctacttgacctcgccatcacgctcctccgcctcacgctggacccaaccaccatgttctacagctccgccatccacgtccacacctcccacagtctccagctcgccacactcgcgctgctctctgagatgctgggtagggggctcctcccaacctcgcacacctgcgccgccgccgctgctccagccctgctcctcgcatacggccaaaggtggaaaaggggagacaaagggagagataatggagagagagggaggaggaagaagggggaggagagagatgatggcatgtggcccgatagggttaatggactcttctgtcagatatggatcatgtttgaggagacgaagattctaaaagctagctggtttggtaggtagctatagcctctaaaaacatgaaaaaaaatggttcctcagcttgtaattttcagttattttctaaatagattgtatagttatacatcacataaaatatgtacgctttaaattggatcatgctttaaattgtaagtgagtttctagtaatggtaacttctcttacaatttctagctcttaaattggatcatgttttttttaaatattttcagcttctctatataattcaaattgtcaatcatactctattacaatgtcaaaaatctaaaacgacagagtagtagtaatattgaataaaatatgatacatttgaaagggtatagttcgaaatgtacatttgaatccaactcgggacaattcgtcggtatgctgtgtggacgggattgagagagacctgacgagtgggtttgctgttccggcgtgggggccgggggagtttctggtttccagcatcgaggattcgagatgctgccattgtgccatgctgctggtagcctgtgctagtcagcctgttcactggtgcagtggtgctgctgatgctcagctcagggcccggtctgggagagtcaaagattcccggtccatggtttgaatttggaaagagagaatttctcttttacttttctagtagatctgaaaattattttaattttgctaaggtgaaccggtgtgagctgagatctactccctccgtcccaggaagaagggattctggaagcccaaggtagttttagaataaagagtaaaagactaaactaaccttagtactagtacatccaattattagttacaaataaagtattactactgccacacattaataaaatataattagtactccatactcaaacacacatggagatacagggcgccaaggtgccaaataatttgaatgaagagttaagcgccactttattggcgggatgtaatacaaatttagcacaccccaccacaacaaaccctacaagtttcaaatctgaagtttccctcccactttatcacttcataactctgcaaaaacacaagtttccctcccactttatcccttcataactctgcaaaaacacatccatggctttagatctaaatatagcattagatgatggagatgaacatgctatacctaacctcaatgaagcagtggctgaagaaacagcagcggctgatcaggaggatgaccaggttggaggtgatctccatggaggtgccaaccgtgagcttcctggaggtgatttccaaggaggtgccaaccatgtgcttccttttgatctcaacttgcatgcatctgaccaaaggagaaatacatctaggtaaccttgtaaacatgaatagaaaataaatgatctttgtagatatggcttgcataaatcactctaaaatctttgccatttctctgtaaaaatgatctataacatgtgcattgatgcaattgctatcttcttggaacaaaattggtctttgataagcttgagaaaacaattaggacttgattttttttctttgatatttaccaactcaattctgtcaagagttgagcataatgaaatttattcccttccataatatcagaggttatactagattctagatatgctagattctgcatggatagtttggttaggccatgtttatttcaaggtgaaaagtttttaagtgtcatatcatatatacgaacacatatttaaagtattaaacatagtataataacaaaacaaattacagattccgtctgtaaactgcaagacgaatttattaagcctaattaatccgccactagtaaatgtttactgtagcaccacattgctaaattatggcgcagttaggcttaaaaaattcgtctcgcaatttacacgcaatctgtgtaattattattttttctatatttaatactccatatatgtgtccaaaattcgatatgatagggtgaaaagtttttctttgtaaactaaacagggccttagccaagctctgtggatttggttgcccgatggccaataatgaagcccataagtaaggccatgtttagatcatttagtccctggatattaaacttgtcccttactgttttgatctaggaacttcagtaaaaaggactaaaagcacgtagaccgagggagaaaaaagagagtggttatcattttagtccttataaatacctctaagagggtctaatagattttagttccaatatacacctttaatcccttttagtcatccctatttagattcttaaggattaaaagtgactaaaatggagggattaatagattactccatgaccaaacatgacctaagaaaacatgaatgcagtttacatttaactatccttcgagatagtcacgtctacaaactaaacctatttttgaacggaggatgtataatgaataaaaactgaactactttctatgaaactgaactagtgatctaagggcgaggtcagcgaaggtgaatagactcatctgcctaaggcttttttaagtatacagacacacatttaaagtattaaacgtagattaataacaaaacaaattacagattctgtctgtaaaccgcgagatgaatttattaagcttaattaaaccgtcattagtaaatttttactgtagcatcacattgtcaaatcatgtcgtaattaggctcagaagatttgtctcgtgatttacatgtaaattatgtaattggttttttttccacatttaatgctccatgcatgtatccaaacatttggttttgatgtgatggaaaagttgaaagtttgaagaaaaaattgtgaatctaaaggcctaattttaatagaaacgttcgcccaacatatgtttgcatctcgagcctcataactgtagtgggagtatttgatacacacgtatacgactgttccatcttgttttaattttcgacaaaaatattgataaattttttgatctttaagcctgaggaacaaaaccgtatagtcgtgcgattttactttcaaaatgacgataaaaattcaacgaatgtcaaatgtcaaaccttgatttctcccttccagaagtcgagagtttttgaattcctcaacttgccgtcggcttgtccctcttcccgcgtgttgaaatcatcttcccttccagaaagccaacgccttcatctgatcatctccttggccaccaagaaatgccttcgtcgaacacctcgccacgccacgccgcgcgcgcgcccatggccctctcctgcgccgccgagtgcgcgctctccctcgcctgcgcgcgctgggcgctccgccgcctctccctgtccggcgccgacgacagcgcgtcctggcccgcggcctcgccctcctccttcgcgcccgtcccgcgcgcgtgccgctccgcgctcgcggcctggcagcaggggcacgacgaggcggagcaggcgccgacgccggcgccgtcgcggctgtgcccgccgtaccgcctctcccacgaccgcgcgcgcggggaggtcgtgctcgccgtgcgcgggctgggactcgcgcggctcgaggactaccgcgtgctcctcgacgccggcgggcccgagccgttcgcgggcgggcacgcgcaccgcgggctcctccgcgccgccgtgtggctgctcgaccgggagggccccgcgatccggcggatggtggcggaggccgggccggcggggtgcaggctcgtgttcgtcggccactcgctcggcgccggggtcgccgcgctcgcggccgtcgtggcggtgaggtgctggctggagcggctcggcctccgccgcggcgacgtgaggtgctacgcgatggcgccgccgcggtgcatgtcgctcggtctcgccgtcgagtacgccgacgtcgtccactccgtcgtgctacaggcaagcctagcctcccaacaacattgttgcctctttccccttagctgatatcgcgtccatttctagcattgtttatcgaacattctgcaataagaacggaatccgacctcgattcatttcgttgcaatgattttggaattcgaatcgcacactcaattcttgaatttggatgcaggacgatttcttgccaagaactccagcgcctctgcaacacatcttcggatcaattttctggtaattaaaacagctaaaaatactcttgttatccatgtgttccaacggcgttgattactggttgttccagctgttgattcaccaatttttttagaacaagtgattcaccattttttctgtttcttgcattgcagtttgccgtgcctgctgtgtttcatttgcatgagagacacgtttgtgtcagaagagaagcttaaggatgcatctaaactctacgctccaggaagagtctttcatatcgtggagagggagaactgcaggttaagggccaaaattccaaaaattaaaacttttttaaaattaaaaaaacaaaatccttgtgtgctagtatggcattagacattagttagaagcttccgaagattagctgttatatttacacttgattttaattggcattgtatccacattggctgctatgcagatgtgggagacttccgccgcaggtcagaacggcagtgccagcagagggcagatttgagcatgtggtgttgtcatgcaacgccacttctgaccacgggattatttggatcgaaaaggaggctcaaaaggctttggatgtgagtaatttcgtctttgcacatgcctgcctgtcaatagtaaaaaaaaattatccctctttgtaaccgatcaattattctttcttccctttttacgaatcggcacaagacaatacccgtttcattgtatagagtaggagaaaaagtggtataaccaacatgttgcatggctttctttaccaagttgttgttcatccttagcaacatgatttcattaatcattttacctgatgtttaatttcttcgcatgttcctttttttcttttctttcgtttgctgtcctgcatgttctggttgccaatcagttaatggagcaagaagaattgacactacccccatcccagcaaaagatgctcagagtgaaagaaacggaatcactcgcagaccaccaaaagctcagtgcagggaatccacaagaagacgacaccctctcctcctcgtcaccgttcagtagccctagaacttcgacgacatcatcattgcgcagcgaatcgtcgtcgacgaggagcgagtgggatgagctcgtggagatatttctgagtgaccatgaagaagacggtgatggtaggacaaacatgtgtaaccgggcaggttgtttgccttgctgtaaataaaagattgttgcatagaaattttagagtgtaaatgaactatattgaaattagagtgtaaatgaactagaagatggttaaattttattccaattcgacctcacgatcaactcgattgaatgttaatatacagaggctccaataatccatccgtaccagtgtactattgtcccagatactagtaaggctaagttatactcctatttctcaacttgaaactttaacttcctcgttgtttttcaaactgttaaatgatatgtttttttaaaaaaattctatatagaagttatttaaaagattcaaatagttattaatcttaattaatcacgtgctaatgggatttttcgttttacgtgtgtcaaaaatctctctcaaaaacaaagagatcgaacgcagcctaagtagtactccatagtattgatccaccatatgggtactagtagtaatttttctcttcacaaaaattattcagttaccttatcactatatatatttctaatttctatcaagcttgtatggggtaaaatgggtaaaagaaaaacatcatattgaaaaaaaagaataaagacaacattattcatcgtttcgcccacaaataattgtaatattgtgacacttatttctaactaaaatttaattatatgaattcatattttatatatgtgttcttaatgacttgaaatccaatattgaaaaataaattatgatgaaaacaaatattaaaaacaactttcaagttagaatttaaaatttgattgtgtttactctccctgtttcagattataagtcattttgactttggttaaaatcaaacagttccaagtttgattagttttgtagaaaaaaatgtaatatttttaactcaagacaaatatattataaaaatatattcaattattgatttaaagaaactaatttgatgtcgtaaatattacaatatttatctacaaacttaattaaatttaaagtagtttaactttgatgaaagttaaaacgaattataacgagggattaataaactgaagagcagctgaaaaatttgtcatcacttatcaccatgacacggccggtgaccacatttcgccggtgaacacacagacacaaaaactagccgttactctatatcgtagtagcattcaaactaaccagccacgcgaagccaccacgacaaccgcagcaaaatctccggaagccgccccgccaccgaaccgaagagcgccgccaccgccatggggagtctcggcggcaagtccgactacgagagcgtccgcgacgcccgcatctccgagaacctggtaagcatccttctcctcgatcatcaactttcgggtttcctctctggatgaggaatctctcgcgcgcggacgcgatggcaatggctcgcccgccgcgctgattcttgggcgagtccccgcaggcacggatggagatgctcggcctgcgccgctgcgccggggagttcagtgccatcgcctccgcctccgcgtccgcctcggcagcagccagccgccgcgccgggatcggcggcacaaccccgaggaggaaccccaagccgccgcgtgtcctcaccccgctccgccgctccggccgattggtcgccatcgccgccgcggcgccggccggatccgcgtcgggtccccgccgttccgcccggcttaacgggcagacgacggagcacaaggcgctgcctctgaaaggttggtccctctcgctgccgcgttcgctgaaatgctgaatctccatggcatctggctgcctgagatgggaacaaattcttgtgctctctctctcttaggatctttgagtaagtttgccgcggaggaagcagaggaggaggaggaggaggaggagcaagaagagaagaaggcgatggtggtgatcgacaaggagagggtgcggatcctgcaggagcggaggtgtgacagcaaggggaggggcgccgtgtacgaccctgttcttgggatttgctgccatttctgcaggtagattctccccactgtcaacatttacgaccgattagtgctcctcatcttgttcttaatcaagaatgctaggtaccatagttttcatactgtgacttgttgagaaaatttcttcatagttttcgtatgatttgttgagaagtctcttctcgtgtgatcttaggcagaagaaattgtgcggcgaggagggctgcaagcgctgcggggaaggagac

SEQ ID NO: 4850 - DNA, 22162 bp, Oryza sativa
agacacacatgtatcttgattcattaacatatatatatatatatatatatatatatatagacaatgttagaaagtgttatgatatgaaacggagggagtaatatttgcactctggccgtccgacgtggcacactgtccacacggtgaatctgtgacgagtgacgacacgcttccatatgagactattagaatacagacggtgtttctcctgtgatgatgtgaacggtgttgttgaactgtttggacgaggtacctaaaagtaggaggaaaacggtgcgctatcaagccaatatatagtgcttccagggtcctgtttggttccataggctaaacattagcccccaccttttagccatgaattagccctcaaggatccaaacaagtgggctaatttttggctaaagtgaattagcctcctcaaaacattagcctctccaaggggtgctaatggggctaattttgtaaggggaccataaaaaggcagccctctctctccttctctcacctctctttctactctctctctccaccttttagtcttgaattagcccatggatccaaacttaccactctaggctaatgtttagcctaccaattcatgactaaacaatagctctcaaaattagccatgagctaatctttcaaacagggcccagatgtatggctagaattaatgcgacacggggacagggagctaattaaacaacagttcttaggccctctttgtttaggcttataagccaacttataagtcaaaaagtctaagcctaaacaaacaagcagcttttccgtttagcttttttgaagccataagccactctaacactattaagccaaaagctaggttggagaagcttttttggcttatgtgaggtagatgtatgactcaaccactaaacttaggacattaaatccaccggcttataaatcatataagccaataagctgacttaaaagtttaagccaataagtctaagcctaaacaaagagggcctttaagtgtgcaattaaagttcatgtgtttcggtgtgctcgatcgattaatctggcccacaaacacaaaggaaattaagatgagaaagctaaactggactgcgcattcgtatagttctttttttaggagggttaagaaattaagagcacattcatatagtaaaacacagttgcttggacctgggctgagctgaaatccaatgtgcgatttcattagtactacctataccaattacggtcctcccgttcctcacacctacctggctacccctacttacaatactctctccgtctgtcttattttaaatgcaactatgaattataaattttagtgctcaactttagtcgcttatcttatttaattttttttaattagtactaccttttgttgttatgagatggtaaaacataaataatactttatacgtgacttatatttttattttttaaaaaaaatttaaataagatggacgatcaaaattgggcacggaaatccatggctgcacttcatatgagacggagggagtagaatacattagcattgagccccaggtcaacagataaacatctacttcctccgtttcacaatgtaagtcattctagcattacccacattcatattgatgttaatgaatctagacacatcttgatgttaatgaatctagatagatatatatgtctagattcattaacattaatatgaatgtgagaaatgctagaatgacttacattatgaaactgagggagtactatttttgtctcaaaatataagaatggaacatatcctgtagtacgaatctggttagagtatgtttaaatttacagtgataggatgttgtgttaaaaatagtgataggatatatcctatatatatatatatatatatatatatatatatatatatatataattctagtttcttagtacattttaaaactgatgcagtaggtattatatagtagactcataaaaccgtgcaactcctcgagcccatcttacgcatcattagcatcaagagcggctgctatatatatacttattgcatgcatgattagttacctctgctaattaatctccacactagctgtgatgcactgctggtagatgcttcctgatgcaccggttgatcatcgatgtagcgcactagccgagcaagcaggacgttccacgacgtccacgcatccgtgatttgtcccggcccgacgcaaagtacacgccccaggtgcgcccacttggctaaccatgagtttattacttgctcgcgcgcgcgcgcactaccaccaccgccgtgcgtggcggggccggcgggcatgcgtcgccgtcgtcgtcgatcggccttttgcccggagaagatgggagagggggcagagcgcgacgcggtgcgcgatcatatcggtggtggtggatgggagtcggtgtgtgacggtgcgtgcatggcgcgcgggcgtggtgcgtgtgtcggcgtctcgcgcggtgccggtgcgcacacatgtggcatctcggcgagccgaagcgaatagctagcatgcgcagcgcaggaggcgccgcgcgagcgagtgtagcccgtactgccgtcgcttcgcggcgttgcgggttgcccccgcgtgcgtcatgatcacgtacagcctgctaacgactactgactagggtgtacttagttcacgtcaaaattaaaatttacattgaaattggaatgatgtgatgaaaaatttagaagtttatatgtgtaaaaaagttttgatgtgataaaaaagttaaaagtttaaagaaaaagtttgaaactaaacatggcctgcagagtgctcgcgagtgtcaatgtgtcatgtacaagtcaacgggggcgaggccgagtatacgggtcaaactaggcccatgtagaaagtttaaaccgtgagcggaagcaaaggaatagtttacttcgaatccctcaaattatagtttaaacctgattcatttctctaaccatcatactggatttcttgatgcttaactattaaggccatgtttctttcagctcagaattattataatccagattattgggagtaagctgaaagaaacagacaacttattaaagtagcttattataatctggagcccagcttattataatctgataagctcatttaggtgagctttttccagattattggatgaaaaattatccaccatgccaccccactccctctttagacttgcaaacctaataatctaggctctaataatctagaaaagaaacaactaaccacttattctactacagattataacaatctagcttatactaatctgactcaataatctagattataataatcccaagctgaaagaaacagggcctaaaacatgtataattggactcccgcatcagcagttttcactgacgtgacgtgttgacttggtccgcatgtgttgacgtggtagcccaatcacaaaatagaagttcggcccacatgtaagtgatgggaaaaataagaaaaaatgtagggcctacttgcagtgcccttctcctctctctatcctttttctccaaccactccacacctggcacagcttaggtccgacccgtggtggccatcgtcggacaacacagcgacaacaaggctggtgaacgccgtggtggccacctccatgccgccggatgtgttacactacttctgaagtctatcctatcctccacgtcaatcacatgcaaccacgtgcgatcatgatctgcagttagagatagagttcctattatctagttaatcttgttttgcatgcgatgtaatctcttccaggttgttaggtagctccctggtgatcgctcccaggttgttgggcaacttcctggcgcacatgtatagccacaatcggggctgttccgatctaattaacacgaacgctccgcacagcgtgagtgcgagagtttccatccaatagagaaaactcacatggtatcagagcgttgatccaatctaccgaaaaatcaatcccttccacctttccctgccatggcgtcttcctctagtaataccggcaattccttcctaggccaccccgtgagtgagaaacttgggaagaacaactacgcgttatggagagtttagatcagcgctgcagttcgtggtgctcgcctccaagggcacctgacaggcgcgacgaagaaacctcaagcgcagatcgtcgtcacaagcagcgacggcaagacaacagagaagaaaaacaatccggagtttgatgattgggaggcctcggatcaacaggtccttggctacctcctgtcgtctctctcacgagatgttctcatgcaagtcgcgacgtgtgaaactgcggcagaagcatggacaatcatcgagcaaatgttctcgacgcaaacgagggcgcgttgcatcaacacaagattcgcgctctccaacaccaagaaaggcaatctctcgctcccggagttcttcgggaagatgagagctctaggagatgagatggccaccgcatccggcaagcggttgacgatgaggaactaatccagtacatcatcactgggttgggcgaagactaaagcgaagtgatctccgccgtgtgcgcacggctagaacccatgacggtgggtgacctctacaatcaagtcctcaattttgaggcccgcaggtctctctatcgggggactcaagaaaacaccgtcaacgtcgccaacaaaggaggtggccgcggcagctttcctggccgcggcggaggagctccacgcggcggtcgtgcctttcctagccgcggcacaagcaatggagcgcgcggtcgaggacgcgcgcaaagtggggcggatcgcagaccgatctgtcaagtttgcttcaagaggggacacaccgccgtagattgctggtacaggtatgacaaggattatattcctgacagtaagaatattgctgcagtagcaacaagctcctatggcgttgataccaactggtatatcaacactagagccactgatcacatcacaggagaactggagaaactcactgtgaatgacaagtataatgggggagaacagatccacaccgccagcgaagcaggtatggatctaagtcatattggcaatactattgttcatacccctagtaatcgtgatatccatcttaaaaatgttctatatgttccacaagccaaaaggaatcttatatctgtacaccgtttagttgatgataattctgcttttcttgaacttcaccgtgattatttctttcttaaggatctggcaaccaagagaactcttcttaaaggaacatcacaccgcaggctttatccccttcccaggtcatccttgaagcaagcctgcagtgccactaagttgtccttgactcgatagcatagtcgtcttgggcatccctcctcctcagtcgttagacaagtggtcaataagaataatctcccatgtttagattctattaatgagtcagtttgtaatgcttgccaacaagctaagagtcatcagttaccttttcctgtttcatcaagtgtctctcattatcctttggaacttattttttctgatgtttagggcccagctccagagtctgtaggacgaaagaagtactatgtcagttttattgatgattttagcaagtttacttagatttatctcttgcaaaataaatcccaagtttttgagaaatttaaagagttccaagttatggtagagcgcttgtttgatagaaaaattttagccatgcaaactgactggggaggggagtaccaagctttaaataatttcttctccaaaattggcattgttcatcatgtgtcttgccctcacactcaccaacaaaatgggtctgctgagcgcaaatatagacatattgtagaagttggtctctccttattatctcatgccacaatgccattaaaattttgggatgaagcctttcaagcagcaacctatttgattaatagggttcctagcagagttatacaaaatatcagtcctttggaaaaattattccaacaaaaacctgattattcctctttgcgtatttttgggtgtgcttgttggcccaatttacgtccctataataagcacaagttggaattcatgtctaaacggtgtgttttccttggttttagcaatatgcacaaaggattcaaatgcctataaatttctttaggtcggatctatatttctcgggatgttgtttttgatgaaacggtattccctttctctgagcttcatgcaaatgcaggcgctcggcttcggtctgaaatactcttgtttccgtctttgtttactagtggggatgacaatgtattacaccatttgactaatcctataaatcctgctgctaatgagtttgctgatgcaaatattgagattgatacagcacattccgtggccacagaagatcccgcagggattgattttgatgcagattcggcagaacaggagcctgacaccttcctgtcgccagggtctgttcacacgcattcgcctggacctcaccattcaggcgctgacacgcggcagcatcaggagacacatgctggcgacagaattattcttccaggaacagctcgtcaggaggcacagggggagcagcggtcatctccctccgccgatctgtcctctgctgatccatcatcatcgctgtcaggtactgatgaatattactccctccgtccataataggtgacgtttttgactttttatttgcaacgtttgatcattcgttttatttgaacaattagtataaatataaaaaaagataagtcatatgtaaagtacttttgataatagagcaaatgacaaacaaaataaataataattccaaaattttttaaataagacgaatgatcaaacattgacaaataaaaacttaaaaagacaagtgatatgggacggaggtagtataacactaacagtgatcatcccgagcaggagataacacaggaacaggagcttgcaccgcaagtccgacccagaacaagattacaaagcggcatttggaaggagaagatatatactgatggtacagttaaagtactcttgttttaccaattctggagaacctagtaatctagtaatgatatagaggctcttaaagataaaaattggaaaaatgctatggaatctgaatatgatgccttaatcagaaataatacctggcacttagtcccacctcagagagggaagaatgtcataggatgtaagtgggtctataaaattaaaaggaaagctgatggttctttaggtatgtaatagattatgaggatactttcagtctagtggtcaaggctgctacaattagaatcattttatctatagctgtgtctagaggttggagccttagacagttagatgtgcaaaatgcttttcttcatggtcatctagaagaagaagtttatatggaccaaccaccaggatttgaggatgtcactaagccacactatatatgcaaactagataagtccttatatggtttgaaacaagctccaagagcttggtttgccagattaagcaacaaactgattgatcttgggtttagtgcctcaaaagctgacacatcattattctttctgcataaaggagatattgctatttttatcttggtatatgtagatgatataattgtagtaagttcctcagagagggcaacaacagcattgttacaggatctgaaggtagaatttgctctaaaagatcttggtgagttacactattttcttggcattgaggtaaacaagacacacaatggcattgttcttactcaggataagtatgctactgatttactaaagaaggtagggatgttgaattgtaaacctgctaccactcctttatctgttagtgagaagttgtctttacatgagggatctctcttaggacctaatgatgcaacacagtatataagtatagttggtgcattacagtatttaactctcactaggccagatatagctttctctgttaataaggtgtgttagttccttcatgctcctacaacagtgcattggacagcagtaaaaagaatattgagatatataaaacagtgtactagtatggggcttaatatagacaggtctgggtccacacttgtgagtggattctcagatgcagattgggctggcagtgtagatgacagaaagtccactggaggttttgctgtgttcataggctcaaatctagtgtcatggaatgctagaaaacaagccactgtctcaaggtcaagtacagagtcagagtacaaagccatagcaaatgcaacagcagaaataatgtgggtacaaaccttattagcagagttggggatcaagagtcctcgagcagcaaagatttgatgtgataatcttggagccaaatacttgtcagcaaattcagtttttcatgctagaacaaagcatatagaggttgattatcactttgtcagagaacgggtgagtcagaaattactagaaattgattttgtttcttcaggtgatcaagttgcagatgggtttactaaaccgttgtcagttcgactactggagaattttaaaagcaatcttaaccttaaacggttatgattgagagagggtgttacactacttctgaagtctatcctatcctccacgtcaatcacatgcaaccacgtgcgatcatgatctgcaggggaaactattctaatccctcgaggggatgttccctcgtttgtttaaaaaccatccaaacggttatgaaaaattctggaaaaatttgacaacattcatacaacacatatatacaactctataaaatcttaagttcaaattcaactcacacgtcgagatataaaaaagacaaattcagcatatgaatagtagcgtactgtttatatctaaatttgtcgtttttgtttctagatgtgtagatcgagtttgaacatgaattttggtggactagtaggtatcattatactctacattattaatttttttcagatttttttacaactatttgtattgaatttggaagaaaaatgtatacgagaggatatcccctcgagggatcagaatccactccctgatctgcagttagagatagagttcctattatctagttaatcttgttttgcatgcgatgtaatctcttccaggttgttaggcagctccctggtgatcgctcccaggttgttgggcaacttcctggcgcacatgtaaagccacgatcggggctgttccgatctaattaacgcgaacgctccgcacagcgtgagtgcgagagtttccatccaatagagaaaactcacaggatggaaccgtggcagagagcacgtccaaggagctgtccgccataagcctgacgcgtgcgtccgtcgaggttgtcgcaacattagtggggagaggagcggatggagcggacaagttaaacatggagacaagaggcattgagggagaagctagcgagttctctagcttgagcggggcaacgatttggagacaacggagctctctagcttgagcggcgtttgtatgcgtcgcgtgaagggggacggcggtcggtggcttcgacaggccaggagcttggcggtgccgcggtggcgcgcgtggatgtagcatctttagcggttctccagtggaacagaagagatgactctaacaacgagatgaacacagcaagcaaaaactccacctccatgcttcagagcctcgatctgccccactgtcgggaagccagctgctccaatcttgttggccacacctgcaccgcttccacccctattgaattcgagctatgcgggaagggaggcagtggcatcggcagtcaacgagcccagtcgaggtcgagctcgccctcccttctatgacggcgcctcgctcagcaagaagagcatgcggcgggcacgccgcggtcatcccctcaaccaccaccgccattacgactgtcgccgagacaactgcaaagatcgatggcacaacgaactggtcaaaaagctcatcttcttcagcctcatggcgctggcctcaccattcgacctggaatacttgctacatgcgttcgcctcccgtctcctccattgccctcctaccgaatgccgatgcatgagtctccctgtcgttccccgccattgctcttctgctgccgcgcatcactcttgtttttgtcgctcaatccaaagaaataaataggaatacgaaccctcgtccccaaagcccgggtcctagactactacgaatagaaagatttctacggatattcttcgtatcaattttataatgcttatcacctccttctgagctattcccacggtgccttcgggtcaaagcttaatccttaatagccaaccgatgcctggcaccaccgctaagcacaagggcaagaaaaagattggctttaaaagatccaaatacttccttgtgggtttataaaaaaccatatcatatcgaagaacttgatggtctttctccacccgttcgattacttcttaaaaggattagatatagaaaaaaagtagtctactcaggagaatgagataatgctcataatatcgctagtaaccaaccacaaaagtaaaccaccgtgcaaaggaaatatgggaaagagtgaagtaaggaaggaaaggagtcactgacatgtggactttatatgttaacttacgtggttggactaggtcaatgaaaaacaccttcaaaaccactgagggagtcattttgcattggttttaaaagtttggggatcaagatatccacggttacggttgagggatataaatagaattggatctatattttgagggattagaagtggactaattctgaaagcaaactagtgtactccgataacaaagttcacacctattttggggaaatctgtgcatctagaaacctattttggtccacacttgagacgccggaaaagctaaatcgcgcacgtttccgggagcagcctaactaattgaattagttttagactcctaactaactgaattagttttagataatgacgataattaagataagatttttcttttttggaagattttttttactaacagattaaaaacttttatgttagatttaaaaactttcgacttaagatttaaactttgaagttgaattttaaaaactttcaactgaaactttgaaaattttcaaatcaaaatttaaatttatacgaaaaattttgaaaactttaaaattagatttgaaaattttcaactcgagatttgaaagtttcttcaaaatgaaaaacttgtaagttaacatttggaaactttcggctcaaatatttttgaaaacacgtgtgctaacgattaaaagtataaggaaaaaaaaggaaatacgcgtgaggggaggaagcgaaaaagatggcaaaaaaatgcgtggggagagtgagctcgagcgccaattagcaacccctagacgctgtgagtaacggcctaaggccattcacagtgcaagcacctcatttgcgttacctcgtatgccacgtaggatagatacacaacgaatccatacctctcacagtgcagggtacgatccccaaaccaaccaccccaacctattctctctcccgctttcccctttctctccttttccctttccctctcctactttcactcccaccgacccgacagagccggagcgcgcggcggtacaggtcgtcgtcgcccacgggggcgcgtgccgtccccgcgaatctctcggtggcgaccagaaggcggagcgaggaggacggcggcggcgcggatctggagcggcggcggcgcgaggggacaacggcggctggcggattctggagtggagcggcgcgcgcgtcctcgtgctcatgctcgtggtcgtcgtccttggagtggtcatcggagtggtcatggcgggcggcggcggcgcgtcgtcctcggagcggtcatggcgggcggcggtcctcgtgctcgtcgtcgccgtcctcggagcggtcatggcgggcggcggcggcacatcctcgccccgctctcctcaccgcctgccccaacgccaagcggcggcggcatcctcgggacctggcggcgcggatctggagcgtcctcgccgtcctcctcaacgacggcggcggtggtggcgcgtcctcgcccgccctcaccggtgacagtggcgcggattggagctggagccggagtcgtcggagtggaaggagttcctgctcgggaatcaaggtcggccttctgcacggcgcgcgttctcgtcctcgcatctctgatcggtgggccccgcgctcgactttttgagcgaggctctcattccttcgctaggaaccgaagaagctagtgaagctatgggccccaccaacttttttcaccacgtaggacgaagtaacgctccagctagatggaggaacgcccactgtgaagggcctaagcaggggagcattcagcccaaagggtggaggggaccagatctttagtgggccaactacgaggccattttagcgcagtagtgtcagacccaaagcccccagatacatctcgaatagccgtaaattgaggccagtattggaattttccgcttcccgtggttgctgaatgcggcatgccgccattgcacagcagcagaggcaggcagcccaagtgccagtatacactctactctgctgagggccacgaacgtagaactgaatttgtatcgggtgggtagtgccattattcttctggtttatatcacaaccgtcgtgaaatgtaagcaagtatttctagctcttcctgtcgcagtgtacaactatacgagcgatttcaatatggagtattctactcagcattagcataatggatgatttggtgcgacacagctgagtagattgtcggggatgcggaatctagatgcatgcagacatgcagtcctccgaaatggaaaaaagttgacacgagaacttccgtgcagaaatcagcctcgtctttgccattaaaatgcgaataggtatgagcttttcttctttcgatggtcatcaacttaccgcgaactttccacttttcctgcgctgcctctgtttttagtgggtttttcattctcagcttgctctgttgtccaattgggtttgctgaaattccgtatcacgtccatttttttatgttcagaatgaactttaaccgaaagcacacggagcgcgtccatggaggacgaagaaaagcaccaattagctggcatcaccaacaccaagtccggagagacggcaatgccatattgctaatcatatattcctacatctcttactataaaccagcggctaaaaacgcagttagcgagcggagcgtaaaggtgggtgtgcctcgcttccgtgcagcgagcgccgtccgccgccgaggcgtcggctgcgcggttgcgtggcgccgtcgcgcctcgcgttctggaagacgtgagctgtggcatgctggcaatcgcccgctatccgtggtaaccccatttcattggtaatctgggcttacggttaccacatgaaagtgagggcccctttgaaacgcaggattgagaaaacacagggatagaaaaaacgtaggaatagaatgtcatgcttattggattcctataggattttgaaaacacaggaaagtctctaaactatcatttgattagcgcacaggaaaaacgcaggaattttagacacatgaagaggaaaacatgaggtgagacctcatgcttattttcctccaaaattgatctagcaagatccattccataggaatttttaaggaattggtaagaaataatcctttgtatcaaaggactctatacaataaaatcctataggataaaatcctctaaaattcttatgatttttcctttgtttaaagggggcctgagtattttcccgcgggggacgcacacgacttgcgacttgacccggagaccagggcaccctgaatccgttgagaaggtcagctttgacatgtggcacatgggctcccaaggtgcgatcgtttcagcttttcaggattagattctcctcgttttccgttagcattgttaaacggtatatttcgtgtgaaaatttttttataacgaagttattaaaaaaatccaacaaatttattcataaaaatattatacattaatacttaattaattatatattaatcgtatttctttctcgttttaagtgataaacacagtgataaaccgttggatctagagatttttagacgcgtgtctgtgctgttcgtggaagggcacgagaagaggcgacctgtacggaccaaagaaacgtgcaattgcgcgtactgcggccattgacatggtaactgatggggaatggtcaggtacacaggtgtgccaactgaacgatcaagtggcgcacggaacaaaccactgtactgtgtcttcgaaagggacacttccgacgcattatttatggatcgatcgctagcgtagccttaactgagttggctcgttttttcaactttgaaaggtaaccaggattgcatatctcatgaagcattcaaaaatgacaatgacattgaaattgaagtagagtttcctaaatagtttagaaaagtagaaatgagtgtgtagcggggacgtgcaatcagttgttcttttcttgactttaatcgatcgccagtgtgcataataacagtcgttcatactgaacaagacgtacttatctgctagtcctggcctcctggcatcgactcgaacaaggagcaaagttaataacaacctccaatttcggggcatacgtgatccgaatcaaaaacctacaggatgctgatgcataactcatcttctgtttgaagtgtctccgtacaaccaagatcatatcaccgatgaaattattcacacgactctaattaagattcgacttatgtattttagttttttttccggtgatgaaaagttgtcatttgaatgtgtaccagtaccaaatcagtcctctaaacattagcatatactccctccttcccaaaatataacaatttatccaccaatattctcttcccaaccaatcacaatcctccaccattcactttttccacctatcttcactactcattcaatcacaatcttccaccactcacttctacctattttttttaataattgtgtataaccctaaaacttcttttatattcgggtaggaagggagtataagcaaatcatcgacgtacgtaacccagacaaacgatttatcccggtcactcaacagcccagtgtgtcatgagtcatgacacagccgtaccccgcgcccttagagtagcaaacacgccagcctcaaattgtactaagtgtaacagcatcaatgacgaagaccgtacgaaacagtagtcatccgttttccctgatgccaaccacaagcagtgctagcatgaatggcgttccaaccacccaaaaaaaaagggtaattacgaatttactactgatttaaattattattgtaagaatatcgctagaaaattacaaaatgcaattagaatggtcattcgattcgagtggcattttacaaatttgcaaatgccccgcaaaaaaagcagtaatagtaacaggaaacgaaccttgctagaccgttgactcccaattttctggcgcgcttttcagatttttcaaccacagccgctccaacgtcgttttccgcccaccagtccgttttactgttgccaatcgatcgattacccggtcaaactcaaaaccgagacgaaggaaatcagaatcacgcgccaccacacgacgtgccggcgcccggcggtttggcgtccggctgcgtcgactcgcgcaccacgcacgcccccaacaccgcacggaccacacggtcacccgaggtcccgagcggctgcctctgacccgcgaaatctccgctcggacaaaacccgcgggccgcgccgcgcgttgcatgcatgcgccccgtgctgcgcgagaccaacgggctggatggcatctcggcatctcctgcgcgcgggaggccgcgtggtgcgagcgagccgcggggacgtggtccatgggagattgtgaaccagttctgtgcgaggacggctgcacctgcagctgcacgggtcatacgactcacgagcgcgagcgggggccgcctggccccagtggccccgcacgcgtcttgcttactcggaacggctttaaatacacgtcgcgctcgacgtcgacgtcgacaccgaaatcggacggacgccttcgccacaaagcaaacccgatctaatcaaccgtgacatcccctcgcctcgggtccttcgttccctcgcattttcccttccattttcacactttcacacacccgcgccacacgagggggtacataagaccgagctcgaagtctcaggagagcgtggaagaggaggcagttgctcgtttttgtgtgtgagagaggggagaggccggcggcgatggggaggacgctggacgtgttgctggggcggacgacgaagcagacggcgaggctcaagtcgatgctggggctggcggtgacgcggctcggcgtgctgcgcgggcacaggcaggtgcggtgcgcgcaggcgcgcggcgacgtggagcagctgctccgcttcggccaccccgaccgcgccctgctccgcgccgagcaggtcatccgcgagcagaacacgctcgacgccttcctcatgctcgagtcctactgcaatctcatcaccgagcgcgccgccctcgtggactcgcacaggtgagggacatcaccggaacacgccaaaaaacaaaaaagaaaatcaaacgctagccatgtccgtgatgtcatcgcgtctgttggctatgctttgcgccgtgctgatcaccggtgttttttttgtctctttcgagcagggagtgtcccgaggagctgcgtgaggcggcagcgggtttgatctacgcggcggcgaggtgcggtgacgtgccggagctgcaggaggtgaagcgcctcatggcggccaagttcggcagggagttcgtctcctccgcggccgagctccgcagcggctgcgggatcaatgccaaggtgaggagcacgagactgatcagaattttctgtctgatcctactagccgagtgtaactgacgccctgaacgaacgaacgggttgttgcagatcgtgcagaagctgtcgaccaagcagccgagcctggagagcaggcagatggtgctccaggagatcgcggcggagaaagggatcgccggcgtcgtggtgcacgtcgtccacgagccttcttcccacgacgaggactcgggcctcagccacaggaggcggcggtgcgacggcgagaggcggcacagggtccatcaaccccaggtcgacctggaggaggacggctcttcgaggtacaggaacgtggaggccgcggcgcaggccgcgttcgagtcggcggccaccgcagcggccgccgcgaaggccgccatggagctctcgcgaggcgaatccgggggccgcgacgacgacaggagacggccgggaggcgcgcagttcgacagggccgacgaagagacgctcgccggcggcgaggtttcgggtgatggcaagaaatctggcaggatcagacgtgccagcctcggccggaactacagttcagagatcgaggattcagctgaggatgatgaagtggtccgccatgagatcactgcagagagcgaggtgaaaccgcggggtctgaccaggagcgtgccggtatcagtcagaacaaagagggtgagttagctgcaaccagatggcaacaagagtgatgggagatgatttcttgaattcgtgatattagcagctgctattatatttttgcagattcatcgttcgttagatcctaggcctgtaggccattgcatgcatgtaattaaatggagccaaacaaaaaaaaaggaaaaaaaaacttgattcagattttgttcatcggttagtaggagggagcaaaagtcagcattgtatattgatggcaggtttcatcattgattgtagatatattagaggatggattgattttatattacaacaactgggaccaaaatattcctctaatctcgttacctctggggaaataaactaatgcagcgatactactaacttatatgcattaactagaaatttcaacagcagatatgaccgggtctggactacgagtattcatgaactgtaggcctgtagctggtaaaacttctctcatgtaacctacatttgatttgagaaactcccatgctggatgatcagcgggatactttccttcttttactgagactcgtcagcatgtcactgtaagactgcaagttaacaccgacatcttcatcatactcgagaccaagctcttcctgcacagatacatattattcattaaaatgatgaccgtgctggatgctagcaattggtaacttttcaatctttttttgcagggcagaaatgagaaaatctgacaactaaaaattatctttcctgttgtattaagagaagcatctagtgtgtattaactactaagtgcaggtaaatgtaaaagaaagaagtgcatcaaaaccttaaattccttctggtctttagggctattctcagtgatattatcccatagctccttgaacatcctctttcgctttctccactggttaactttctcagagaagctctcttcaataatcttcttgtcctcaggtttcaccaagataacaccattcctcaatttatttagtttctcttccatttcctggacctgcaaaaatacaagacagccattcttaaaagttaatacaaggaagacattgaaaccataaaagataaaaaaaatcgcatatatacataacggaacacgtttatgcacatacttctctttgcaatttagcttcctttgacttgatctctgctaaagtcaagtttgactgcagacctcgtacctctgcaatagggtttgtattagacatttccatactatgataatggcactcagcattgaaataaaccaccaataagatcatagcatgaaatggaacctaccagattctacctcactaattgctttcttttgatccgcaagttcttcctgtagcttgatatttgctttcttcatctcctcaagttcttccccatttgggatgttgaattgatcttgacgagcaagatatattttctgcttgccatactccttgaaggaaatctgtccactgtcagccaatgcatccaatgccttttgcactgcggtcttcttgaggctaaacttttgcaacgcatcggctacattctgagaattcaatggcctattttgctgaagagtcaaggcaataatcaacttgacagtatacaaagtttataaagaaacaattggacttattttacaacaatactagaaagagtttgaaatcctctaatttgatcacattgtactcttactcaaatcttcttttttatttcataaagtccaagtgctgcaaacttattagtcatacaagtaaaacagggttaattgtgaacaaatcatggtaagagtggtatacaaaagatgccaaatatagtttctctgtcctatctctactcaaaaggaggaaaaaatctgctgtcctgctcaggaaatggatgatatgttaagcaaacatactggcgatacacagggttattgcttcctaaagcaagtgacaccctgtgaacctgtgacaggaacagtctacatgaggagtgaagactaaaaactcacctaaaaaagctcacatgccagagattcgatttataagcacctcagtgccttctttctatgcacaatcttatacacaacctcgcacaaaagtttccacacaaggatgctgccgagtagagaggatactattgaaaaacttgaacctttttgaaatcaacaaaaaaggaaataaacaaagttggccttatttggtaacaacaaaacattactcttcaatcttatcaaagaacatgcagattttagtcctagcaatgagcatgcgaaccatatcatggctgaacagtggactagttaagttactacgatgtttcacatctgaacacatagtagaaagcagattatcatgggtttcaacaaatccgtactctgaagtagtagatcatcaatttgcatctcacagagctaacatggatcagaagattcagaaccaacatacagtaactcagtagaaacaacccctcaaaacacaaaccaatacggagtatgcgttactctctctgtccctcccaaaacaaaaacgtctccgtcccttccaaaatttagcaacttcttcgcctacttactcatctcaactaatcctaaccatctctcgtttaatttatttatcttactttctcaactcgaccaatcacaaccatccctcatttaacttcacatctccttaatctccacacacacacacacacaaaaaaaaaaaaaacctctagagtgttctattttgggatggaaggtgtagcaatttattaattattattactatcatgcagcgcagggcaccagataaaacttgaaacaaacccatcaccgtcgcataacaatatgacatgttagccgagtccataaaatatctaatcaggcaagggcaagcgcagggcaggaccagagcagccaaattagccggtggtcatgtggggttttggaggaggggggccgttacctcattgacgaagctgaggacgattcctgcaaaggagagaagaggatgaacaggggcgtcagggatcgtcagatgcaatcgatggaattgagcaggcgaaatcgatgcgagttttgttgcaaaatcgggggagctagaactcgagcccgtttcggttagaatggggagatggattgtacgagcggggcacgtaccttcgacgctatcagatttgggaggcatcgccgcctcgctgcgccgccgccgccgccgccgccggcgaagggcgaaaaggtttgggggagaaatgaaaaggagagggtctttgcgactcctttgctattgttgatgagagtcactgcacggtggggcctaccgaaatcggtgaccttggggttttcccgccaaaggacaacgctggtgcgcttgggcgcggcgcggggttccagaagcagctacatttggtgaaagcccatcaaagcccacgcaccatggagcggtccatggtcgacggcccaatgctaacaattttcttaccgttgtgtttcatttagtattttttttaaaacttagtatcaaccgttaacagcttgtttggcaacttaagagaagatgatttttttatacgtaaagtgagtatctttgtattaggattgaggatatgaccagcaaagcgcatatacctatgtattaggattgaagattgaccaatatctcagttatgcacaaacggaatttaaagagagaaagcagatgagagggaggaagagaagggtcaaggggtgctgaaggcaatatctcccaaagtctatgctacttttcatcaatgtcttgttttctcttcccaacaaatcacaattctctatcattcaatttttccacctatctgcacttttcaaccaatcacaaactctctccatttaattttacctactttcttaataatcgtatccactcctaaaacttattatattttaggacggaggtagtagcatttgctcgtctttgtaacatacatgtgtatcaatagtttatggaaaaagtacaaattacccccgaactattatgggcgatcgaattaccccccccccccccaaactcgaatacggatattttacacacttaattatgcaaaccggacaaataacccccccctggctcaatccgggatggtttcagtcctacgtggtagtccagtcagcaatttttttaaaaaaaatagtgtgggcctcacctgtaaggctctcgtctctctttcccctctaacctctcaatctctctctactctctcttcctaaatccccatcccctctctctcccctccctccctgctgcagcgagcaacggtgattgcttggttttttcctcgccatggcggtttcttggccatggctgtttgatttcttggttggcccgcgcgtgcgcaccaacttcccccatgacgatgtcaacgaggccgcgcagccgccgtcgcctcctttcgttcctctccacggcgctcgtcgccaagctccaccgttccaacctcgccttcgtccaagccgcgcagcgcgataacagcaatgactcctccttcttcttccttgcttcaccgggctgccgctcaccagccatggctgcacaccgtcgttcaccaggcgccgccgttcgctgcatcaggggagggaagagagaggggatggggatttaggaagagagagtagagagagattgagaggtt

SEQ ID NO: 4851 - DNA, 29800 bp, Oryza sativa
cttccagattcattgtctaggtgatgtcaaatcaccacctatgttaccctttttaggagagggagtaaaaattaacaacgccatctattaaaaaacagatgtagtattcgagtggaggcaatgtgttatatgcattaccccttaattaataactactccataagattattggtgattatagctccgatatatgagtttttttcttttattcgctgatggatgagtcaccaacccaagaagatcacagagttgacaacacgaacctcctctcgtagtaatcctctctcgcctcgtgcccatcccctcgggtggcccccaccggaaatcccacggcgtgacagcccgcccaatggcattccgcccctccggattccgcgccccccgccagccaatcaccttccagataaccgtcctcccgggccccacctcctccccccgtcccgccacgtggcgcaaaagcgtgttcacgggccccacctccctgtcagccgacccgcactgtcgctgacgtgtgggcccgggggtcaggacccgagtccgcgattttataaaggaaacggctcgggcgctcgcccttacactactgttcccatttttttttgttaaccgcgaaaagtgttgtgttgtttgggtaggcagggtgttcgacggaatggcgagcgccgccgcggcgacgggcgcggcgctgggggcgcgcacggcgcgggcgtgcgacgggtgcatgcggcggcgggcgcggtggcactgccccgcggacgacgcgttcctgtgccaggcgtgcgacgcgtccgtgcactcggcgaacccgctggcgcggcggcaccaccgcgtgcgcctcccgtcggcgtcctcctcgccggcatcctcccctcgctcggcggccgctccacgtgccggatcagacgaccccgacgcgccggcgtggctgcatgggctcaagcggcggccgcgcacgccccggaccaagcccgggggaggcggcaagcacgacgcctccgccgcgacggtggccgcggcggcggcgtcggcggtcccggacctcgaggcggaggagtccgggatcgtgggcgacaccgaccacgacgtcggggaagaggacgacgaggacctgctgtaccgcgtccccgtgttcgaccccatgctcgccgagctctacaaccccgtggcggccgacgacgaggagcagcagatcgagcagaagcctgctgcacgcgtcgtgccgttctcggagccgtcgccggagttcgcctccggctcggtggaggcggacggcctctccggcttcgacgtgccggacatggagctcgccagcttcgcggcggacatggagagcctcctcatgggagtcgacgaggggttcgacgatctgggcttcttggacgacgagaagcctcacgtgaaactggacctggacatggacatggacttcgcctccatctcgccggcgccggcgccggagcgggaggagaggaagaggaagcggccggagatgatactcaagctcgactacgagggcgtcatcgactcgtgggcccgcgacggagcctcgccgtggttccacggcgagcgccctcgcttcgatcccagcgagtcatggccggacttcccggtaagctctcacgcagagatctgtagctttctgccggaattggattttcatctctcgatggacatctccatcttagctcctttattccgtattacctactccctccggctaaaaaatataagcatttttaaaatagtgttaagtcaacatttttaaaatttaactatttatagtaaaaaaataataataaaaaaagattaatcctgtaaatttgatgttactggatgtattattgaacaaactgtcataatatgtaactctttttatttataatatcttagctttgtagatattgttggtcgaagtagtatctcgacgaccgtgtcgaagtataaaaatacttatattttaaaatggatggagtaaatagttattatttttttaagaaaaatgataacatagattaatatgaaatgtatcacctccgcaagcatacaaggcttaacttttacaattgcaacgaaaggaaccaatcaaactgaaaatagttcgtacatctgcaattatattttttcatgtttgttaaaatttatagaagctgaatttaaaactgtatgtttataaagtgaaatatttaaattaatctattttatttatattttttataactatttattagatgatgaaagcactttcctctttctgccattttcttcacgacctagcttgtgtactgttctgagctatcctatgcgtgcgtgcaggcgggaagccggggagggctcggcgcggcggtgacggcggtgaccggcggcgagagggaggcgcgggtgtcgcggtacagggagaagcggcggacgcggctgttcgccaagaagatccggtacgaggtgcgcaagctcaacgccgagaagcggccgcggatgaagggccggttcgtcaagcgcgccgccgcgctgccgccgctcccgctgcccaggcaccagcatccgccgccgccgccgccgcgcgctctgccgccggtgccgatgatgctcgcgccgcgcggcgcgcacgggcgctaccgtttttgagagctaccgctctcgatcggcttccgatgcgcatgcgcgcgtcgtctagctacatgcatgcatgcatgctagcgatagccgtttgcgtgatccaacaataagtacaaaaatactactatatatatatacaaacatacaaactcgtcgaatcatcgatcgtagcatgttggtttcaggtttaattgtttgggggtagtgttagttttgagcagaattaatctttgtgaattagggcgccctaccactctactatacgtaccaaatgtaccatgcatgtgtgcactgaagcagccggcaggttgtgtacttgtgcacaatttcatgtgcaaattaagtaggtaagttatgtgtgtggtagctaggctaggatgtgtactttcttggttttctgtaagaaagatcctgctaattataaaggttgttgtagattttgatcccggatcaatgtatgtaaaggcctatatgtatatactggtatatatatacagtgtttaagatcaaagtagagaaattacaatgggagcttgtatagttataagcatgtaagtatgtaactagaggatgttgaagcggaaatggctagtgttcttctatttgtatgcatgccttccaatgctttgttagtttgttgggtgatctcaagagcactaactgttgtaatcacgtgttaaatatttttggataaaaaaactatagacatgtttatagtgtatactttctatctatatttgaatacttgatcttgtctgttacctcctccatccctaaatgtttgacaccgttgacttttttaaatatgtttgactgttcgtcttattaaaaaaataagtaattattattatttttttctatcatttgattcattgttaaatatacttttatgtatacatatagttttacatatttcacaaaagtttttgaataagacgaatggttaaatatgttttaaaaagtcaacagcgtcaaacatttagggaaggagggagtatattatttgctatccttatgttctgtatggtagattcgtagttggttagtcgtaacaatatttacatatctgggatcagggaagacactgagcatgacgttttcactttgccattcaccaagtggagtagttatatagtatgatttaggaattacgactcgcaacacattttatatttgcatcgttacagatatcaccacagtgatgatgtggtgtacgaacgtacattcttctccattacctggcaaatctatcgtgaggctgtatttaaaacaaacaatatacaggactccgcccatgctaacattgcataataccgtctcatagtgaaaaagatgttcacatattcgcgaaaagaagataacaatacatccacatgccaatacaaagacccattcgttctgtaagacgcgatccaatagaattactagctcggctgtcttacaaaaggaacaaaaaaatgaataggcactgtttaacttacactgatacaccctctgttagtcgcttgaaatcaccgttcttaccatacaatgaaccgctcaacaacataattctacataaaagaattagtggctacatacaattgatgtacacgaccccccatttacaaaaggagaaatagactatttctcaataccctgctgcaagtattgaatcaagtcgtaccctgcggtagtccatttgttgtaggcatccacacatgttctgaccataaaattagcagcctcacgctcgttcatctctggatgaaaacgttttcgcagattagcgataggttctcccctgctaaagcaaggcaggccactgtccaccatcaaattaacggtagtaataatcccattcatgtgtctccttcctgctaggtaccctttgacacacaatctgaaagaacaatgcttgactcagagcatgtgcaacaactccaattctagttaattagaagaaaatgcatggaaaatatttacctcagaaactgattccaagtgtcactcttcattgttccagatggatcaagcaattgagtcatctcatggcttaacttgaaatgtgcactttcaaaccccatgtttcctccaggcgaaatctccaaaataaatccaaaatcaatatggactagtctcccgtggctgcacaagcaagatgatgattaaccaggtaattccaggtttactcattacaattaggacagaaaagtaaatcgtacctatcaaagagaagattgccattatgccgatcctttggctgaagaagcaagctagcaacagcatatccagcactactgatcatgaacatttcgcgagcagcttcgaaagaaggtgaacctacagggccatagtcttgctgaaatatctctaataaaccaccatcagttgtttcacccatttgatttctactccgagtatttggtaccacctgcagtgtggtcagatcaagaaggttgacaagaggaaaccaatagaacaggtaaacaacaaatacacaacgacaattgctcagtcatgaaagacgtagacttgactcattacttaggtgtcaacttgtcataaaaatggtagctccaaatatttcatttaaaataaaccagagttagagttgtttttttaaaatatcttagggcctgttcagattgtagccaaaataaaccttaccaaattttggcaggatttcttatgtatttaccaaatttggcaacaaactaaatatagacattttttttgggcaattttgccaaaaataatggtatagttgaaaatggcatcaaagtgaacaggcccttagacattagagatcacttgattaaatttggagaaaagagtccagagcatgttttgaaccatgctcattttagttgttctattgtcaaatataacatactcctaatttgaactagaaaggtagctatattatgggacggagggagtaataacaaagtaaagttttcttgttgaattcactattcacatttgcagggatattatactgctaaacatgacataacggtgtaataaaatgtcgattaactgctgttcaagatcagtaataagtgatccctagtccatatagatacaaggaactaaataactacagatggatgcttacctcaattatgcctcgctctggtccagtgggtaaaacaccatatgggaagagataaaggtttaatccaacagcttgaaatatgtcccttagaagagcaataacttggagtgccagcacatcctgtctacaatcatcaccaacctgttgtaacatagaaaatgctcatgtcaactgtgaagcacgttggatgctagacactaagatggttcctgccacatttgctgcatccttcaatagatttacttatccaatgcaagttttaatttatgttcagttaatttatgaactgaaattccatagtaaacatgaattgagacttatagctccataactcgttatatccataggttacaaccatgagatttcactgcaaaagatatatttaccttaaaaatgcaagcctgtggcttcacatcgtttgggtccccatcacgatcaaccacattgaaagtaatcattattggaactttagcagcagactggagaggaatgccactgtctacttgaatgccccgtacaaacttgtttgttgcagtaggtaggtacagatcatcacctggcacagtaatcttctccagctccctgcaaggacaagtttaggataatgagatactaataaggacatatttaattggaacccgcatgagaagattgaaattatatcagtagaaagctcttgatcttcaatgaaacattacagtggtttttactttgtaccttttaatacccgctcgccgctcttctttgggaagaggaaaaagaacaccagaaatcgaggtgaccttgtcaaaaaattcgaactctctttcaaacatgtcacgagcttctggagtaaaaccgtcaacaattttctccctaacggcaggaagcaaggaatggaatgcagtggcctgaaaaataattggagctattaacaccacattgcatatcttcgagcttgaaggagggcaggaaacaaaactgtatgacattgccacagttttataaaacatctcatatgaacaaattacaagtcaaagttaccattttagtcagaaaagcatcacattggaagggcaagaagcacaaggacaaataatctcatgtttcaaatgcatcatgcctaccgcaagtctaaatgtaatactacgatatgaggttcttcatacgcacaagaataatgcataatgaattgttcaagccctttattaatgaactaatacaaacagaaacaatagtacagttccatgaagggctagaaaacttctggaaactcagattatcaattaccatcacaaaaaaaaaaagagttccaaaagaaagaaaaatggtgcttcaccgtgaggttaaaaaatggggtaaaaactaaaaaggcataaaggcttcaacaagtaattgccatgtgccttatcaaacaaacataactcatttttaacttatgaagatatatgactttgtctttaaaaagcaccactcttctcaataaactttcagacaagggatataatagaatgacatgtttggtcaagaaaaaaaaagacatggtttctttttcaaggtggtgttgatgatgcaacagaatatgaaagtcgaagcaaaggtacataaatcttaaaacatggatacctttggtgcagctgcttccttcccaggttcatcgggaacacattctccctgcaatttacatttcctaactcaattagatattcaaataactcagttatcgaacatcgcactaggcatatattgaagaatgaaacatgtttttttatatttgaatagagtagaatatgataacatggtataacagaataaaaataaaataaaatttacctgcagatgccatattaaaatatgagcaaatatattacttctccgagcagctccaagcaagtatccttcaaccaatttctgatgagttcaaaggcaagaaaaaatgagacgaatgcattacattctttacgagtaataaagtaagggcgcagattgaagcaataaatgttttcctagggtgcattcataacataataaatatatatcactggaagaaattctcacatcatcatcatatctgagagactgtaccaactgtggcataaagaaggtaacagtctcaggtgggtaagtctccaggacacgaagaacatatgccataacacggggatgtcctttataaggaggggtaagaaactccaatgcttgtgtaacagagcatggagcccaatgtggaagttgctgtaacaatgatgaattttcatctactgcctttggagtgatgaaaaagggtaatgcttcaggaattgtacggagttccaatatatgtgtctacagggacaagagagcattgtaagacataacagcatatggcacccttcttactgaaagaaaatagcagttgaacaatttacgaaatacacgaaaaaaaatcaaacacaaaacactatcactcagtcagcagatacacctactacctcgactctaacaaaataagccaggagaaaatctgacttttactacactcagatactgtttatttggttacatgagttcaagtggaagttcaagtgttcaacacagtgagagcatccgctagttccaaaattccagtatttaaggtaagacatagcagaaacaaaaaataaacaaacattgcacaacacactgttgtcaaaagaagatttggttctacccttacattctgaaaatatcactaaaaaaaaattaaactggcaatatcggaaagcaatagtatgttacattagctaccgttcttaacaatagactgaattactatttaactctcgtagctgcaccagttgtcatatcattcttcgacttaccagtagacatgcccataggggtaaaatataccgtaatagcaccctaaaattattttaatttttgacacctccaattactgtcctcaatgtggttgcatggttgctttaaggggatttatgatgctatatcttttagattactttataatattcttgaagatggcatcttaatatattctaaatataaacaaatatgccatattgaattaaagttaattgaagaaatgcaccaagagttctcttgctgtagctgaaagcctgaaaacacccctaaagataaacaagaataaatagattttgaaacagaacttgcatgacaaggaaaaatgggtagaaactgttgtctgagaaggtagcagctgaacgcagcaagaaccatacctgtaccaattgtgtaatttctgatgataatgccgagtttgtgggaaacctcataatcattgagaatgcaattcgaggatcaacagcaaaagcagttctggcatgatcaatccatttatctgagctaattttaccacgaaatgttgctgcatctctgccatatataacatgctatacatgtaaatttgaactcaaagcagagtcaagaataaataaaaaaaaatcacgacgatagttactttgtatttatcggttgtgcccacacttcaagtctgtctgcctcattctgagaaagcataagaagtaattgtttacgcttttcccgtacagttgtatagttatccactgagccccagacagggtggttctgatccagctgcaaataaatgaatgaagcgacaaggtgagaaaagttttaaaagtagttagtgaagatggatgagaagtgattttcatggcaattattttaggtcaatgcacacggagggcagcgacagcagcattaggcatcagcatgtgtcagcagactaggcatattcatcccttaggttacctgttagttctctattagttggattcaataatcaactagttatcaggactctcctatgaatcaagccattatccttcagtttaaaccatagaagaacaaactaaatgccatttatctccatctctctccgtctcacttgtgcatcttcccctcttgccaagccctgtttatcttgttctctatctgcctgttactcatctcttctttatctcctcaccatgggttcacggcaccaggccacaacatacttggacctcatccacataccaatgacagtcatcactagtggtctgtactgtaagcagtcaacaagtggcgataaattatacggagtattatggtagctggtactgcgcatgaaaaataccagcatactacatttcctatttccttgaataaataaataagtttcctaacaaaggggttagttaaattagtactctatcaattacttaggaaaattatcagtttaatatgaagttagtctttgagatatggcttgtaagggaagttgaaattgtattcttaagtgtactgttatcacgggaatctcccataaaaggaatgtactcccattgtggtttaagcaatgagacctgaagttgaactaagcccgacaacctctctaccacgtcagcaagaagctttgccagaagctagatgtgaggcaagccctatggccccttacccatggtctttgaaccatacccaaccagctacgccatacaattgatagttatttaggtgggtaagtgcaaagaaacaaaaagggaacaaagatgcaagttgcaccataccatattgggttcaccttcacgtccctgtgacttcggagcagaatcagcagaaccactggggcgctcattttgtagacaatggacaaatattgacacggattgggcctctctctgagcaaaacttttgttttgagattcataccactcaggtgcataagcaaaccatcccaaagcagcactgaaacaaaacatgtactactaaaatatattaacaagtaataacatattatagctggcacaaaaaaaatgaagatgcaagcaaataaagtgtaaagcaaaaatgcatatacatgcattccttcttaatgatatagatgaataaccaaaaaaaatcattggttgatgcatattatcatgcttgacaataagaaattgatttcgagcatccatattctaccttaattttcagtacaacctgtaactcttattttgttttttcctgaagtatcaacatttcttaagtaacaaataattgtacaaatatagttcagaagtatggaaagagagcattgtattaaatatgaaaaatatgtattggagtgattattaccggtataccctgtcctctaataactgaagtcccatattacatttctgcaagttagactgagactggcatgagcaaaatttcagccccaggagcattgcagtgaagaaagtgccagttgcagcaggatggtgagaaaaatgagtagcagatttcattgtcccttgcaacatccgacccagaagtagaagctgctcaatgctatcatgccgaaccacctaagtaaaaaattgttgcagagtaatcgtaagttagacatgttgtctatcctggaggcaaaagtgccttaaaaaccagcctagggttcaatgcactgatcttaaacgttcagggagtaaagtggacagttttgtggtctagggtgttaagtagaggcaaacataaattgtacaagctaggttgcatgcatgccaatatcctagaaaagcagaaagaaattgcatgagatccataaaataaacaaagtgtgattatcacctcaaaccgatcgatgaagaagccaagccagagcctatgggctattattgcttcaactggatccttttctggtggtgcctcaggctcaccagaaatgagatgtggcctcaattttgcatcagggccacagtaattcatatctgacgcaaacagaccacattttgtatctattgtccacagccatgcatcaacaagttctgcaagcacaagaggacctaaggaaggtgctgcagatactagccaggtccagataaatatcccagtctccattgcatcaggagtgcatatataagcaggacaccagcatagaagacgtataagctgagaaaatccatctagatttgctctagagtcagacacctgtgtgttacatcattagcaaatgcaatcataaccaataataaggtattatgaaatatgttcaaacaatttaccatatgatcaagaagtaatgctgtagactgagaacaagtttcacggaacactgtattatctatttgatttttctctgccgtaacaacgaagtcctgaagaagacgaacaaatcttgacagaaaaacttcgtcaaatgattgattgggctgtgcagactgcataccaaggggggacatgcccgtgttcatgcctcccatagaactgaacaaccttctcataccagcaatctcccctgcatggttgcatttaacagttgcagtcactactgcagttgacagcacttccagggtgatgtcaggtgcttcttttttggcccctgatgctgctgcagcagaatccataactgcaggtacattggctgtcctgatgccattccaatcattctttccactacaaatacgtatttcagatagaagtgatacaacatctgctgtatgttgtgatctttgtgctccacttggcttgcaaaaattttcctaagcattacaattaaaacccctatcaatcattatgggacttgggtgaaaataaaacaaatagtataacttttgatgccaacaggaaggtgcctatggaacaaagtttgtgcaataaacaattacagaaagatcagcagttgctgctgtctcagagccttttttaagtcaaccatttaaatgtgtgtatcatttgaccactggatgacaacgatggacatgctttcattaatatatgttatgaatatgagcctactggccagtgacgcagtcgttacaaacttacaacagtagacactcctagaggattttttttttcggtaatttctttctggtggtacaactgaatggttagtttataccatactgactctcattagtattcccgtataaaaaactgctaatcagacatttaaatcctttcaagtttggttgggaactctgaagaacctatgactactatgcaaaaatctaatggaagttaaaaataacctatgagatagcaatctcaatcttaaccggacaagcgaagcgataggtatatcattaacatgacaataaccatctactaacaagaaatgcatcaccataatcatctttagtattcctgtagaaaaactgccaatcagacatttaaatcttttcaagtttggttgtgaactctgaagaacctgtgaccactgtgcaaacatctaatcgaagttaaaaagaacctatgagatagcaatctcaatcttaatcagacaagcgaaataggcaaccttatcattgacaggacaataaccatctactaacaagaaatgcatcatcatacaacaatgctactagacaaaataagacaaaataatattatatttgctaaacctgtataaggccttgagttgtacatggagcatatgaaagagcactcgttatccattccctggcaatcttctgatatagtgagcgtacagtggcaacccaagcaggatcgctaactggaccagaagtcaactcattatgaacagatattagaagtaaatctacacatgatgagttccagaggacctgaaaatttagtatactaggtgtcagtgtctcaaatcaataaaaaataacacatgagacaccaaatcaagcagccaagcaaacctgtggaaacttttcctttagctgagttaacagcttgacactcacatcacgaacattttcatccctctgtgacatgctctttataaggaagcaagcatgaacagaaataacagattcccttatatcagctccttctcctatgtcacatatacgatcctcctgggcacaaaaagggtaattgttccagtgcacatctacaagttagaagtttatcatgtgctctagaaaaataagacaatacaaacaataatcaccaaactgactacaatgcaaagtcaaaaaaaaaaaggatgatgaagtaactcgagattacacaaaacagaatttaaagcactcctaaagtatgaaataagatgcaaagcagattccaattattggacataaaattgctattgttggttgatgcttcattaatattgctcaggggaaaacaaaaacatcccaccatcaatgcatgaggcctttccttgtgggagacaatatctttatttgcagatcaagaaagcagctgtttgtacacttctaatgaatatatgttcgctacaatttatagcttactcaacaatagtcctatgtacaaacaggcatatctgaagcaaaaggagatattagtgctgccataagagatcaaggctgcaaaacaatggaaagaatgtgtggttcatcacaataggaagttgtgtatcttttttacacaaggagttgaattaacaaaaaagggaactattgtagagataatggactacagtactacatagctaaacaccataatgaaaggacaaaaaaatacatgacttatatcctcaaaaaattgatgaagtgtgagttgtaccatccatgacaacactgtttcaaaagctctatgcacaactgcagtcaaacactgagatactgctggtgtcaagttcggggttagcaggtattcgaacacacaactgaatgcactatttgatttattcaatgtagaggtggctgaaagtatgccgccattgcagctaaagcgcaatatctcaaggaaagcaactgcgaggagatatgtagctttaacccctgaaaataaagcaaaaagaaaatcagtttcatacttaaagaattcaatttatctaatgtaacatttcataaagaaagccactggtatgtgagtccaataatccagttaagttaaacttctaatgatgaaaatgaaaattgaacatttttctcataatctcatccttctctcttcaaaaactgcagattctagcttttacaaattaatccttgcacaaggccaaaaagaactaccgccagtcacaaatacatgtcggcttgggcatagatgcactcaaacttttaacttttgagtatcaatgtctttttaaatatttaggttgatatatgaagatcttacatgtaaatctctcgataaaaactttcataaaattagcattttctggtaagtggactaggcactattatgtagacatgcacaagacattttgctagtggactgtccagatgattgtgaattttaaggacctaaatgcaattctacattaattttactatattggaggttaatattttatttgtgcgagacaaaataaacaaatgcataagcagcgaatgactcgacagagaataaatgttgacctgaaattgtagtcattgctgctacctcaactcgacttcctaaagccgcagaaagtgcagttctctgtccaacagcagccttttcattactattgccacggcgactacctgggttatggagagcatttaactctagctcatcttcaagccatttcactgaactgacaacctgaaatgagaaaagcaaacatggtagatacaaggtattaaagaaagtaagacagccaaccgtcagcataggatgatcaacagggggttaagaatcctaactgttaacttctccatgaaaggagagacaaacatatgtgaatgactgaggacagtagttatcagactattctaatccattgttatgtaaaacatcaataggctttaaaactaataacactcaataatatgttataagtacctcttcaataataagatatgctctctagtaccaggaaatgaatgaaaacaagtttgaatttacttattgcataagaaacgatctgttttccatccctatggacccaaacaacctaccagtggtggagttccttgtgcaatacgttgcactgctacacaccattcgctattccacatgtagggtccagaaacagcctgaagagctatagcactgatgctctccatagtgttcaatgaagtggaaactggttttgcaggtgtctgattgctttgtattggaggagctagtccaaacaagacaatgtagaaccacaaattacggaacaatttcaataatgatggctcaacagttgaaactgggtcaaaatcagaacatatttcagcaactgcaggaagtaatggacccatcaaatcagcaccactcctgcagtaaaggaaatattatgttaagcacacagtactgcagttaattagttaagacataaaaatacatcattcaagtttgaacatcaaaactcatgaaatcgatatatatcaacaatatggcaagttacctcccacttttagactcagcagctaagcccacatctgagcatagagataatagcctatgacggtaatcagacctgagttttgtgctggtgagattagtagcaacaagcaaaaaccctgcaggaagagtctagaattttgtagacacagttagcatggaaattggaacacaagttgtaaaataagtttcttatgtagtacacacctctattctctcagttgttgcttctgatggcactgtgttgttttctgcagatcctacagctttagccttatcgagatagcttcttgtcatcaagacaatgctctcacgatatgacttttcaaaacccaagcatgccacacgagatattgcatctaacaactgcagtagagtacaaaaagggtgcttttgtttaagagtcacaagcaatgccactaaatttgaacacaggtaagagcaagagatatggaacaaaaataaatatggtagtgggtacaatacagaagttccatacccgaagtcgcaataaacttggagatgaagcatcaccctcttctaaatgttcaatgaaaagaggcaaaatcatgtctacaacttcccattttttcaagcatacacataactcagcaagaaggcggataacattaagtcgcatcaccggaactgcgtctttttctttgccatcctgaaaggattcacggtcaagaaaacgaccagcaattaaaatctaattaaaaaaatattgtctttgtatgcaggcaggcaaaagcaagtttaacttgaacattagcatatattcataaacaactagaattccgcaagaaaatgatgccagcatatttgtagccagaaatgctctctgataatcaaactccatttttttttactacaataaaataaaaggatgttaacagtcagaattttattttggagaatgtgaaaaggaaaagaaacactccgattttaacctgaatctctggtttcacagtataatcatgagtttaccacagcatcatggatgaaaattgcttatagaaagaccaagctaatcttctcttacacccttacagccttactcatatgaaattaaaaagcaaacctataaggctaccaatgatgcatcatggtgtatgaactatttggctttttaatgaaagctgggcgtaaagccttttctctaaaaatgatgcatcatggtaacttagcatgttgaaagactgctgaagtgacaattgttggaataattggggcatgttccattcaacaattgtaaggtagataataactgcttttatgttgaagctttttcagtgtggtggcaactgtactaactatcaagtaccagtatatattaaaaaaacttagctataactttcatacgttaactggcagttatttttttaaaaaaaacagtaacagtgttttcataaaacatgcatgaataacacatagtgagattgctcatataatgcttattaacatatggtacaacatgttcatctagtgcccagcataatgacacttgtgttgtagcaaatcttatttaactagaaaatttccaaaaggataaaggaatacctcctcctcataatcatttcgttcacggacatatgcagctaaccgcataatgaatgtgtcgaccagagccctatcctttgtccagccaaactctataatttcacagctcaacttaaccactgcatcgaacaaagccccagggctactacctgtcatgtcagcctataccaacgtggccggtttcacatcagaaagcatctctataaacacataaatttcaggagtccaagcgacagtggtgcaaaagaacatgcctgggaacaagtgctgacgacgagaggtttcaaagggatcagcagcactggcaggagttggccccctcgtgagacagttatctggctgataccattgagcagcgtgcaaaatagctcctcgcagatcttcagtttgcgccaggatgagaggatgcatgacttagtggcctcgataaaccaagctagagtctgctggagcatatccttggaagccttgctatcaacatccatggcagaaacgctccgaaccagcaccactaccgcagcctggcaacagagtaatttggtatttatccttgtctttagctgtgccccctgctctctccagtcccgtttcctaatctgcggagtgcaaaccatcacatcaatcatgaagtaacagcaagtaagcatacatgatacacccaactcgccagcatgtacacggcgaatgcaaatgcaggaacctccgttgtgcacatgaaccgcgaagggtcatccacattctagtctcaccttcaggaattcggagagcgaccggacctgctttgcggcggcattcctgaccttggcaacattatcggactccagaccaccctcgccccccaacacatgcacgatgagcctgaaggcgacctccttccgctccagctcctccacctcctcctcctcgaacttctgcaccacctccctgacccctccattttcctctcccgccgcgtactcccccttccccttggccttgggcggcgcctcctcagagcccgcgaactcgaggagcagccgggaggcgacgggcgcggcatccgcggggaggagcgtcggtgggctggccgccgcggcggagaggaacgcgcgggcgaggggcgcggacgccgggtcagcgacgtcgagcgcggcgaggagcgccgcggagagcgccgacgagagcgccgggcaggtcggcgccgcggcgagcaaggggaggagcctggagaggaagggcgccggggcgaacgactgcggccagaacgacggcgagaggaaggcgtgggaggcgaggaacgcgaggagcggcgcgggcagggaggatccggccccggcgccggcggggaggaggcgcgcgagggcgaggagggagtggaggtgcgcccgcgacgcgcgctgcgcggacgccgacgccgacgccgggggggcgccgcagcgggaggcgagccaggcgagcttgtcggcgaggaggagatccgggtgcgccgccaccaggtcgcagagctcgttgagcgcctccatgggggttccgcggcggcaatggcgggggtcagatcatggggggaggtcgtcgccgctgcagcagcagatcggattggggggggggggggggaggctaggccatggggacaggcggaaaatcggatactgacataggacaggaggggagggtctccccgtcctttttccgacgcgagagtaattcgcggagccagagggggggagaggacaaaggtgagggtaatttgggtgagtaatttattttattttgtttaattttcttttggttgactctactccgcggaatgttgggacagggtgagaggggccgagggccgcgagagacaagcaggcaaggccaacgtgcaaatgccgggttttctctggagccagactggttgcctgtttgccctcggtgaaaacgggacatttaggctttgtttagttcgcgaaatgtaaatttttaagtttcacgtcggacgtttgaccgaatgtcggaagaagttttcggacacgaatgaaaaaactaatttcatagctcgtccttctcctctcgaaattgcttttttccttttcttattcttcctttcctttcgaccatcttactttgaatccggttggagcttttctagagagggaagaagagaagttgtgtgctccctacaaaacccgttagacccactcatgatagatcaccttaccttcgaaggcagccaaacatgccttctcgtttcactaaacaggcctctcaatccgttttgacggtggtacccattctgctagtgcgaaagttgttcccgtttcttcgtgatccgatccggtatcagcggatactttaattttaccgggaagggttgaaacagcgcacttcgaaagatgatggtgtattctgaggatcagtccgttttttattgaattcgcaaattgatagatctggatgattcaaagaatgattcttccctgggcccggtaccattatttaaattggagcttttcaattccattttggagattgagggttcgattctacctcagaacgatcttcatgaaagtgaaaaatcttcgtcttaccaaaaccggatcttaaaaagtgttcagtgcccaacaagcaacgggggcccctttgtttctgtatgaatctcttaccgcacaaaatctccatagccaattttacaaattagatttttaaatcagaggcagcttttggtactatggcatggagcaagaaaatggattgaagcagagagccagcacaccttagtgaatatcattatttaggacaagcacgaagaggaagagctttgtccttcggccttgaatcagcataaagcccctcgccgagccacttctttgacaatacatcatgatgaatagggttcgactcattcatgtctccacacccaggttgtgccgcagccgcccttctgcccgcagccctattctataaatttggctggctacgttacttataatcgcagaacgagcaatgaatccccaacgacaaacgaacaaggggcgaggcattttcggggagtagccgcgaatccgagtaaggtctaaaggcatcagattgaggaaggaaatagagaatgttttcatagaagctttctttttcataggtcaactctgagatgaggtatgctgaaatcgcaagacgaatttattaagcctaattaatctgtcattagcacatgtgggttactgtagcacttatggctaatcgtagactaattatactcataagatacgtctcgtgatttccatgcaaactatgcaattatttttttatttatatttaatacttcatgcatgtgtcaaagattcaatataatgtttttggaaaaaaaataggaactaaacaaggccttaactatttgcaattttaaatttaatgtttaatcatttgtcacacacgtgttgatatatgaggacgagtctacggctcgggcacccgattggtttggaaaaaaatcgggcgctgacgtcagcgtatgatttacgtgcaaaactattttaaactgatttttctcttaaattacttatccaaatcatgatccgattgcaccattaaatttattgcaattaaatcttcaaaacaagaccatacatggatatatttcgacgggaaaaaaatagtttattattgaattatttttaaatgttgcacgatgttccaccagatatatcggaatgtttcactcatttaaattgggtgttgtttcaccttatataaaaacaatgtttcagcaaatagcgaaagaatgtttcagtttactacaacatttgatccatacatagtgaaatattataagtacacaagatgaaatatttttcggtggaacaaaaaataaataaattgaattcccttaatagggggtttcaaaatatgtaggttttttttgttgcaatggagtatttcagtttactgtaacattagacctatacattgtgaaacattgtgagtatactaggtgaaacattttttatgaaacaaaaaataaaccaaatttccttaatagagggtttctaaaatatgtaggtgatttgttgcaatggagttgcgtgtgtggataagtggccggtggggacaggggatatgtggtggggacccaggtgcgcacgtgatggggggagggggaagcgaccgattttttcccctccccccgcacgccccacgttgagcattctcggatatatgacgtctggttttagttaattgttacagacttacatgtaagagtgaaaaatagtttaaatattccggtgaaaactggtaaaagcagacagtagctacgatattttcgtagcattttttctagtttacaattacattgttcatggctcttcattcgcaacacacatctataattatatctgcttgacatatgtctaaataaacgaaagccagcagtaaatccttaaccgtatatgtaattatggatttgttgataaatttatactgcagattttgtttgaacatatataaaatctatacgtgagttgtaaagcagatcttgctcgtttccttgtagtatcatcgatgtcttagatagagcaattgttccaagtaatttcagtagatcctttgaaccttaaaaatcgatcggtagatcttctttactcctattgcatataagaggaagccaaagcaacaaagctcgttctcatcgatttaaacttgggtttcaactttgaaaaggctgatctcttggcgttgatgccaccattctgcgtgtattgtatgccgtcttacctctccattaactggtgtatactgtgtataatacataattacacacataaacacatcaactgctgtaagcctgtaattgcagtaagcttccttacggaaaatatgcagtaacttacagcaatttccgttgacaagagattcactcaccatgaatggatgagtcttaagtaaaatctaatataggatggtgctggccacatcttccaacccaccatagttcaactaaaactaaaataaactaaatctcacttttaagggtacccgcagatcagcctgcacccatctgtactcggtgctcatgaattgctaacaccgactacagccttcacaaagaattttgcactatattttctatgaatggttgctatactggattcaacaaccaaatgaaaaaagcttacatgttgcagcagccaaaattgatctacagaaaaatggaaacaggggctccctcggttaggcaacaaaacttgcagaggtggtgaggcgagcaaccaacaggtcaatcggtaaagggaggaagaacacaaaaaagagtaacacggtttgtcgatcatctcactttctttgtttagccacactcatcgcctatctacagtaaaccatcggatgataaactgtgaacaagcctttgctattgtacttctcccttaagatcatctctctttcttcggccaaacccacatctacagaagtattcaacaactggcccctggtccccagcaacccaaggatgctcacctacagcctgcagggtgatacgatttgctggatctgcaagacaaccacatgtggaaacacaagagaatgttcattagtagaataatatatctggcactaagacacaaaatgtgccagaatcataaggcggtgaaacagtttattttgaaaaaagaacctttgcagagaagcctttccagcaaatcagcaagttgggggttcatgttgtcaggtatttgcaccggatcattgacaatctattccacagcaatgtcttgaatgagttgaatgaaaaggtaaagcaaaaggaaatggaaggggggtatttttgtaccttatcataagtttcctgtaaggtatctcctagaaatggatagtgaccagtaatcatacaatacagagtaacgccaactgcccatgtatcagctgcccgaccatggtaggctgaacctgaagtgaattagattgaaaggttggtcatatttagccagcctgcaccaatggccaaagactatatgtcgcaatttgagccaacggcaaaagagtcatggtctttgccctctttagtttttaatcattggcataacattcatagccatgctttggccgcttaaagttgcagtatctaagtaattcgtttatgtcatattctaaatctaaattgcatatttatgttggactcattccgtttgcagttgggtgttctgtcgagaacagattactttatctgctattctgcaatcaagtaaaaggggaacatctacagctgctgtctatctagcaattgttgaacttcatacacataatttggtgactaactgattctgcacgcagtaaatactagtactcaaatataaaaggtaggcagttgtaccttgacagcattctggtgcagtgaaaacaggagtacctggagacctccaaagcagatcatcatcatcctgcaatacaatcacataacactttatcagtaaagtactaagccattagactccacaattgtacgaagaaattgcctaaaaacacttactccctccgtcccataatataagaagttttagagttagacacggttattaagaaagtaggtagaaatgaatggtggagggttgcgattggatgagtagtggaggtaggtgggaaaagtgaatggtggagggttgtgattggttgggaagagaatgttggtggagaagttgttatattttgggacaaatcctgagggctaaaagttgttatattttgggacggagggagtacatgttaataggcatttctacattagcacacaataaaaaagatcatgtatcaagttaaagataatcaaatgtggtatgaaaccatcctgttttactatataaagtcatgggcctgcttaactaaaaaaggtggcatgcaatcatctacttgagtaatcttaaaaatattcaggatggaaggaaatgaacaatatcttttgaggtttttgaattaaaaaatgcttgtcttagaaattgagccccaaaattgcatttttgatacagtctacagtctaaatcatgatgcacacaattttctggggatccattcaactgaaagccctttatgccatgacaaggaaaatagcattcattactacaatacagaggttagaggataaaggcccacctcaaaaatctgactaacactgaaatcccctatcttcacactgccagtgcttgtgaccaacaaattgtctggtttgatatcaccatgaataatattctgcgtataatgacaggaagcattcagtgacatgatgagttaggaagcacataacacagtgcagactgcataacgtagataaatgtgtgactagagcaacatgtatctgattataatatagaagtatgtacaaattggggaaatagaaacatcaacaaggaccaacttaagaagtaatgaattgccagatgttaaggaatcaagtaacatgttaccaagatacattatgcacataagagcatggataaattaagatttcttatatgcatatcactgtcctaatcagtgttctaaaagtcgtctctaggcgccgggtagccgccgccattaggcattcgatggtgtattaggcagctgagctaacttggctagtgttttttttttttttgctattttagtgttatatagtctaatttctatgcaatatgcgtgctatttttttggatttgactagttgacctgacctaggcgccgccttggcgccaattaggcactaggcgccccccagccacccaactagcgcctagtgctttcttgaaccatggtcctaatgattgaagtttaactagtatcatatttctagctaaatttaaccatggtcctaatgaactcaatttccaatacaatcaaacaatggataagagaagaaatgtgtgtgtaggcacaaataatcctaatctagaactaaaatgggatttaatattttctttatgaaaccataaccattcaaatagtaccacttagctgggcccaaaaaagttggcatatgcaaatgcaataattacctcaaagacagaaagttaagtagctaaaggaacaaggaaagtaacatgcaattagaacttcagcctacaagcatagactaagactatagtacaaataacgataacttaacagtggatctcaacctctgctcaacctggtcaccgatttaaccaagtttaagcaagacttttttagaaaatgtggaagttaaaatatgttgcttgcattaatctgcacaatacaaacttgaagctgcttaaatatatttgtacagagaaactatcattatatgaccagttgatatgactgctagtggaacacactggcaaatttgaatttcctttgatatgaccagttgatatgactgctagtggatcaaactattcatggtaccatgaatagtttgatccatatacaattggtgtttataggctgtagattctgatatatggcatggcgttcaccacaatttaacagatcttttagtgaaggaaatttgaatcttacatgagaatgaagatacataacaccagagattatgtcgcgcaagtaatttctggaggtagcttctcctaaaccattgtcacagaccatttttccttcaacatactcaagaactggcaataccaatggacaatgttaggtagaataatatggagaattaaataaagatgctcaaaagttagcaagaaaaatctcatgctacaattaaacaaaaggaaactattttttttaaaaaaaatgagaatgtcattacatacccatgtagaatttatctgcatttgggtcatcaatcacttcaatgagatttactatattaggatgatccaacattttcatgatggatacctgtcaccaatacaaaaggtgatgctgtcagataattgagacgttaaacagtacatagagattctttaagcaagcaaagtttattccagttattttattgtgttcatgtcctgaacagagcaaaatcagtgagcacactcaacttgtatcaactcaacttgggtattgggctcagggccaaggccctaggccaaggaggaggaagaggtgcacatggacatgtccagtatcgcatggttattgttcacatgggtgtatagaatagattgatttgctagctatttataaaatcttagagataaactccttcaaggtcaagccatcctatttaaataaggatgggctgtatgtccattcgttaatagtctctccctaatgttcatcatctaagtctaagttctctcctcatctgcagcaaccatcgccgccccagctatcctctggtggtgtttacccaccatgatttcggaccatgacaacttggttactatgtatgtggttggcccgatagtgtcagtgttatggtagcgatgcatcctcaaagtgcacacaaccaaggttatcataccaagcccagcccaatagtttgaccaaaaaggacctgaagtgagcctcccggtagactgtttttccttagacaattctataatcatccatttcgatcaggagaaaccatgtttgaactggctagtttaagagtgaacaagtcaacatgagccagacgataaacccagcttaagaaatagccaaaaataatgcacaatgcattgtgcatgaactaagtgggcttgttggtttgttatttattgtactgagaaacttatgtaagtccatattgagtgcaagagctatgctaattatatcaccacatttacatattacccatttaaatagaatgtgcagacactgacccaaatcctaactgggtcaagggctgaatgggcagcactacttttccagagcacttaagtcgtgtcatgacaaaaaagaaaaaaaaacatgtattacaatcacaagtaaactgagaaagttactcacttcccgaagaacatctgtcatggcagtttctgatcgcacaacacgtactttcatcatgtaagatttattcaaaacctacaatagaagggcaaaggctacagttccatcagttagatgcagacactgtgcacgcaacataaatttaaccttgtaaccataagaataatggtgctgaacgagtaaaaccaactactcagactagcagctagttattaatgagttcagatgcaagaaataaaaattagtaactaacataaagaaatcagcacataaggacagcgaaaaaccctaccttcactgcgtaaagctttccatctttcatgcttcggtataagacctttaagccaaaaaaaaaaagatttagacatttaccgtgggaagtcacttcataacataatgtgagctatcttaccactttgccatagcttccagaaccaatcttccccaggtggacatattggttgaccatcttgctgccattttcatcctaaatgtgccgaaaggaaaaaagttattgtactgtttaatgcaaaaaggtaatagatcgcatacagctttatggatttgcaaaggtcacgacaacactgattgaaacagtagatcatctgagcatggcgccttaaacaattaaagtttacatcttatacgtataatgcaaaagatgttttaaccgatcatttataacacagttataattttctataataagttaaacaatgttactctactaaataatataacgacaaggatagattaattaccaatcattccaaaatcgtatactacatagcaacaaccaaataatctagactttccatgattggttagtgggcttcaggttgtcactttcctagcaggaggtcccacattctaatcctagcagacgcacaaaattaggacaaatggcagttattctacaaggatggattaattattaattgttccaaaaggaaagtggcataatgtgcggcattagcattgatgttgtcgtagaagatgccacgttcaaaacctagcagaggcgccaaaatttgcattcctgcatgatggagattcaatcactcgaacaagactgaactacgacatttacctatttcgcagtctaaccgctgagctaaccttgtctttaatacaatggtccatgtgtgacagtttctcatgcacgggctagcttgtaaaagaagtctgcactagataagactatacctctatatatgggcatgaaaaatggaaatgaaaatagaataacagtggtaaagaattcaaatctaagaggatagtacctctgagcgaaatacttttttagtctccttaactaggctttctctacatgcaaagccattctgagcccttgacagtataatatcttcagatctcttccttggctgcccatcatcacttccataaagatgatcaggatcatctccatcatagaagcttctgtcagggtcatcgccattgtagaagcttctatcgagatcatccctgtcgtagaagcttctatcaggatcatccccggtgtagaagcttccatcaggatcctccgcagatttatggttcaacaagtcttcagataggatgccatcagcgtcgcgaggtcgacttacagacaccctaggcttccttaaaaagccaaaacaactacagcagcccatgtcggtcaggtcagccattcagaccaagtaggcaccaggaaccctagtagaacaaaaacaggtgaagtagcaagaaacaccatcagagtaggaattgagaagtatgtcggttaatagggttcggcgtgaaaccaaacaaaaatgggaagtgcctactcctcttctacttagcatcatttggctatcgcaacaccaacctactgtaccagatcacacatcacagtaaaacaataggcttattcccttacaaataagtcaagactacaacacaaattcctcgcgggaaaactcacttgatcacagactttagtatattcaaagttaagaggtgataaacacatccctgggatttcacatcagatgaacacggagatgaaatcacctaagcaacacgactacgcaggtatctgctggtaccacccgcacgcgggctaaaaacaccagctccacgcccccgaggcacccaggtgaccagatccccgcccaaaaccgtcccgactcccggttgatcctagggcagaacagaataatcaccggaatagtgaatcgcccagcctacccccaccttgctccccccgcgaccaaaccaacgccttcccttccctactctaacccaaacccccgcacccggcgagcgtgaatgtacgacggcgggtgtgtggggcgcagatcggacgaacctcgtgggtggcaggggactccacggcggcgttgctcccccccccccccccccccggcggagctgcgggtgcgtcgcggcggggtctcctcgtcgcggttttgtggggtttggatgggaaaggggagggaggga

SEQ ID NO: 4852 - DNA, 102394 bp, Oryza sativa
gtctgtacatagtcgagaagtgaaatttagtataattttaaggtgagaaaaaaatcctcatagcaaggatttctaactgtatacatcaataaaagactaaactgaaaaacggattcgctacatatgcttttgtaacaataattgcgtaagagaacatgcatcaaaacgtaaaacaaaacgtgctccagatctattcaatgtttcacaacatggctgatttgacttagataagtttttcaaaaattgaagtttgaccataagaattatttcgcaatgctgttccacatgttgatgaccagtatatagtttataatctgtgaaattgttcaagcatgtacggaaagcagagcataaacatccatacctctcgttgttgttccgggttcgcagaagccaaggaagtctgaaggttattgcttggagcttgcaattcccccacgggcaccacatgcttgacagcttgttgcattggctgcattgggctagagaagcgatggtgctgatgcaacattgctgggttggccacaccattcctacgatttggcatgtgtctgaagccctggttggcattttggtgaaacatctacaaagtaacaagcaacgatgttaagtgaagtgaatcctagttaattattaattgctccctccattttaaattagtacttctctttctagacttattctaagtcaaacattttagtttttgacaatcattttttctaaactcatgtagtttgacatcatgatattcatggatttagattcaataccttcataatatataatttacttgtcaaagtacactgttttttaaaaattaatggtaaaaaataaacatgtttgactaagagacacctagaatgataagtaattttaaacgggggagtagctgaagttgcgagtaattgacaacattagcaaaaataagtagatatgataattggatacaattagatgctggatctattgtgttaaaaaagaaaaaaaatatgacaatgatttagccaacaggaatacctggtgaggattatgcagatgtctaggcattcctccatgcggaggaccactcctctggccaggctgcctttgcatgttatatggcatcatcatgtttggaacaaaatttggttggaacccaaagcctgcaggtggtggtggtgggaacaaggcaggcacaccatggccaaaattgaactgatggggagcaatgtttggccctaatgtaggtgccattgttgctagggctctaacacgagcaaaatgtgcctggcaaacaaagaagatatgaatatcaagcttaacaaacgacctttgtaacatggaaaagttcaatgttagcatagcacacttagtatcaagtgtcaatgttaagaaacaaaatgtactttcagttttttttttcatgaattacaaaactcacaagaaaagataacaagatgtacaaaacctaccctaaaaatcaaattcaaatgtaatagagttagtacataccgctaaaaatgcctttctctcctccttccgttgagctacggcaacatataatggctttttcccaaccattttcccgttcatttttaaaatctataatatttttaaaaatattaattgcataatactgaaaaatatttagaactatggaattgggagtatgaggatagcacaaaagaatcattttttaacatacagcattgttagcgtcttcaacagttgcaaaagatacaaatccacaacccttgctccttccatgcgaatcaagcatgacctacaacaattgtaacttggcattatatatggaagcgtaaaacaaatgacaactcactaacagtaagcataacatcaaacaaagtaaaacaaatagagaacataccttgcatgatgctacctcaccaaaacattcaaacaacttcctaagatgctcatcattgatgtcatcatccaaattcttcaagtatagattgactgtttgaagcttctcaaatttctgatttttgtcatgctcaaatttcgcttttaactcagcttgtctttctgattttttctgagcccttgcaacatataacaccatatcaccaatggacttcccattgagatttttaactgcatttctagcacattctgatttctcaaagtttacaaacccaaagcatctcgacaatccatttgcatctctcatgacaatagcactagtaattgcaccaaatgatgaaaactcatttagcaaatcgttatcactaaaatgttttggtaaatttttcacatatacattagtaaagttgttagcgtctccagtgtgttctctctcctgccggcggatgaacaatccaacaaatattttttgtccattagccaacatgccatttaggccattgatagcatccttagcagacgactcgctctcaaattgtataaatccataacccttagactttccattgaaatctgtggcaaccttactggagaggattgtgccaaaagacgaaaacatttcatacaaactcttgttgtcaatattcggttcaagattttttataaacacattggcaagtccactttttcgcagagttggatccctattcgaaaacatgactctgattggcttcccattgacaacggtgaagtttagattttccatggcacgggtagctgcaatcaatcaaactaaattaaagagttgataataaattaataagttgatattagcgggtgtcaaactctcgaaatacaaaatacaacgaaaacaaacaaagatgcatagtataaaactaaacaaaatagaatttcccttctattcaaattaaggtatcacaacacatagtttcataaaaaaaaaatccaatgctcacaattaacatggaaccattgtactccactatataatacatcgttgccaacagccctacactcaaaagtgatcaccccattaaaaaattaaaataaatataacagattaattaaacttacaatattatcataacaacagtaataagtatatgctactccaaacgaactaatttaaacaaacaaaatttacagcatctcgcacacagataattaataggtacaatatatagcagatcgactacacacaaactagtaataataaccaaagagataggcctccgtaagctaaacaaagcgataaacctccataatgaacagttgatcgacccgtgcccatacgaagtgatcacgtaaattaaccgaaagcttttatcatcaggaaaaataaatcttcaagttaaggccgatcactacacccagaccatcagaattctgaacccacgatcgaatcgaagccgatcacccgacaaaatgagaagtaaaaggaagaggaggaaaaaactaaccgtcttcacgcgacatgaagttgacgtagccgtatcccaaggactttctgccgccggcgatgtcgcggcacacataggcggacgcgacgggcgccacctgggagaagagcgccacgagctggtcctccccgacgctcgcctccaggtctcccacgtacagcgacgcgccggtggcggcggcggccgccggggccgtctgatcaccccccgccccctccgccgccgccgccgcctcgggagccggatcgccggctagcggctgagacgccgccgcggcggcggaagcaggcgcgggaggggacggctgatctacgaccgatggcgaaggcgtggggatcgccattgcgaaggaaccgcggatcggcggtggcggcgggtctagggtttgggccgacgcgtcgccgacttcttccgttacgacgctcttctctccgttttttttttcctttattttttttttcaccccgggtggggatttttctggggattgcagagccctcgccgccggtttatatatatcggcggcggagtggtaggtgggcccacggctcagtgtcagagtcggtagtccggtacgaccgcgtacggaggcaggtggggcccaggtatcagtgagacactaggactccggttgtttcttttcttttttttttttttccggctaaccgggcgcatgcattgcatggttcgggggacgggttcgggtgcggtgcggtgcggaggcggggtgcagttatttcgtgttccgctctcgtttgtttgccggagtcgttttagagatttcaagatgagacgactcagacgagtagggggtgaaaatgggtcgggttcggtcagatctcactcctcctatatcctaatccatattttataatcggaatcgggtcggaaacggatagtgtcgaatacggattcaaactcagataatgtccgacaaaaatacggaacgaataagtaccaaaacggatacgtacactatcggttacggatatttattcggatatcaagtcgaaccaacaatcttatatatcacgtactatctccgtcctaaaatataacaactttcgtctataaatctggacatatggttatccagattcattgataaaattgcttatattttgggatggaaggagtagacaataaccatttaacaattccatatatccgtaatacgattatattaggccattaggaccttaggaaataaacatggtataatacatcatagtagaaccaatacatagtacaaaaaggtgcttcacaaaaacataatatgggtaatatccgggaaataccagaattttttaccgaataatccgtattcgtcagatactatgttaccgaacccgatctcgtatccataaaaaaggacccgtatttggacccgatatccgtgaaaagtcccgtacccgaatttgtcacgaaataatgtggccggacgtgtgggcgggaaatacctaccctgttttcacccctacagacgagcgtataatttacaaaccatgtgttgttttctctccgaaacacgctgttctgctttatagattggtgttattttgaactaggaaaaggctataaggactaactttttcttactagattcttgtatgctaataacactgatgtttatgctatgagtgtatctagatttgtttttttaacttctatctacctaaatcaaacaatttgacgattgttagtaaagtaagaaaaatttagtacgtgcagcagtgctctatgaattataccattttttaaacgggtcttgatttttacaagcggtggtttctctcctctatcgatctctagtctgtgtatcaatcatattacgcaaaaactaattggcgaaacctctcgttattgtcttatcgcgtgacactgcttagattcattcgatcgcgcacgttgtgtcatagctgttcgatcgtgcgagcagtggagaagtatactacgcacacatgcatgtctttttccccttataaagttttctctcgaattacttatccgatctacaatccgattacaccatcgtgttcattgcaattaaaatctttacaacaagatcttacatgattatattacgatgaaaaaaatatttatatttgtaaattgtttttattatatacgtaagttacttttatcatatatataaattgcttttagatttaactaaattactttttatacattcataatgctctgtgttgattatttttattattgtttttagtcaattctataatttatggactttaaatttaatttttagatagaccatatttttctccctacaacgaatttaattctaatgttgtaataatttacttctattttatgctaagttacttttatgatttatgtaattacttttaggctttattgaatttaatttcataaatatatttacttgaaaatcttctctacactttgcttgtgaatttactcaacataatttcttatttcaactcagttataacgtaattacttttcatgctatagagagttacttccattacatagctaagttgcttataaattacttttaaattaataaaatattttatatatattcaacattgatctcgtttttaaataacatattatttttaagaataatatgctatttaaaagatataagtcattagagaggttaaaaacgaaatgcatcattgtagtttttaaggcggatgaaaaacaatcgagatttgaggaaagtgttaaaaattgaaatgggctaaactttaggtgctattaaagtgaaccagtacctttaagtgctataaaaaccaaaaacgttaacattcgatactatataaccaatctataaattatgtatgaaaatatattataaagccatctacaaacatgataaaaagattggttaatcattcttttacgagctcacatgtaatactgtatattttttctgttgatgtatttttttaatactttaatcaccttattatatttattatatatgaattagagatagatatctgttcctgaactcgtctgggtaattaagttttcttttggatggggaagtatgtgtgtgtgcgtggaaaaaaatagttgctccactagtcaactgttgcttgaatgcaaatttgttgccgccttacttcccagcccgtggccgctctcaatatcgacaggggccgtcagcggtgctgtaaatggaataaattcatctaaggtatcttaacttgtcaacaaatccgattttcatcctttaaccgcaaaaccagatacaacgggtccctcaactgtcaaaactagtgcagatcaggtccctcggcggttcggacaacggttttggctgacgtggcgtctacgtggctaatttgacttggtcttgtggacacctgacatgtggggcccacgtgggtcccacgctgactcagccgccacgtagatcaaaaccggggtcaaaaccaccgagggacgttgggtgaccggttttgtatagttggggggaccgccggtgtctggtattgcgtttcaaggacgttttttaatctcggtgacaagttcagggacctccggtatacttttcccattcaagtcccttggtacagcccataacacagttggccttaggcccatacggcccattagtcaacaacctaccaagtaaccaacccacgcaactccagcttaccgtggccgccgccacccgcagatcagatgcaacacgcgcctcttcggccgctacagcgcctagcaattcggcgagtgactggtcgaatgacagcagtatggccatgccaagccaccaaccgcgctcgacgagaggggcccagcccagccaacggcgagtgtttgacgcgtctccgcttccggctcgatccgtagatgccggcgtcgagggagcaccgggtcatgcatgggcgatgggccttgtctgtactctctctactttccacctctatccgccttccagctactgttgcaactgttcttctcacagtcacaggctcacagcaatctgtattgtactctgtaggcaactgttcagctgaagcgatcagattctgatgttaattcttcgcatcatattcatcatacccaagatagatttgagattttgtgatgtattgcaggagcaaacaaaataaccgcggaatttttccccattcaaagttcaccaaaatgagctgcaacgcaacgccatttggagctgtacaagaaattttttttccacccccctaacccaagctaagctaggctgcatcttatcaaaatcctactccttgaaccccttgctgagccactgaatcaactgctacaccagcagcaatgttcatgttccatgttcttgatgttcatgtcaaccttgctggctcccgggcttgatgagcggctgctgggagatcttcccccactcctcgggagagcacttcacctccttgaggaaggccaccacctccttcatggtgggccgctccgcgggcgccgggttcacgcagaagatggcgatccccagcgtctgcagcatctcctggaccagctggtccggcatgccgcgcagcttcgggtccaggatgttcaccgctggctcgtagctccccatcttcttcttcgcccactccacgatgtggagggagtcgcccaccaccgcctccaccgcgctccgcccgctcaggatctccaggagcaccaccccgtagctgtacacgtcgctcttctcggtgatcttcgtggtgtagccatactctgaaaatgaggaaatgtatgtcaggataaatttcttggatgttttaagcatatcaacataatcttgggccaggcatttcaacaaacagtatataagtcaacaagcttcaatggacattgatgcttgtgatttcagaaacttgtgcaatggcagttaatagatagccagactgatcggtttcacctgcttaagctacaagcaatcaactagtcatggtcatggtcatggtcatggaatcagagcaaggttaagattactagaagcaactgcaggtcaaagattctttcttagataacagcattacccaaagagtcattaacctatggcattaactgttgctggtcttgtacactacattctactactactatatttctagattttgaagaaaaaatagcatgcagataaatacttgaagtaggaatcacttgcctggagcaatgtatccataagaaccggcgatgcgtgacatagcatgatgatagttgggggagttcatcagcttggccagcccaaagtcagccaagtatgcctcatacttcgtatcaagcagtatattattgcacttgacatcgcggtggagtatcgccgggacgcaatcatggtgcagataggccagcccttgtgctgcgccgacggcgatcttgtaccgggtatcccagtccaggctcctgttatccttcaggagctgttgcagattgccattggggatgtagttgtagagcaagagcttaacatacttgtttgagcagtaaccaagcagcttgacgatgttccggtgcctgatgtgccccaatatctgaatctcagcagcgaacgcgtcgattggctcctccttcgatgtcttccacagcttcttcacggcgatgatctccccattcggcatctcagctctgtacacaacacctgagcaacctttgccgatcacattctcatctctcaggcactccaagatgttatcgacgcagaagttcagcttctggaacggcgtgaacgtccacgggtgcgagaagtcatcgccacccgcaaccgacatgctcatcgccttcttgcccgcgagtgttctgcttctgttgatcaggatccagaccacaacaagcaacagagtgattgagcccagaacagcacagacaaggatcacggtcttgacggtcttcagtgccgtcctgcgaaccatgtctgatgcacaagtgtgcccgtcgtaggactcgcagaggttgggattgttgatgtaggagctcgatgacaatgtcttgaagaacggtgtcaccgggatcgcgccggagaaattgttgtacgaaatgttgagagatgtcaagctggtgagcccactcaacactgagatgctgccatacaagccattgctggagaggtcgagcgactgcagctgcgtcaagctggacatctcatccggcagctcgccggtgaacctgttcgagctgaggtcaaggctaatgctcaggctcgagagcgcgccaatctccggcggtatcggaccggagaagctgttgttgctcagctccagcatggtcagcttctgcaggttgcgaatcgacttgggcaatgtcccggagagcatgttgccgctgaggatgagcttgttgaggtagctgaagttgccgaagctcgccggtatctcgccggtgagcttgttcatgctcaggtcaagctgctccaggttcatgagctcgccgaactgcggcgggatggcacccgtgaagctgttgttgtggacgtcgagcagctcgagcaccgtgatgttggcgagctcgccggggagcgcgccggtgaacttgttggagtagaggtccaggaacaccaggttcggcagcttgccgatctccctgggtatctcgccggcgagctggttctcgccgagccggaggcgcaccagcgacgagcagtcggcgacgctcggcgggagcctcccggagagcgcgttcccgaggaggagcagcttgctgagcttctgcagcgcgaacacctcgtcggggatgccgccggcgaggcggttcctggacaggtcgagcgcgtacagctcggtgcagttgccgagcgacggcggtatcgcgccggagagcgcgttgccccagaggaacagcacctgcagcgccctgagctcgccgagctgcggcgggatggcgccggtcaggccgttcttgtcgagctggagcgccgtgaggctgctgcagttgctcagctccgccgggatgcgccccgcgagctggttgtccgacaggtgcagctgctcgagcgcggcgaggcggccgagcgccccgggcacctcgccggcgagccggttgccggagaggtcgagcacgacgagcgccgagcagttggagagctccggcgggatcctcccggacagggcgttgccccagagcagcaggctggtgagcttttgcagccgcccgagctccggaggtatcgggccggtgagcttgttcatgtggaggtacaggttgcgcagctcggcgcagccgccgagcgcggcggggatcgggccggacacgccggtgtcgtacaatgccagcgtctggaggttggcgaggttgccgagctcctccgggatggcgccggacagcgcggtggcggcggcgccgaagacggtgaggttggagagcgcgccaagggaggccgggatggggcccgacagccccgggttgccgccgacgcggaactgctggagcgcggtgagcgcgccgagcgacgctgggatggtgccgttgaggaggttgtcctggacgcagagcacctggagcgcggcgaggctggcgagggagcgcgggatggcgccggtgaggcggttggagttgaggagcaggtactggagccccgacagcgcgccgagcgacgccgggatgtcgccgtagagcgcgttcgacgagaggtccagcacgcggagcgcggcgagcgacgcgtacgccggcgggatggcgccggagatgttgcaggtggagaggttgagcagctggagcgacgacagcgacgcgagctgcggcggcagcgacgacaggttgaggaaggtgttcggcagcgacagcgacaccacccggctctgcggcgagcacgtcaccccctgccacgagcacggcgtcgcggcggtggggtcccacgacggcagcaccggcgacggcgccgccgccggcagcagcgacagcagcgccttcccgtccgcggacagggccggcgccgggcgaaccaccacccccaacaccaccaccaccaccaccaccaccaagaaccggtcgccccggtgcgccattaccccccaaaacgatcaagaaaccacaaaaaaaaccagaccaaaaaagaagaacaaatctcccccctaatctacacctcacgacatgagagagagcttgcttgctagtgagaagattactttgagctggagttgcttaagccgcaccccagctcgcatatggagctagacgaggagatggatcgatcgatcgatcgagcgagcggaggcgttgctgctgctactgtcgccgctgctacacactcgctcactctccggtagtagtggtattaatgtgtttttggctaaaaccccggttgattagggttaaaacctcggtcgatttggtcttatctgcgcgtctcgggggttggaggaggagtatatttaatggagcctatgaacttatgatatgagaggtcgtctcaagctaggtcggggggctattgctaatttgctactgctgctgatgggatgagtgtgtttagtgttcacttgttgtttaatagttggggtcttggtcacttgctgcttggacttttactgccactgtgtgagttttcttttcttttcttgcgagaacaagtaagccaagccaccctcgtgagtgtggtttggatggatttataaaggcgtcagcaaaatgaggatgaaaaacttcagatgaaggttgtggttttttttttactgccagtgtttttccttagcagttgcgattttttttaaaatttgaataaaaagagtttaaaggtaataaaaattcaggaaaaaggatatgcatgcagttgagagggtttttttcatgttcataacgaagagtggattttatcatttagaagtcacatgctcgctagaataaaatgtggtgatcacggagtttccctcgagcaatatgaccacggttggtatttttgggagaatgcggtattcatgttatgagaaaatatagcacaagatacatcttggaatgaggattacacaaaatttcaggttttcgtaatgcttaaagtatccttaggttttgtgaagacaaaagttttaggtcatcgaatatgttttgtaaagacaaaagtccataaaggtgcaagttattgactacggataaaaagacgtagctcgatacacaatgggtagcctatgtatataagcagtttagacctagtaggagtacgactgatgttggtgtatgtagggagaatataccatcgagaagatttatgagatggattatggagacttcttgtttaaaaattctcccaaaattttcttatattttttcttcataacaatgcatcgtaacaataacgataaaccatcataacgaagcatgatttcagagcatctagctagtaatgatgtgacgagccgtgccaatctacgacaggatgatcactgcggggatgcaaacggactgacttacaaatctagcttcttatatgtcaaataagtggtaacccatgggttttcgcgtcgtggccctatttaccgcacctagagatgcaagcgggtcgacccataaactcatttacaggttgaattagtaggtaacccgtgagtcaatctacgggttaccccgcgggttggcccgcttgcatccgcggtgcctattgagagccttgttaacatatggcaaggtcgataggtgcttatgacggaacttcttgtcttacagaaactcaataggtctcatggatggccctattaacctagacaagccgatagacctacgtatcgtttcccgcatgtttgaaatgttcatcttgtttcaatataaacacttaggcttgaagaggtatcaaagatacctctagttcattctcattttttttcctttcttcttactaaacctttcctaaaactagcaataatgaattacatatatcggagagaattatcccgtaaatatgatatagaccttgtaattgtagtttacacgaaagaatagtgagatcatcacgacaactcgacaagcatgtgaaaaccgcaccactgacaaaaggcattgggggattgtatccgggataaaatcttactcgagcaaacctaggagagccgtcagccgtgccatgtgactgggggttagccgcactcccttgtccattctccaacagtagggcccacaagtcagcgtctctacgataatctccctaatcgaaaaaaaaaatgtctttcctgttctgtttaggcattgaggaaagtttcagtttcgcataataaaaagaagagaaaagcttcttgtttggtcatactagactcctccccattctattcatggccggccaatcactagcgagcataggtcaaactggggtacgttgcttagatatcacgagtgaatgagtgattattggcgattgtttgatgaaagaaaagtagaaaacatggggtcctactaatactgtcttctaaactctattcatcttaaaaaaacgttcaccttttacgggtagtattgtagccgagaaagccccggaaaataggggttgcatctgctaattaagcagcacgctttctctagattgcttttaataattatcattacaaactgcatttgtttgtaggctaaaaagatattcggttagccaaattttgtaaggtgtgatcatatataaaaagatcaaagtttgcaaaattcgatcaactagcaaaattgtaaatgcacccaaggcagtagtatggagtattctctccgtccaaaaaaaaaacctaatcctaaagaatactccctccgtcccaaaaaaatcaaatctagaactggatgtgacatatcatattacaatgaatctggacaccaatatgtctaaatccgtagtaataggatatgtcacatccagtacaaggttggtttttgatgggacggagggagtagtccaaatttttctttaaaattagattcttaatggaacagagagagtacggagttgcatagtggtatcctacgaaattgtaaattaggacggttgatatatcctccaaagtaataaatgtgtcctccaatggctataaacgacataccactagtacgaacctaggcacactagctagacaatatattccctccgtccaaaaaaaactcaacttagggtgtgtttagttcacgacaaaattgaaagtttggttgaaatttgaacgatgtgatggaaaagttgaaagtttgtgtgtgtaggaaagttttgatgtgatggaaaagttggaagtttgaagaaaaagtttggaactaaactcggccttagaagagaatgtgtttagattcattgtactagaaggggacacattggtcacatccactcttagggtaagcttttttgggacggagagagtataagtatatttggaaggatggtttactctttgttagttgtccaggcatattcgacgaagatttgcaagagaaattagctactccatttaataagagcaagtataatagtggactacaagccgactataaaaacatatggagaagataagaaaggagagagaagagaagcacgctatatatttgtagtcagttacaacactgattctaagatgttttgtatatcttagaggtataccaaatattaatggtgtaatatatatttataaataactattatatgaattagatattggattgactatatatgatttggagctggtagttggctatactattaaacttcttgtaataagtttatttttcgctcacttaatttattccaaaacaaatttatttttaagtaattattacatcgaagtttatgaaagtatgaaagaagtatataaagtgaggaataattgtattgtgatttgataaattaggggtatgttagttttctttattgatatgtgtggaatagggaaaactggaaaacgaactaattttgtaacggatggagtatgttctacgtatcgcgtcctaaaataagttaatttcttatttccaatcttgacgcacttgtttagatttgtatctagaaaataacttattttagatagtgggagtaattttgaagaccacattgcattaaaataccccccatagaattaaatgtaggaagtaaggattacagctctcgagtttaaaagacaattatgttattatttaatataacatggagaaatgatcttaaaagatgccgttattgtcagcaagaaacaatgatcattctcacgcaatgcacatgattgaacaatatacttaaacaccaattgaatttctttataatctatctattatatattataacgatagctcgaaaaggagggaccaacttcacatatatgtatgggatataaattcttggattataagaaaaagagaaatattttgatcgttacacatggtaactacatgttttaatgatatagattaatcgatgtagttgtatataatataattgtatatttaaaacagaaggcaagaattgtactctgaccatttgaaattacttatcgttttattagttcctatgtcaaacacatctatctttgataattaatttttaaaactccgtatagtttaacaacaattatatattataaaattatttattataataaatctaaaatataaattgtattatgttaaactatatgagtttatacaaatcgatggtcaaagactaaaatatttgatttaggataaacctaaaacgacgtgcaatttaaaacagaggtatcaaatctaacaccacttcaaaattctattatatataaaacacagttgtaggtatggaacataagctaagagaaatatatcaaatctaatcatacttttaaaatctattggatagaaaatacaatcatatttatgaaaaagaaaaatatgtcgattgtatataaaatctaattctgaacgtggaaaaacccgccagtttctttttaaaggatgaaagagaaaaaacgaagtggcattgggcttttgggttaatggacccaaggaccaagcaaaagcccatggatacccgttgggattgacagcaaacagcccatacccccccaaccaataacctaaaaccgcttattgctaatcccaaccttgcaaatccctaaatacccactagttaccatatttaccctccaaaccctaggtcatgttcacaacctctccacccaagccctggggcattgtagccaatccagagcatcttgggtaagattccttgggaagggcaaaaatttgatgatattgggagctaggcaagcaagcaggctgctggctgctggctgctgcctgctcatctcatgggggagtgtgtttaaagtaaaagaggttaatgagagagagatgggaggcaagcaaagcgcccatttctaagttttgggattcttaaacggtgattaaaattttcctaatacacccctccctctctcatgggttatcaggcacagcaccactggtttaatttggtctaaagtcacacatggggctgtggtggatgcctttgtttttatttactgtgctttccttttttttactctgttctttctcttttcttttttttttaccgtggtgtgtgtgaagaggggtgaaaggagaagaggagtgataattgtgcacaggagactatgggggtaaaaaaaaactgggtgagctttccaagagggtggaggtgggtgggtttggggaattgggttaaagaaaagaaaaaaatgcagcaatttgtacttgcatcatgttgcctcttgtgtgatgctttgtgtgtgaagttggtgctaatttatgaaaaaaaatgatctgcaaaatacttatctgattaattgactaaactaataattcaacttaatttacgaatatttagtcaccaaaacataaaactgcaaaatgtgaaaaacttggatgaatatcaagagtgttattgactagtggaacaatatttaacatggtaagaaccacataatgaattattttgttacaaactactccctccgtccaaaaaaagacaaaccctgatttctgtgtccaacgtttgaccgttcgtcttatttgcaaaaattatgaaaaaaatttaaaaagacaagtcacgcataaaatattaatcatgttttatcatctaacaacaatgaaaatacgaattataaaaaaatttcatataagacggacagtcaaagttggacacgaaaacccagagtttgcctttttttgcaattttattaccaaacttcgtgtcaaacatatggtatcatcttttcgtttatgcttatacttattagctaaaatttaaattttcaactttaaatttagagttgattttagggtttttcatcgaagtttatttttcagtttttgttttcagatcgctaataacacgtatataaaagttttaatcataaactatttttcatttgcaaatatagcgtttcgcttattccccgaataaacgaatcgatgggccgataagtatatattgaatatgacatgtgggccttaatcaaatcaaatggtggtactactgatagcggtagtttcagcaaacacaataatgtccataagatggaggacatgtactcccagaaaagaacatgatgggggaaaaatagggaagggtaaaataatttagatcgaatggacgttgaaagaaactaatttctggacaggacctagctcgtagcccggcgtgtctggcatctgagagaaatattttatttggaagtgacattttttaaggttgtttttatactttttctgactgtacccgcacgggacaaaatcccggggcacgggatgagttccggtccatccgattactgggctgaattgttgtttctaatggaacaagacccgacccgttaatgctttttttttttactcccctcattctctccgtcttgtaaaagacgaatataaaactagatcttataaaagacgaacataaaactagatgttacaaattccagtacaattgatcgtccagattcattatagtaaaatgtgtcacattccgttctagattcgttttttggtggagtgagtacgccccataatataacaaactataatagaataagacgtattatattactacaaatctagataggtctatatccagattcatcatattaggatacgtttcatccaatcataggttgctatatcctgggacggatgaagtactccttccgtccatattgattactacatccgtcccaaaatataacaacttttagctatgaatctggacacacggttatccagattcatagcaaacgttttttctgtacgagaacccttttaggttccatgcggaccatctggacgcttatatatcactactatttgcgcatgaagaatcgctccaccaagaaatagttcaggggccgcatgcgagataatgcattttcgcatgtaaccccttaagagattcatctagttattttcacaaacgaacctcttaagcggccgtacgtgaaaatatattttcgcaagcgggcctcttaaaggcccgcttagatgtctaaattccctcctcttaaagcttgtccgcatccccttttcctcctcttccctctttctctcggtaactttccttctcctcctcctccactttccccggccacctcctccttcctccactttccttctccttctcctacatttttcccggtctcgtcctccttcctccatttcccggcctacacatggcggggacggtggctcgggagtgggtggcgcagatgcgcggagatgaccgtctcgactcggggggcgcatggagacggcgtccttgggggcaggcaatgctagcgcgtggatacggccgctggctcggggggcgcgtggatccaacgacctcggggcggatccgccgccagcttggggcggatacgacatccccgtccttgggtgcggcggcggtagcctcggactgggtagatcaaccactgaagttgacaaaagcgacagatttgctcttaggagcggtggcggtggccttgggacagcggcgacacccatggaagcgacagatttgcggtggcgacgacgacgatgatggtggcgatggccattgcgaggatgacgactgtagtgatggctgcgacgacgatggcttcgggagctaggttttagggatgaattgagggctagagctttgattttcggaatttttatatttttttggcgatttttcatttttgcatgcgggcagcttaagcgcccgcccgcgaaaatcggattttcgcgtgcgattgctctacccgcatgcaaaaatcctatttttacataccctgggtacatgcgggccactcatccgcatgcaaaaatcgattaataaacgatatgtagtagtgtctgaaacggaaggaccagtgtacacaacagaagtaggaagctgtgttattccataattggtagcatttaatcttaatcacgaaaacatgtatataattgttctgcgcagtagtataatacaattagagaaaaacactaatgttacttcaacaattatagacacaatatagagcaaaaaaaagcacaatcccgttttataagtatctaacctcttcacttattatatttagctattccattcgtcccaaaatttaaaaacctagaattggtccatccgtcccaaaatatataagaacctagaattggatgaaatatttcctagtactacgaatctgaatagacactaagaaatgtctcatccagttcttggttcttatattttggaacagggggagtagctttctattgtcggtgtgattgagtagagtagcccttaatttgtactcaaaatttctccttcgtatttggcaaaacccttcctcttttgttcgacaaaaatcatatttaagtttactgattatgagtgtgtttggagtagcttctagcagctacaaattcttctaggatcaaaatcttcccaaacagtaaggttttttaaaagattacaagaagctgctgttataaaatccagaaaatgaattagagaccaatttctacatattctcactagttgaattcctacaagctgcttctcagaatcatgtccatgccctccgccggccctcccctccttcctccctccctccctctcgccgtcagtggagccgaccaccaaaaatcgtgcggcagtaaggatggggactatagtgattccctccttttcgtggatccaagaagcacgacggatctgctggaggttgctgattgggccaaggcatggatgcatcctaagggcaaccagggacgtggaggtgacagctcgatgtggcaagaaaggttggatccaggcaagatccgatcttttaggttggatctaggcaagatccgatcttttaggccctagatatcgttgcccctcccttgcttcgtccaacccgttgacaccgaagtgagctagtgatccacgatggcaacagcgaggagttttaggtgtgggagacccaggaggtgtgtgagcaatggtggtggtttgtggcttgcggcttgtcaggcaaacattgaagacaataatttcctggtagcgacgagtggatctggccaccctcctggagtggttggaatctagggggttggcggttgttggtgacagtagcttggggtgaggttgtggtgtcgtctggagcagcttggggatagtaacaagcagcgctgtctttgatggctggtagttgtgtgtgctagtgcaagaagtagagttggagctgtctctaatggtgcacaagtcagagtttgagttgaaaagctgtcactcaagtcgtctggcactgttgctaggcggtgttggtgtagggagactgcaggagttggtgtgggggatggctgcacggggtggcctaaaactatagatgctgctcaccgcaaggctgttgggtggcttggtggtgagatcacggttggcgtgggaatatatgctggtggtggcttgaaggatagcaagtagaacccctagggtagctgggtgattcccctcaccttggatctcatccccctcttccggatggtctgcttccagacttcggccgtggggagccccatggcacgaaggaaggtggtggtttggtcaagttggtgcctgcttggtggaggataagtgaccttcagcatcgacaatgctctcttgaagtttgcagcacaaagggcttgtgctaggttccgtgcagggaggtggcggtgtttggaagtatccaccacgctagcaagcatttgtgagctatggtagagtcgaagttgcttggccaggtggcaagctcagcaatgataacctttatcttcttactttcaggtaccgtggtttggagtggatggagtagtgttgtttgcctatggagtggtggagacgcgcgccaccatttccttcaagttttcttccgtgacatcggaaggagcccattgactctcaaagctttctctctcctccgccatggatgcaaaatggatgatgaaatctagcgtgagggtggtggtgattggaaagggaactgatgcggtggttgtgcgggagatctttgcaaaagcacgaagccttgagaaggtggattggtgcagattggcaaaccctagttttcgccagtgcagtcttgtactgtagcagagaatagggaaagtggcggaggtctcggcggggaagacgaagcggcgcttggttagcgttttttgttagggtatcgggaggtactaatgggcctaggcctgcacagtgctttcagcccaacttcactattggtgtggctggttgtgttccttagggatttaagcatatatttttgccttgataaaaattgctcacaacataatagcccaatgtcgttaaaatcctttttgatgcagttagataattctttggaattgctacaatgcgaaataaaaaggtgcccggcagaaaagtgtaatactaattttgttgacctttttaggttgcaaagctgcttgggttttgttgagttggctaatttcagatggctatcctctcagcatgttatatgcttattttgatattgacataagtcacaacttaggctattttgacttgtcatttgtcattctttatacaacagttgatgaattctttaagggttttttactcagattcttgtcatatatgttggtttatagatctttagagtgcttttcactcgggtctctttatgccttttttgggcgtattatggctaaagcagtcagctgggtattttatcaactgctgcttgagcttaaatatataattcccaaagtgattcggttgtaatgtaccttgaaccactcggatagatgtttaatgtgccttgactatatgtttagtttttattcaactaatcacatagtcaggggctacacctaattaggtgcatctagtcgatgcacctgatttttttattttcagcccttcacagtctttgatttcagtactcgggagaccaatgcagaagaagttaaagtactcggattatccttttgaattacaagaaaagactatttcgtcgactgtaaaggtctcaggggctactgtgaagattatggataccctatacccacacggcatgtatatccgactgggtatgggggtaccatgtatagatagaatatctttaaagggtttcgggttaaattcctaaacttgtatatcaaggaagcacccaggattttagtcagttacgattgtatcttatctataactacctattccgttagggatatgggctgtactttgtaatacggaccccttcccctatataaggaggggtccgggtgcctcttggggcacaactttttctcccagatcatacgatcaataatacactcagcggattaatccccggacatgagtaggttattacttcttattaagaaggcctgaacctgtataaaattcattgtctctaaacccatccactttttcagcttgatagccacccccttttattattgccaaaatcttgtttcgacagagttgctgccgggtgacgagttgagagctggggtggtgccctatggagcttggcaatgataactcacaacatgtttcgtcctattcacaaagatgatcggcgattgagagtgtccaaggcgaaagccgtatccaatctctgactggccttggtgacgtcgacgcttgtgggcaatgtcttccctcttgggagcattgttaaagtagctctctctttcttcatatgaaaaacatgtccggtgtttcggacatgcgttggcagcattatggatgttgtttccttcttgaaggcttcgcccagaaagtcttgctctttggtgggattgcactaggtggtcttgagagttgttcaaactggaagccgaaccttggagttgcttgcctgtgatgagcttagtaacgatgacttttgccgtgcctcagttcttatgttgccacatgatttttctttttcgctctccgggtggtttgctaggtatttcgtattctaaccatgcaataaggtttttcgacccaatctcccttataaatcggactaactcttcttaatattttcattcagtagagctcctatcattaggtttttttttacttcttacgtttcacaatgtaagactttctagcattgctcacattcatttagatgttaatgaatctagacatatatatgtgtttagattcattaacatctatatatatgtggaaaatgctagaaagtcttacattatgaaacggagggagtaacaattagaaaaaaaaaccagataatgataaatactccctccgtttcacaatgtaagtcattctagcatttcccacattcatattgatgttaatgaatctagacatatatatctatctagattcattaacaacaaaataaatttcccacattcatattgatgttaatgaatctagatatatatctatctagattcattaacaacaatatgaatgtgggaaatgctagaataaaatagagaaagtagcacaaaacttttttttttccaagagcagcaaccttttcaattttctcaaccacgttgataaaactcaggcaatcaaaacccccatcagacttcaaagtccacggaaagctttgcattggcaacaactccacgaaccccagagaaattttcatttgggcaatacttggacgaggcagagacgctgtcggtgaccccagccgatggaagcccaaatctatccccggccggccatgcatcctgacgacgagctttaaacatttggccatggtcgtacggcgaaagccttgggaaatccggaggcgcacgtgaggcccgcgtgtgctcctgctcgtcggcagctgctagttactgttacttactgcgctcttgcccagcgaaagaggaacagctgcgcctcgcccccatcctcccagcacgagatttcacgcagtttttaccgtgacctccgtggttaattaaccttcccgtacttgtacttaattaccctctaatgctacttctggtacggttcggtcaagctgctgtcacagtaattaatcaattactcactccattctaaattgatctacatattttataggtacatattttattagtcgttttggctcggttagctgtggataagaaaatttgttattggagcatttttgccacgcatgagacgagattgcccttgtgcattcatggtgttattgctctcagattatctccttgttactccttttaacgcttcttttccatctcatttaattttcgcatgccctcgagcgctatctgtactgaagctgcatgggctgcatgcatgcatggtgcgatgcaaaatcgccaagacagaaaaaaaaggtatgtatctagaccaggaatcgaactcaggtcccaagacaacaacatgaaagctctaaaccaactgatcaactgagagagcagttgttgcttgcttgcatgctacatctaaccatatttaatagggatatgacttcttggtttttaaaatcgtgtccgaaacgactaataaacccagcccgaagggagtattatatttacctagcaacaaactcaatgcatgtaacatccctactattttttagccaatagcaaatcaaaatattgcatgtgggttataaatagttgtgtgcatggatgcatgtatcaatgtccatttactctaatataaaaataacgaatagacttaatgaatgaatataaatatgtaaatcatttagaaataaccttaaaaaatattatatatagattaatttagaatggagggagtagcatcaagagatgatgctgaactgtggatttgagatagtcatccatgaagaagtatgaacataagaggctgtttcaatttgtaccagtaccatgtcatggcgtgttaacacggcgatatgagtggcacctatgaacaggacacggagcatggatgccgcagctggctagcctgttaccctgcacaaatctcggcacggctaattaatcaagcttaagtcgttcgtcgatcgatgcaaatgcaactgcatttgcctcgatcccttgtgtttgtgtgccggacaatgcaatattgcaatatatatatatatatatatatatatatatatatatatatatatatatatatgttcaccgtgcagttagtccacgacgcagccaggtgtaagccaatgcaacacatcgcttctcttctacggtaggaatcaatccaagtccacacctacaaaacgcacaagttggtagcttcgcgggtctttttgacacagcttaagtttcagccccggttttatttttccttagagtttaaccaaatgatgatcttagcttcactaaaaataagagtgaaactggttgagtgcttttataaaataaactagaaatgtgaaactgggtttagacgactctataacttaactcctaaagtttaaattaggagttggagtcctaccaaacctaaatcactcctaattaattaccgctggattaggattaattagagcaagtttaatagtatagctcactactagctctagtttatctatagccaatctaatagttaatttatacaatagttgcttactatactattaacatatggtaccacctatcatatataaattttgtcttagagtccgtgctgcagctagctacagatctgtaaccctccgttctctcttattttttatcttattataatatgtttatagctggttaatagtatgctcttagtgcgtaaatacaaggggttaacaccaacgagcggcgctaacagtaattatccggcgagtttagcaagcaggcacaataattaactccactttctcctcgtctcccgataccggcgcagtgctgtgccgacgtggcagcgcctgttttttctatacagattgggaggaaaccaacgatggccaattaattaattgtttgattgattttttgcttatctaaagcagcagcataaaaaaatgattagtgggagtacttgaggcatcagcgagagcaaaccaagaatccaaccctattaatatacaggacagtagcattagtaaattggtggtaatagttaagctaggttaattatgctaagcagatatagtgagctgcttaattgggccctctaagctaagctagcaaagtatcagttaccagtatccacttggcttcatgtgtagctagtttgctagctaattaagctaagctttggttgtgtggattaagaaatggccaagaatatagatagctagtgctccatcattggttacacatctagccatggacacagcatggagccccaaacccaaatgtacgttcttgcctgtaattatgcagccagtttgaaacggagcagcatcatatcccccggcaagattttggttgcttttcctgaagtttatgcatcgatttcacaaacaatcacgctggccggagcagcaaccgggtacacgcactaattaatggagaaatattgatcacaaatattgatctttcacactaataaatggagaagtattgatcacaaatattgatctttcacaaaaaagatatactccacttcagtggattgtatagtctaaaaatcatcagattaactgattaaggacaagaatttaggcaatttggtgtattagttggtcgatcgatgcaacgagggtatcagggtaattaggcccatatatgtgctgggcccatataggttcctaattcggcccggttttgtaccttctgccaagacgaaatatgggccagtagagttggtgactaaatttgctctagctaacaatggcagatttcggcattaaaaaagtttggttatgttggctgttgatgttagacaacataatggtgtagaacaaaattttaggtttcgaaccaaaggaacgccaaaactcatagaaagtacgccttttgggcacctgtctttcaagcaaaaatgattgtaatagaagatttactttttaaatggaatatatagaaagaactgatgagttaattttaatgagtacatagcttgaaatattttgttgacaaagctaagtcatcacattaaagttaagcctttcatttctttttgaaagaagctttggtttttctactaaaactgtacaatattgttaggagtaggacatccaagtcgcatgagtggaagaaataatatgagagcaattccactacacagtaagtaaaaaaactacagggcaatcagattcatttaccagaagatgtgatataccaatcaactggcatatcgtgtgatataccaatcaactgaacaagttctggatgaggtgcagaccttcagtacagaagacatccttataattctctcctgattcctctcaaccctagcataaatttgttcgctaagcaaaaccgatgcatgagaatacattgtcgctgtagaaaggtgttgaaaataagtttcgatgatttattgtcgctgtagaaaggtgttgaaaaacaagtgttgtgatggtttgtgtgttacgagcaccggcgagggaacggattggatatgaatgggacactagaggacgaggcttcggcagcctctttaccctgcccgtgacggcgagtgggaggaacagaggaagggaacagagaaaatgggatgagaagtgtagattgaatcttgcttagattaaccataaattcgtggctctaaatagccttacattgaactaatcttgctaaaagaaagggataacaaaacagtaaaacaaactgaaactaatcgctagcaattcgcgtggtactgtttctcatctgacacgctgctcgtccgtcttcaccgcgcgccgtctgcgctcatacgtgatgccgaccatgacatctctcccctccttcgtaaatagctcgtcctcgagctggaacgcaggatacatgtgcctgaattctgtctcgtcttcccatgtcgcgtctgcagccggcttgccttcccgctggatgagaacctggcgcacaccgcgtgccaaacgagcacgaatagctttcgccagcattggcaaaacacggccattggacaatgcaggcagagcaggcggttggtccggcggtgtacccttgaattccttgagcaggccaacgtggaagacgtcgtggatccgtgcgccggccggtagcttgagacgataagccacatcgcctatgcggtcgctaacctggtacgacccgtaatattttggtgccagcttgccacgacggaacctgggcagggacgcagcctgacggtgaagaaggcgcacccacgcccagtcgccaacctggaacgcgagttcccgatgcttgtcgtcgtagtacagcttggagtagtcttgtgcttggagtagacgctccctgatttcccccaaaaagtcatcccgctcgatgagggcttggtcgactgcgcagacgcgtgccgagcctcggtcatattcccgcagcgctggaggcggcctgccatagacaacctggaacggcgtcgaacgcagggaactctggaatgccgtgttgaagcaatattccgcccagggcagccaacgtagccaatgccggggacgatcaccagtcaagcaccatagatacatgccgatgacgtggttggctgcctccgactggccgtcgctctgggggtggaaggctgagctcaagttgagcttgacattcgccaggtggaagagctccgtccagaatgagctggtgaagcccgggtcgcgatcgctgacgattgagcttgggatgccgtggagacggaccacctcgtcgatgaaggcacgcgccacagtcgtcgctatgtaggggtgcccgagcggaatgaaatgggcgtacttggagaggcggtcgacgacggtgaagatcactgtcttgccgtggacgcgaggaagaccttcgataaaatccatggcgatgtcttcccagacctgcgtcagcaccggaagcgactggagtaggcccaccgggtgcaggtgttcggtcttgttccgctggtaagtggcgcatgtgcgtacgaactcctggacagcttgcttggcatggggtgtgaagaagtccgcccggaatcggtggagtgtgtgtttgactccttcgtggccagtgtgggcatgagcgagcaatgccggcagtgtcggggaagacgccgagacgtagacgcggttgtcccggaggatgaggccatcacggagtgcccaaggcgcgctcagcttgccgctggtgatgtcggcggcgatcttgatgaggtcgccgtcggtagccacctcattccgaaggtcgtcgaatgccgagaatgttgggccggagagcgccagggcggcgatttcggcgtcttctgtgcgacgcgacagggcgttggccacaacattcgtgcaccctgggcgatattccacagtgaaatcaaagccaatcaacttgcttacccatcgatgttgtggaattgtcgagaggcgctgatccaggagaaatttcaagctgtagtggtcggtgcggacgaggaacgccctcccccacaggtacgcgcgtcaatggcggatcgcttggacgaggccgatcagttcccgctcgtaggcggcgagtccggcgtggcgtggcgcaagtgcccggctgaagaaagtgagtggacccgccccctggtgcagaacggcgccgatgccagaccccgacgcgtcgcattcgacgatgaacggcagggcgaagtccggcagttgcagtacgggcgccgtcgatagggcctgcttgagctcggtgaaggcgcgggctgcatccggcgtccactggaatgcgtcgcgcttgaggagggctgtcagaggagccgcgatcgtgccgtagttgcggatgaatttgcggtagtacccggcgaggccgagaaacccgcgtacggcgcgaacagaacgcggacgcggccagtcggccaccgtgcaaaccttctgcgcgtccatggccactccgtcggcagagacgacgtgacccaagtagctgatctggcgttcaccgaagtggcacttcgagcgcttgaggacgaggttgttggcgcggacgacagtgagcactgcttggatgtgctgaaggtgttcggcccatgtccttctgtaaattagaatgtcgtcgaaaaacacaaggacgaaccttcgtaagaacggcgcgaggacagtgttcatcagtgcctggaacgtcgcgggtgcgttcatcaggccgaatggcatgaccaagaactcgaagtggccccggtgagtgcggaacgccgtcttgtggacgtcatcggcgtgcatgcggacttgatggtaccccgaacgaaggtccaacttggagaagaagtgcgcgccgtggagctcgtcaagtaactcgtcgacgactggaatgggaaatttgtccttggcggtgaccgtgttgagcacgcggtagtccatgcagaagcgccaagaaccgtcatgcttgcggaggagtaggactagcgacgagaacggggatgtgctgggacgaatgatgccctgggccagcatctcagcacattgcttctccagctcgtccttctgtagctggggatagcggtacggccgaaccgcgacaggggacacaccagtcttgaggtgaatacggtggtcgacggcccgggccggcggcaaaccggttggaagcgcgaagaggtcgtcgaattccgccaatagggacagaaggagatcgtcagcgtggatcgcagcgcatgtggacgcgaggcgttcgtcgaggacgccgtatagcatgacctcccggcagccgcgccaaattgccatccgcatgttgacgaagtcccacagtatcggtccaagagtgcgtagccactgtgtccccaggatgatgttgacgcatccaaggtggagcgcgtagcagtcgacgtcgaatacctcgtcggcaacacgcaggttcaggccacgcgcaatgccggggctggtgaggcgatctccgtttgccactaccacacggacaccatcgcggaccagcgacagcggaatgccgaggcggaacgcaaggtcagcgtggatgaagttgtgggtggagccggagtcgacgagggccaccacctgttcgttcgcgaggcgggttgccaagcgcattgtgttggcgccatcaacacccaagattgcgttcagcgatatgtgtggctcagtgtcctcatctttgtcggccgagtcgtcgtcgagatcatccgccgtgtcgtcgtactcgatgtagaagagccgtgcgcaccggtggccgcggacgaatttctcgtcgcagttgtagcagagcccttgtttgcggcgctccgcgagttccgccggtgtcagacgacgaaactagcgagagttcacgttgggcacggcggccactgccgtcggagccggggaggcgctagcggccggagtcgacgcagccgtgcgcacgaactgcttgctgacggtgcgcgatgggctgaagttggctttgcgttcatacgcacgtgccaaccccatggcttcctgaagatcttcaggctgatggagctccacgtcgatgcagatgtcatcgcggaggcccaccgtgaacagttggacttgctgccgttcggtgaggagatccgtcacacggctggacaaggcgaggaagcgctgctggtaggtggccaccgtggtcgactgtgagaggcgcttgagttcacccaacgggttgttgcggattggtggaccatattgggcatagcatagctccttgaacgtgtcccaatcaggcggccctttgtgttgctcgtagtggaaataccactcctgagcggcaccagtgagatggtatgtggccaaccaaacgcgatccccatccggcgaacgctgtgcacgaaagaactgttcacagtgattaagccaattgagaggatcgtcggagccatcgaacttgggaaattcgagcttgtaaaagcgaggaactgcgttgccggagttggcatcgtgatgtgcgccgtgtctggcatgtggcggcggaggtggtggtgggggtggtgggggaggtggtgggggtggtggtggtggtgatttaaggaggccaccgccggtcagacgtggaccagaggaagtggaggaagactgctccaaggcggtgatgctggaggtcgcgacagcgacagaacggctgagatcggcgaggtcacttttggaggccaaaagcgaaatgccgctcaacaccgtcgccatggattcctgaagctttgccagtgcgtcggcatcagtggatggctgcgtggaggaggaggattgatctggtgccatggtctctgataccaagttgttacgagcaccggcgagggaacggattggatatgaatgggtcactggagggcgaggcttcggcagcctctttaccctgcccatgacggcgagtgggaggaacagaggaagggaacagagaaaatgggatgagaagtgtagattgaatcttgcttagattaaccataaattcgtggctctaaatagccttacattgaactaatcttgctaaaagaaagggataacaaaacagcaaaacaaactgaaactaatcgctagcaattcgcgcggtactgtttctcatccgacacgctgctcgtccgtcttcgccgcgcgccgtctgcgctcatacgtgatgccgaccatgacattgtgagtgtggaatcatctcacatgttgggtatatatggatatggttgttcttcttagtggctgatactaggcctttctcatgtgagttgtgatatttcaattggcacccacttttgatttcctaccttattactctagtactatactggtacattttcaaatctcagttattgcttcatgttgtgtttcattctggtacagagttaagggcttggcaggatagagaaaactgatgctgcttatgtgcctggtgaatgagtaactgacataggaaaatcatattatgtattgtcgcaaaatgccattgggtagtgaatcacagatacttcatggaatgtataaacaacgatttgtcaagttgcttaaaatttccatctaatataacatgacacactcgatgaaatgtactaaaagagctctaactcaacttgataaatgctttaccgtctgttctgaatgcattattttagcagataacggggccaggcacatcaatttaaatcccatacaattgtaacatctaagaaaccaagtacgtttggactaaaaatgctaataacacattatcactcttgagcattttgacttgtgtagtacaagcaattgggtcaggtacaggtgcaaaatttactgaccctgaactttcttctgttgtgggtagcatgtttgagcataatgatcatggaaaaaagaacccaaggtacaagttgctaattcaaaataatttggtttgtttccccacttgttcctcaggtgctttacactgactgagctctctcacacacgcatggttcgttatgtccttgcaaagatgaaccatgaagttggctttgtatctccaattcctgaagaaacatgtccctgagctgtctgcatggtcaaacatcacagtggaagcttccatcctgatgcctcccaatcctatgaaccatgcaatgttttacatcgggatcactgctcaagcatcgccacagaaatgtgttgaaaatatgtgaggtatgtcgcatggtggaaattaatgaaaaactaggataatatatatattgaatttgatgtgctcttctggtttgcatgtgtgatggactgacggcagagtgtcgattgctaactagatttaaatgggtagaatcaggaaattatcgatgtacgtgcatggtttttttcagattgtataaggattctaagtacaatggtgggtagatgcataaaacacgacgaacgtgggatcgaaaaataaaggtgtaattgaatcttcaacgctagggatagacatgagtggatatataagtaacgattgataagttctggttcaacaaaattaacaaagtacataataaacttgaaaaaaagagtatattttagctgatttactacttgattgcagactcacattctgaaccttcttggagttgaatatctgatccattggtagcctaatccaaatgaaataggcataactaaactcgggcactaaacttcccgagagctccatcattggtacacatctagccatggacagcatggagccccaaacccaaatgtacattcttgcctgtaattttgcggccagtttgaaatggagcagttaatgttataaaaccagcctcagaatcagcatcactagctaaatgcgaaaaaacgctatagcagatccaacattaataacgacactgaggcacgatatttggtaacggagattcaaaagaattacttactcgctcgtagatggtaaatttgattaatgatattttttaggcaaattttgctacaggacatcgcaattgtgtgtatttagctcacggacaccgtgaaagtgaacatttgggggaagacatcccataatcgtggatatttgcccacggacaccgcgccgtctcctctccacttgacatgctgacatggcagacgggaggctgttttttggcccggtcagacgcaaatacccctcggccttatctcctcatatccactcgcgtataccgccgccgtcgcgcggcgccaccccctcacccatggcgagctcgctagagacaaccgtaccaccggaaagcacacacatgggttcacctccgccatcccattccccttctcctcctcctcctctccaaggagaccactccctaccaaccggcgctccacctgagccatccccgcagccccaccacgccacccccatcttgccaccgtctccaggtcaggccaccaaggagcgacccagggtggaagaaccgcaacctccgatcgatgggactccctgtgcggcaggcccaccgacgcagccttcgttcttcccctcgcttctagagctgggtagctcggcggcaccatctgcacccgcagcgacgaggcagcccgactccccttcgccccatcctcccgccgagccatcggtcgagttctaccccaggtcggcggcgtcatccccttcttcctcgtacgaaaccgcggaggatgactggccggcgccgccaccgcccactcccccaccactggtcttatgcgcctcgctagattcatcctacaccgagtcttcccctgtgcgcgatcgcttcggcgaggaggagggttcgcacgctgcacccgagccgccgccgctgccgccatcggagataaggccgaggggtatttgcgtccgaccgggccaaaaaacaacctcccgtctgccaggtcagtcaagtggagaggagacggcgcggtgtccgtgggcaaatatccacgattatgggatgtcttccccaaatgttcagtttcacggtgtccgtgagctaaatacacacaattgcgatgcgatgtcctgtagcaaaatttgcctattttttactgttcatgttttgtttttatagactttagagatggtatatttgatgagaactctaatgattatttcagactttagatcgaggaattttatggtggaatttgaattgagcataaatattcttgatttcttttatatagctttgattaaaatactcttagaatttatttcacatggatttttaataatattttagtggctaatatttcttacttttataaaatttacttttctatggattattttcctagccatactcctatttaggaagggctcttttacatatttattgatttggatattgtattgaaatcacactacaccggacctagtcatctgtgacgggctctaaccctcacctttgacggatttagtctaggttacattagtggtcactgatgactacacctcatctcaaacgggtgaaagcccgtcaatgatgattgacacctctgacggaccgaacaaaataacccgtcacaggtgagtctcacctgtgatgagtggatcttttcagcccgtcaaaggtgataaacacctctgataggtttcaacttaccacccgtcacaagtgtggaaaatcaaccaaaaaaaaattaaaagccctcagcctttagctctcagctctcaggcctcagccgcccacaagccatatctcatgacatgaagaacatctcaagatccctcatgacacaataactttgcattttattgacagatatgttgacacatgaagcacatccacacaagtaatatacatcacaaatccacacaactttgagtaataaactacaaatccacacaagcaaccgagagtataacccaatctgaaatttggcaattaaaatttgcacaacctacaagagttggagatggcggcggcgctagcgggtggaggagatggtggacgacgccgccggtcgggggtagaggccgccggatctgacggttggtgatgcggtggaggcggctgccgtcggatctggcaggcggcggtagggtggcggaggaagaggcgaccggcggtggagaggcgccggatccgacggttggcggtgcggtggaggcggcagccgccggatttggcatgcggcggtggggtggcggaggaggaggcgaccggcggtggagagacgcctgatccgacggttggcggtgcggtggaggcggcagccgccggatctggcaggcggcggtgaggtggcggaggaggaggggaccggcggtggagaggcgccggatccgcggtggggagaggccgcagtggaggcggctgctgccggatctggcaggcgacggtgggggggcggaggaggaggcgaccggcgggggagaggcgctggatccgcggtggggtggcggaggaggaggcgaccggtggtggagagacgccggatccgacagtttgcggtgcggtggaggcggcagccgccggatctggcaggcgacggtggggtggcggaggaggaggggaccgacggtggagaggagccggatccacggtggggagaggccgtactggaggtggctgccgccggatctggcaggcggcggtggggtggcggaggaggaggcgaccggcgggggagaggcgccggatccgcggtggggagaggccgcagttgaggcggctaccgccggatctggcaggcggcggtggggtggcggaggaggagtcgaccgacggtcggaaggtggctgggggaggcggcgccggccggcggaggaagaagcggatgctgccgccggacccggtgctcggcgcgtgtatcgagagaagtctgtggagagagagagggagagagagtggagaagtggagaagaatcgagagaagtggagaagccagccttatctcttgggagaagaaatatctcgggtatatatatatatatatagtgacacaactcactcaaacgggttagggcttctacccgtttgaggtgagtaaacctcacctctgacgagccatccggttgcgacccatcacaggtagctagtcacctgtgacgggttgaaaatggaacctgtcagaggtgaggtaagcctcacctttgacggttttcacttccggcccgtcacctgtgacgggtcgaagctggatggctcactaaagacggcatctggtaggactcgtcaaaggtgactttcatcactgaccaacacttatgcccgtcacaaatatgccgtcaaaggtgtgaggatctggcgtagtgtcaaaatttggattttgttttatcttttgttcctaatttgaattgatctctttaactgtactttacttggcatcttctcgacctggatattatttattactaatgcgaatttcaaatatatctaaattgtattgtatttttagatggactattttctcaacattagttattttaaatccgaatttcaaatattaatatgttatatttctacatgaactattttaatttgaatttcgtatattttctatattatatttttacatggactctactttcaatattatttatttgtagtcttaattttttatatttaaaattttatttctacatagacccaaattaatggtctagattttattttgtttctcttactagtgtaaaaattcttataccttacgaacgaatatggctgactcctttttctatgaaaaataccattataaattttacggtagacaaaaaaaagttgcatgagggaaaaaaatataacacgttactgggtgatcatggtgattattaggaccaacaagttgcatgaggaaaaaaaatataacatgagagctcgtagctgcagcatgacactgcgtaatttgacacactaatttcagtaggcaatgtcttaagtgcaatagctactgggcggtcaaagttaattggccagtaaccagtaacttttatgctagccagtactggtgcaatttggagagttgaaccatgcaatcggaccaggagttaaagtccacaaggaagatcctcatcccactattgggaagggagcttctctcctggtgcctctcaaccctagcataaactggtttgctaagccgctaatgcaagagcatacatgatcgctatagaaaagatgttgaaaaaaataagttaagacgacgtgtgagtggaaccctctcacacttgttgacacggagaaagtattgatatacataatcttcatgtttggctgtgcacattcggttgaatttagaggccgggtttatcttattttctaaaaagaaaaagatattctttcatgtcactcataactagccatttctcgtgtgagttgtcacagcttgaattggcacccacttttaatatcctaccttattgcgatagtactatacgggccggtaagcttcagttcgattgttgccttttacagtatgttacatttcattcactagtacagagttaagttcggaggatgcagaaagctagtgtgctagtgagtgagttgctgacaagtgaaaaatcatgttatgtgtcataaaatgccattggatggtgaatcacaaacagaccatgggatttatacagtgatttgtcaagttgcttaaaatttgcatataaatctagtgcaagagcttgaacacaatggggaaatgaggacccctctttgaagattcggctaagggacaagtcaagcataagtcaccctcagggaacagatggacgcaaaggagaatacaagttcgggccacacagatgaataatacccactcctctgtgtatgtggactatcaatgtggaaagttacaattagatccgtgacttgtgtgagctctaattgctaaagaatcgaaccctctatctgttggcatggatcctccttttatacgcaaacaagagtccacaatgccaatgcatgaatacaggagaggaccccgctccaaagagttgggtatgcttagtcttttcgatgtccccatggcaatcagcgcccagatgtaacagcttcgctctccggttgacaagtggcgctggcgacgaggtgatctccaccccggtcaccgtggggcccaccagtcaacccttgagaagtgacaaggtagaattccgctggagtgatgcgggcgtgacacatcgcgcccctcctattccttcggtagacgtgggggtgtaggaggctacatgtggcgccacatctctaaaatatacctggatgagttctccaaatggctccctcctgcaacataaatcatgatgttagtttggaattaaacctccggacccacctagagaggcggagaaaaaccccaaaatgagctaggggcagtgggggtgcgcttgggcctccacctgggccccctagtcacttgtactgtgctctagggcagcctctgctcctcggggcagccgcaaacctagggcttcttgcttgcccggggcaccgaggatctctccctactttataggttttcttgttattttggatgagcttctcgaagatgttactgatgaaggagttcatagtgatcaccttcgacggagtagcaccaagcagctgtctgcctccttagcatattggagacataaatcttgtaggtatgtaccctctccttggcaccttggggatgtagacactgcgcatttcttgaagatgtagatcttgtacgtctcttatcgtaacatacaacctcggatgccccaaagaccccggaggaccagggactcatgttcccgttcctaacactatgggagtgttatgcgcacgtgctatggagaagaaagtagatgtccaataatttttacatttgatcaaatgttcaaagcatagctattcctgttaaaaattgttatattttgggacagagaaagtaaatagtgaccgtggtaaattccggtataggttttgcaacagccaagggcttggcaccatgatgtgaatttatgccctttctactatagcaatttgttctaaacatgttaacttcttatgaccgtatgcgattatgccaaatcaccacaaacataatatatatgtatttttataatccttttttctttttttttggtaggctggtgatagattgacagtcaagattttattaagagaaggaaaataattaaaatgggcttagttcattggctacagtgtttagggccggtacaatttgcaaagttgaaccaacatgaactcaactttatgtgaatctcatcgtgctctgcttaagaaaagtggcagacctttacaagagagattcccatcccataattgggatgggatcatctcttctgatgcctctcaaccttaccataagctggtttgctaaggtgtgtatgcaagagcatacatgatcaccacagaaaggtgttgaaaataagttgagatgtcttgtaagtggaatcctcacacgttggtgttgagaatatatggacatggatatatgttctccatgtggctgatactagccacctcttgtgagttgtgactcttcaattgacacacccacttttgacttcctaccttatttctctagtacttatactatacttgcacccttcaattcaactgtcgcttcatgttgtatttcattcactattaattagtaccctctccgtcccataatataaagggttttggagggatgtgacacatcccaatactacgaatctggataaagagtctatccagattcatagtattatgatgtgtcacatctcttcaatcccttatattatgggacagggggtgtacagactacagagtaagggtttagcagtatacagaaagctaacatgactattgaatgagttaccgacaacggaaaatcatgttatcaattgtcacaaaaatatcattcgatggcgaatcacaaacattcaatggaatgtgtacaatgatatactccctccgtaaaaaaaaaaaaccattcctatcattccaaggtaaaattagtaaagaatgaaaatgacaaatgcctcattattgaaaaaagtagtaatggtgataggtagataaagggtattgaaaggataaaacttctcgatttatgtactgagagtaggtacgatggtaaaagttggcttttagtgggacaaaattcaaacagcagaagttgagttttttagggacggagggagtatatattacgttacctcaaatttcatctaactcaacacgcgacactcgagaagaaaaatatagtcaagagctccaactcaaacttgattaaggcttaccatatggtccgaatgcatgatttctagtagatagtaggtaaatacccatcaattggaagtctactatatatgagatgcaacatttttaagaaatataatcatatatgccccaccttcttctaaatgatttatgcttataaactaattaagtttggactgaaagtgctactaacactgtaccggtcacaatttgcatgagaactcttccaagaagcatatgctttgcattggcttgtgtaatcggcagggtcaggccgtatagtgatgcaaatgtactgacactggagttgtttatgttgttgtggccttgtgggtactaatatggagtggtgaatccaaggaaacaagaaacctggtctcaagttgcagaatgagagcagcttggttgatttccaacttgttcactaggtgcgttgcgccgaccatctctttcacacaactctggttgggattgcccttgcaaaggtgaaatatgatgttggctttgtatctccaattcctgcccaaggaagccccggagttgtccggttaaatattagaatgaaagcttcaatcctgatgtctcccaaccctatataggagcagcatatgcaattttttgtaggatcattgctcaagcatatatgaataattaatagccataggaaaaggtgttgaaaatatcctgtacagtagcaatgcatactaggagtatgcagtgagttttatgtgcttttctggtgaagtggtgagcgaagaagtaaatttgcaccggttctaagaatggaggatgtgttatagggttatacccggttttacggtcgagggagagaggactctatcaacagtaaaaatgaggatgagggagataaactagacatattcccatccactttgccctatcctaaaagtttgcggaaaagctaactggagcgtacacgctggcaacgcgcacttagtacggtggatttcctttttttcgtaacttttttttcccaagacgagtgcatctaacgtaactaatacattagttttagataatgacgataattaagataagatttttctttttagggatatttttttaaataacagattaaaaataaatctatatatgaagtcaaattttgaaaactttcaactcgaaatatgaattttttgcagtcactttcaacttttcatctcaattttgaaaaactttcaactcgagatttgaaaatttttaactcagatttgaaaacttttaactctagattttaaactttcttcaaattaaaaaactttcaagttaagatttaaaaactttctactcaaatatttttaaaaaagtgtatgctaactattaaaaataaggaaaaaacacgaaacaaaaataaaaaccgcgaggggagggaaagcggaaaaaagaaaaacgaaaaagatggcaaaaagaaaacgcgaaaaaaaaagaagagagaaagtgccgcgtgggggcgccagctgttactggggcgcgcgccaattagctgccccaaaagtttggcccaagcccaagcaaaatcctggaaaaagctcgacagactgtcacggcccggtccagttcggcccaacgggggcgccttgcgccaccgtgtcggagacgggaggcggcgtggccatctccgcttggctcgacggctcgcggcgcagaatcggccagcgaggccgtcgcttgactgcctgacttccgagctcctctttgcgcttttctcctttgaaccttccagaacgcgcaaggaagatcaagcagcgcgcgacgacgcgacaaattccccccccccctcccccctgccggctgcggacgaacgaacgaacgagcgagcgagcgaagcgaggaattaagatgttcatccagaaggtgaggagatgtctccagctctagtctctcgcaccattaatctgatgtcctcctgtatgcgtggttaattttggtggatttggttgtgtgggcgtgtgtgtgtgtgtgtgagggcgcgcaggcatggaggacggcggcgtttggggtctacggcttcacgcagttcaccaaatccggcttcgtgtaagcgtgatctcaccgagtcacctggctgatttcccccttgttttctatagctttgccaatttattgatattgtgttctagctgtgaaacgatagtctgtatcccctgtaggaatcctgattttttttttgaagggaaaatcccgaattttaggatacaactgctctggcccgttttggagatgtgatgtaataactgtgattatagctgcattgtgcgaattatgtgtagttcgatgccattatgccaagtagtgcaaagatagggaacccctgtccatcaataagtaccggaattatttagttatcactggagcaaatagtatcgaaggattttctgaggaatctatttgcgtgtagcaggttaacaactttcacacaatttggtactgaatgaaaagctgtcaaaggatgcaattgttgacaccatggctgcattatttttgtgttccatgctaacgaggattcttttattcagggaacatgccaagaaattcagagaggaggatatgcagatccggctggatgggaaaaattgcctagtaactggggctaattccggcataggttttgctacagccgagggcttggcatcacggtatggatctatacctttcctactatgatgatttgttctgaacatgtaaaattcttgtgatcacatgttttgtattcttccagtggtgccactgtttatatgctttgccgtaacaaggaaagaggagagactgctctcagtcaaatacgatctaaaactggcaacatgaatgttcatctggaggtacatgatgcttcagaaccgaattttactgcatgctaatttgcaataaaccttggtgatgttgtacagtaactatacctgaactaagtctctaacacaacaatagtattgtgttgcagatttgtgacctttcatctatcagtgaagtcaaatcatttgcaacaaaattctcttcaacagataaaccacttcatgtcctggtgagctttgcctcttcaaaattatgtcgtatatgtgtttcttgtctctggttgttgcttcttttatgttataaccatataattcagtaaagtttttttgtaaattacattaatcatggttttgaataaccagctataacatatgggttgttgttctaggttaacaatgctggtttactagagcacaagcgtgtgactacgccagaagggtgcgtgatactctgttgtttattgtgctcaatatattctcccctagttactttcgtactcactaaaccagatatcttgtttgctttcataacttatccttttattttaaaaataaaaaaggttggagctcaatttcgctgtgaatgtagcagcaacatacactttaacagagctagtaatgccactgttggagaaagcagcacctgatgctcgtgtcattacagtttcttcaggaggtatgtacaccgagccattgaacaaggatttgcaggtaaatttgtttcctctatgctcttattccacagttgaacacaatgtgtaaattgtgaaaataaaacttaatcattacgattttttcgtttgtcatgctcatgcctctctttctcaaaacctttttcgtttctaagtttgcaagagtgttgttaggagaaagatatttatacagtagaacttgctaagagggcccactaggaagttagcaaaacagaacaaaataatatagttggtggagcacttgattttttgttttcatacagttcactttgtggtgcaaaattcaagcaccctatttatctagttcctcaactgattgtcactgaaaacgaattagctttggtgaatttcagagagtttgtacaattgcatttctccccttttcatcttttgtcttataatggtattatggtctttctatgcatatctaaagtgttttacgaaatatgcatgtctaaagttatggaaaccatagaatcatgatgttttgttttgtcataaaaatgaagtagcatgtgaaagtagtcagatactgcaataacagtcctttttcactattgtttatacttcagttcggtgaaaacaacttcgatggaacacagcaatatgcccgtaacaaaagagttcaggtttgtaaacctcgaagtggtttctttatttggaatgctagtctttatgagattgagagaatataacaatctatgaacttcattcaggttgcactcaccgaacggtggtctgaaaaatgcagcaacaagggggtaggtttctattcgatgcatccaggatgggctgacacacctggagtctccaagagcctgcctgggctttcagagaagtagggctttctgctgtcctaagtcctaactactgcctatcttgatccatctgcttttcacttaacatcaaacccataaacttgtattacaattattatgctaggttatcaggaaacctgagatcaaacgatgaaggtgctgatacagtgatctggttagctttgcaacccaaagagaagctaacctcagggtctttctactttgaccgagctgaagcaccgaaacatctgaagtttgctgggactgcagcttcgcacgggcagataggctcgattgttgatagccttcgctccatttgtggcatttagggaaaaaatatttgctgggactgcagcttcccacgttcagataggctcgattctagtttctggatagccttggctccatttaaatttgacaaaaaaaatgaatttgcaccagccgggaatcgaacccgggtctgtaccgtggcagggtactattctaccactagaccactggtgcgttgtttagaggtggtgactcttatttgtaatcgttgtttggttttacaactatcatagctttaagtaaggaacgtggatatttgtattttgtaatggaatttttttcctatatgacatgaaaaaagggagcagatttttttttatagaaatttgacttagaagaaatgactttgtgtttgataacactttgataaaatcccaggtacaaatgattctcaaaatgattggcttgatacagaaatggaagatgctccacaaagaagaaggaagtgcttggaagaacgggctactgaactaatcatgaaggcaagaagtctgtgaaccagtgatgttcatgttctaccgttagatacatagtaagtttgtttcttatgaaagtggcagtgaatgatatccctggcttgcatgccgtagcacagatggatttggctattgaacatggattaacagttttgtgaatcagcttgaattctgtgtgtgaatgagtgaatcggcctgactaacccgagacaaagacaagaaccgcctgacgccgtacaaatgattggagaggagatgggcaagaaagtggcgagaccaagaagcgaatgcatggcgcgttgccacaaataggcagggagaggccctacacttcatgtcgaattactagtttcatggacggactccatatatcctttcttggtagctcacccattgccattctttcaagctccccgtccaaccgatcgtacgtctcctcagctcatccgcttgcctcgtcgctgctgctgctgctgatccacaagcgttcgtcggagatgaacgacctgttctcgtcgagctcgttcaagaagtatgcggacgcgagcccggcgagcggcgtcggcggcagcgacatggaggccggcggcgagggcgtggtgaacctggacaggttcttcgaggacgtggagggggtgaaggaggacatgaaggggctggaggcgctgtacaagcggctgcagtcgacgaacgaggagacgaagacggcgcacgacgcccgcgccgtgaaggccctccgctcccgcatggacggcgacgtcgagcaggtgctccgccgcgccaaggccgtcaagggcaagctcgaggccctcgacagagacaacgccacctcccgcaaggtccccggctgcggccccggctcctccaccgaccgcacccgcacctccgtcgtcgccggcctcggcaagaagctcaaggacatcatggacgacttccaggtataagtcaacctaccctaactgagtgacatgcaaacaacgagaggatgtcatgtccttgtggaggacggcgatgaacatggaatgcacgcaggggctgaggacgaggatggcggcggagtacaaggagacggtggcgaggaggtactacacggtgacgggggagaaggcggaggacagcacgatcgattcgctcatcgagtcgggggagagcgagtcgttcctgcagaaggcgatccaggagcaagggcgggggcaggtgatggacaccatctcggagatccaggagcggcacgacgccgtcaaggacatcgagcgcagcctgctcgacctgcaccaggtgttcctcgacatggcggcgctcgtcgaggcccagggacaccagctcaacgacatcgagagccacgtcgcgcacgccagctccttcgtccgcaggggcaccgtcgagctcgaggtggcgcgggagcaccagaagagcagccgcaagtgggcgtgtgtcgccgtcctcgccggcatcatcctcatcgccgtcctcatcctcccggtgctcatcaacctccgcatcttgacgctcagatgattcattcatcatttcctccctagctaacctgctaactcagatgtgtcaaattaatttatctactattttttttctccatcatgtatgttaatttcgttttcgtttaaaaaggaaaaaaaatctctgttttttggttagaagttgtaggcttcaaaatttgtaccttcctcattgaatgagaagcaggggagatgtatattacagtgatgtaacatttcttgatcatgattattccatactggcagcaaattcaatcttttagctaggattctctatgtttgagatgggaaaaaaatcaacattctttgaaaggaactgaataatattagcctccatcaaattacatcatgataatgccatgctaatgtaaatttaatcagttatggccatgtttgtttaatctctcccataagggttttgagggatatttggaagggatttattcaacagctattgtggtgtgaaattatttctcctcgatccccttcattcctcctctcttatggatattatacgaaaaaggtctaatagggtattatctgcattccatttcaaaagaaaaggacacatccggcgagcagaatttgcaaaaaaaaatcacaacagatttgaacgctgcaaaatggacaattcaattcatgcatagataggatatgttgaacgaaaagaaacgaaaatgaaaaacctattgattatcctatctatgtagactactatgaaaatttccctttttttaccaggtaaacatttttcagtttgatatatactccctccatttaaaaatatatgacgtgattgacttttttttataacgttaaccattcatctaattaaaaaaatattatttattttgttatgacttattttatcataaaaatataatcttaacttatacttctacctattcattactaaatctttgaataaaacaaatagtcaaatattatgtgaaaagtgaacaacgtcatatatcttagaacagaggtggtattatatacacggacaacgtaattttacaagagaaaattaaggatgcatccggcgtgaagaatttgcaaatgtcacaacacatttgaacgctgcgaaaaatggacaattcaattcacgcatagacccactctcactacatgtacgccacgcacgcacccacccacccgtctcacacggtatgctcacaccagcaccatcaacaatgccagcaacgccgccgcggataagccgacgccggcgacggccggcgcggcggcgctgatgatctggatcgggaacgcgcagccgcgcgcggaggcgttcttggtggtgatcttggcgaggccgtcgaagtcgcaggcgcgcacgtcctggtcctgcatctggaagtacatgttgaaggcgtaggagatgttgctcttctcgtcgaggccgttgcaggagcacccgtagccgagcgccgtgcagtcgccgctggcgcacgcgtactggatgttcccggggagcttggacttgtcctcggccccgtcgtcgaacacgcaccactgcttcgggaggtactcgacgccgggcacgccggcgagcggcttgtcgttgccgtggccggagaggtccatcgggaacttgggcttgccgtcgtaggtgaagatgccccaatggcgctcgaagttgcccgggagaatgctcttcatgtcctcgtcgaagaggccgaacatgtagacgtccatcttgccaggccggagcggcgtgccttccttcttggagagcttcttcaggaggccgtcgtagtagcgccgcgcgagcttgaggttggcgttcttgtcgccgtcggtcggccagccgacctcgccgacgacgacctttaggcttgggacgccggccttcttcagcgcggtgaccagcgtgtcgtagttggcgtcgaacacgttggagtagctgatgccgcccttgtcctggatggtcttgccgccgtcgacgaaggcgaactcgaacgggaagtcgtcgctctggtacaggctgaggaaggggtagatgttgacgacgaagggcgagccgtgctcgtgcaggaacttcaccatgtccgtcatcaggccctggatgtccggccggaacgcgccggaggacggcttgttgtccggcgagacgtacacgtcggcgttcagcgggacggtcgccttcaccttgtcgccgacgccggcctcgttcagcgccttctggatgttcttcagcgccgggaaggtcgtcttcatgaacgatccgttgtacgccttgagaaacggctcgttccccacggcgacatacctgctcgatcgatcagactcacgattaggatcatcgcggggattgcggccatggacgaacaccttggcgagcggccggcatatgcccctacttgatcttgagcttgtcgccgtagctggtgacgttctccttgacccaatcctgggcgttcccgtagctgttcatcgtctccagcatgtcgttggggatgccgagcatgacctcgatgccggagtcgacgagcgcgccgacgggccacgggtcggcgtcgaacagcttcaccttcaggatgccgttctccttgagcatctgcacgaccgacttgggcagcagcgggtgcgacagctgcgagccccagttcacgccgacgtccacggcgttgccgtccgccgccgcacgggacgccacggcgagcagcagcagcagcgcggccgcgccggccggcagccgcggaggcggagccatgccggggtttgccgtctcagctctgatcgatctccccgccccctgtgtttcggatcgatggcagctaggtgagagatgatcggatttggtggtgttcgcgcgctgcgggcctccctcccctcctgtggagaggaggacaaaatggcgggtaaaacggttggagtttgaccagaaaacatgcaagaaaagctcatcacctgtagacctttgttgaccacaacaatttcgcgtagaaaaaaataaaataaaacgaccatatagttgcatgcacacgtgttgtttttcaataaacaacgcaaatctttgaaaactggggcacgaatatgctgcacattggctatcggaagaataccaaattaacattcctaaaagtgttcctttgtgaaaacctacagctgcatttgttgttggatttaattccccccatatgtacaagttgaatttgattatgtactatgtttgcggactgatcacttcattgcaaaaataaatttgaccaaattttgatatttttatagggtaacaaactaaacaagattttaccattgcaaccttaccaaaatctatcaaaatttgactattccagaaccttccattaacaaaatgcaccaaattttagtaagtattaaactaaacaacattttcacattcattgacttgacgaaatttagcattgtcaatccttggttttaccaataaatggaagtagtaagatttattttggtaatgaagtgaataaattcgtcatttggaaaagtccagtcatcccttgaggggcaccttttttttcatgttgctcaagaaatcataaaaaaattatattttaataagataaattaatatgtgatacatcataaaaaatatgcaagttgatatttagcatatgtaaaatagaaataaacgataactttgactataaatagtatgcaccatttgctgtcaattttgttataattgtttatatgtgtaagtataaataaacaaatatagtgtcttaaaattttctttaatatttctatatatattataataaaaaaataataataaaagttgtttttttagattgtgttcttatccaaaatggtagttattattcacccgagggagtaacatttctcattgttaaggtcaagaaagccagaggacatcatgctcttatcggttaagaaatgcaactgtcacattgatcgtgttgctattagtttttaaaatcatgtttccttttctaaaataaattaaacagacacctacacatatcatatttggcagtatttctcactcccgatgcatagaatgcatagaatgtgttcaatgtttaagcctttaagatcactgtagaaataagatgggacccacgcattcttacgttcatttgcatatagcacatgctacaatgtatatagctttttcttatagatctttaagctgggacccactcattaaaaaattttatttaacatgaatgaaagagcaccatgcatggtgcaaaaggtacgaactaattttttatttcttacgatctagccttaaggttggctatagatatttttttcactttctcatctcccaatgtataaaggtagaacaaaaatactattttattattttgcatgcaacaccgtggatgcagtaatactattgaagtttcgaactcatcttgcctcctttcttcttcgccgcacggcaggcaagcgcctgcatgatctcgtcgatgccggctgatgctaccacagggatgacagcaaaaggaacaatgatgatagcagcaagggtagtatgcacattagcacatactcctattcattctagtgcaaaacatgactgcctcctggccttggaacttggaagattacaattcgaagaatcaggagtgtctagggcatgtttagttggcaaaaaaaaaaaaaaaattacccctgcatggcacatcggatatatggacatacatttatatacatttgtagtattaaacatagtttaataataaaataaattacatattccatcaggaaaccgcgagacgaatttattaaacctaattaatccatcattaacaaatgtttattgtagcaccacattatccaaccatggtacaattaggcttaaaagattcgtctcgtaattttctggcgaactgtgtaattggttttttatctatatttaatactccatgcatgtgtccaaatattcgatgtgacagcgtgaaaaattttgtttgggaactaaacaggccctaactgggcagtagaactttcactttcacactattggattggggcaagatactggtctaacatctatggtatacaaaggttaaaatttgagagaatctattctataccactgagtttgttcgagttcaatgatttaccattgatattgtctctttctataatataccaacgactttatcaattattctacagtacgccattggctgaaacttctattcaaaaatacccaaaatacccttagagacatacaagattaacaattgatttatctcatcagaagttttaaaaaaatatgaaaatttttatgtggcctctttacacaatttggaagtttgtatacaagtttcaagttttttcaagtatatttagtttttagaaaaaaaaacatttttaagtggtatatgagggagaatttgcttatacaagaggtaatagcataaaaatatcttatatagtgaatgaaagatgatttatattgaaaacaacaataaaaaagtattttatatagcatataacaaacaagttatattttgttaaaaaaataaaaatttagtaaaaaacttgaaacttctatataaatttccacgttgtgtaagaaagccacataaaaattttcatatttttttaaacttataatgagataaatcaattgttaaccttgtatgtccataagggtattttgggtatttttgaaaagaagacccaacataatggcgtattgtagaacaattgataaagtcaccggtatattatagaaagcaacaatatcgatggcaaattattgaactcgaagaaactcaatggtataaaatagattctctcttaaaattttcagcctggaactcggtgccaagctgactaacgtgaagataacgatatgtgaaaaagaaactggaatgcctgaaacgattaagctcataatttttttaaaaaatatttggttctaatatttggagggaggtatctccctttaaatcatttttttatagtttagaaggttaagtggccaaaaattgtttgaagtaaaatggactacctaaataggttgaggtagtaaagtgaactttttttagggtgtgtttgtcacggtcatgcatggataggatatggacatccatattttgttggacatagcgaaccaattttttgtttggtttgtatggataggacgactaaattttgtttggttagagggatataacatggatgggaaaagccaaaagtttgtgggacctatttgtcatatatacatatatgtatttatatttttattaacatataatcattcgagatcttgttttaaatatttaattgtaacaaatataatggtgtaaagataaatggtttaggagaaaaaaacatttagagcttgcttcacagaaaatcaaaccaaccacagccaatcagaatacgacatatcacccagaccaaaactggatggcttcatcgagcatattgagggaatattctatatttcggaccaccccatctaccctgccctctaaccaaacaccacaaaaattcagacgatcatctcctatccagactcatccatccaaccaaatacaccattaatgaatttgtattgtgcttatcagaggtataaacaagataagcgagagagtacgtgagcactagttttctcgatggatccaaagtaggaatacaagtcatctcgtagatcaaatctatctattatctatctacctatctattatatactaaaagtccattaaactttctacaaacgctcttaagctgccaagtaggactcctacaaatgctcttagtccgtcacgtgactccatcaaatctaaccgttgattttcacttaaatggtgaacccgataattttaaaccattagattaaactttccggtggacccgatattttaggccattagattacatatattttaaaaaaagaaactaattccttaggcagttacgtgtttatgtatacaggagaaatttgtacgtacgtacaactgaactaatgaagagaaaaaaaactacacacagaattaccataaaatcaataagaaaaaaacatacgtacttagtaccttgcaaaagtttgataatatttaaaataggattttctattatttaaatataaaacatattacttcataaatttacataaatatcaccgtcgatttttatttaaattggtggacccgatcgatgttttagaacattagattagatgcctaaaagtccattaaatttctcaaaaatgctcctaattcgccatatgacattctacaaacgttcctaaattgtcatgtgatgctataataaatgagtgaaattcttaaaaaatctgaaataacaaaaacatatttcatttaatttggtggacagattatttatagccattagattaattttcaagaaatgaaattactctcctaaacctaggaccacctaagcctgtatgtaaaaaacgaacgtacttatgtacgcctcctctttcttcaattcatttatctacattttcaccgattccttctcatattttcatgccttattagttagataagcaataattttgtgttaaacaagtaagcttctgaatcatacaactaatttctaatccgcgtaaatctttaaattatttataactaaatctacagttgaagaccatatttcactagctataatttagctttgaaaaaataatgtcattttggtttatattttattacttttgcatgccattcaagcaattataaaaaatataaaatactaataataatatagattatatcatcatacataactttataataattaaattaggtctataatcataaaagtaaaatgaatatactatgagtaatgtttccaaaatatgttagttagaaagcaaaattatgcaagaaaaaaagcaactatagcatctaaatccacaactaatatttgatgaacttatatctttagattattttacatttaaaggcccatatccactgtaatatcgacttcgagaagaaatatatcactttggggctatattttctaatttttgtgtgccattcgaacaattatgaaattatagaaagataatgatatagattttatcaatatgtatgacatcggaataattaaattagatatatatggataaaagtaaaatgaacctaaccatgagtaatgttttaaaaaactactccttcattataacattagaataagtcaaaataacattattggattgtagtgttcgtatttttcatatcttctgcgaatataatggaaaagacaagtaaaaatgatagattttaatcaatcaataaatcatttttcaatttttagttaaaaaagtaatagcaactaaaacattacaatccggtaaaaagaattattacaattatatgcacgcataatctctacccttcaacgctctctttctctactcactcatttaattcctttatctcctaatttttaactaagtaaagaaatatcaataataagaaatctaaatgattataattcttaaattaaatcataattttaacttatttgaatttttgttttatttacaattaaataaaatgtttaagatccatattacccatatttcactttataaaaaatgaaaatatgtcatttaagcatagacatcgttcctttgcatggtaaccaaatagaaaaaacatggaccataatacaaaatgaaaataagtattatattaccgtaaatcactggacatcctctgagcacactcaaggcgtcgcgtgttacaccttaaataaaaataaaactttacaaattggaagaaaaaccatcttagcatcagtttccacttaaataggtagatccattattttcaaccaatagataatcttttaagaaaatcttaagcaaccatgtgttacgtcttaaaaattagaaaaaataacataaaatgtgagaaaaaatatatcatcggtttcacttaaatcatttagataaaatagaaaaaaaatacccctccacttcaccatccccccacacatacgcacaacacggtactattcgcccaatcctttctcgtcttgagctctccactctaccccttcctgtttatatagccggaaataataaaaaattttaaaacttgcataaatttcaagctacacattcgatttctaatctagatattgttgtatttataattaaaagattgatttaaagatccataaagcctatattttgagctggtataaaatataaaataaagcaagtaatagaaaatgacaatagagactaaattaaactatttagagaaaacataatagttagtaaaaaattggttctcacatttcactaaaattggaccaacccattgcatgttcctttttcgtaacaattttaaaatgcttagacattaatgtccttacatctatcctatatcatagcattatgagtttcttcacatattattacacatacaaaccgcactaaggttcgcactatatagttcattgaaaagttatatttgttactattaaatttaaaattttggattcatattaactaggtattttcttttgaaaatatagtacatataacacaaatcgcaatgaagcgaggtatatgacatgtctttattaatttatatataagtatgtaaaaacttgcatcaacttaaaccaactagaaggagaactacttgatgctacaaataaatcatatttattaacaataatagttctttagaatttgttaaaaaaagcgagtaaacattctattaaaaagggacaaaacaccttacttctaatttatacttgatttattagacacattttccaaacaaactaaatcgaacttcattctatataataaaacgatcatagataattatttatatagatgtattaaatattatatattttaaaacctaacaaatatcttggaataattatcaaagcaaaatgccaatgaacagcggaggcctcatctgatgtgtcttattaaaaaatagtacttttaaatatgggaggtgtcagtctattgatttatatatattcaaacgcaatatacaatacatgcccgcgcgtgaatgggcgggctacctttctagttgtactaaatctagtccacagttattgacgccatatcccattggctaagtataaagtcaaactagcagccgcggtaattaaaatagtcacaaacagatctcagcttaccgcggtatatgtttcaagaacacgttactcaaagacaaaacttccattccccaactccaagcaacaagcacacccgtgccatggccgcctcagccaaccgcgccgccgtcaacggcgccgccggcagcggcgagcctgaggcgagccgcgaccatgtcatcatcttcccgttcatggcgaaaggccacacgctccctctgcttcacttcgccgcggcgctgtcggtccaccacaagagcctccgcgtcaccctggtcaccaccccggcgaacctcgccttcgcccgccgccgcctgccggggtcggtgcacctcgtcgtgctcccgttcccgtcgctgcagccgccgctgctgccggccggcgtcgagtcgacggacgcgctcccttccatgtccctctacccggcgttcctgcgtgccacggcgctgctgcgtgagcccttcgcggagttcatggcgtcgctgtcctcctccccgccgctcgtggtcgtctccgacttcttcctcgggttcacgcacggcgttgcgtcggacgccggcgtccgccgcgtcgtgttccacggcatgtcctgtttctccatggccatatgcaagtcgctcgtcgtgagcccgcacgtcggcggcggcgccgccccctttcacgtctcccgcatgccggaacatgtcacgatcacgccggaggagatcccgcctacggtggcgagcttcgccgaccccgacaacccgattgcccggttcatgatcgagaacgtcgaatcgacggacgtccgcagctggggcgtcctcgtcaacagcttcgccgcggtggacggcgactacgtggcctccttcgaatcgttctaccagccgggagcccgcgcctggctggtgggcccgctcttcctcgcctccggcgacacgccggagcgggacgaggagaacgacgaccccgagggctgcctcgcgtggctcgacgagagggcatcgcggccggggtcggtggtgtacgtgtcgttcggcacgcaggcgcacgtcgccgacgagcagctcgacgagctggcgcgagggctggtgcggtccggccaccctttcctgtgggcggtgcggtcgaacacctggtcgccgccggtggacgtggggcccgaccaggggcgcgtcgtcagggggtgggtcccgcagcgcggcgtgctggcccacgaggcggtgggagggttcgtgagccactgcgggtggaactcggtcatggagagcctcgccgccgggaagcccgtgctggcgtggccgatgatggccgagcaggcgctgaacgcaaggcacgtcgtggacgtcgtcggcgccggcgtcaaggtggacgccgccgtcggctccgtcgccgtcgtcgggagcgcggaggtggaggagaaggtcaggagggtgatggacgccggcggcgaggaagggcggaggatgcggacgcaggccgcgtgggctcagcgcgcggcgaggtcggcggtgagcgacggcggcacgtcacgcgtggcgttgcagaaactgattggagacctgcaggaaagctactagtatgtcgtcaccgcagcagaatgaggtgagaagaaattgttacaaaaattgagtttgaccataccgccggacagcagtatacacatcatggtttgactaggaaccttatttattgttgcttcagtatatgtgttgctttgactctattctaaacttgtttttatcaataatttatttgagattgctccagatgtttctaaaattcttctagttatcctcgcaacatttctcaactaaaattacttggactagtgtatatgagaagatattgtcgcaatatggagtttgttccaatgaaacttatttgtaatatatgtgtttactttttggaatatttagcatatcttatttttgggtgtatatactttaagtaacaattatttttatcttatagatgtatttatggatttttagatatattaatggatgatatttcttaaaaaaatatggctaatagaattgtttaatctaattaaagataaaattctatgtacttgtctcttttcatatgctttcttattttcattgaaaatgaattctacttgaaataagagcgcagttatatgcgtagtgtatttttaattagtatgtatagagtattttgaaatgtttaagtgtcgtagactaacgtatacttgtgttagggcaattctttaaagttttgttttattgcatgacttctcatatataagttttgtattatttgtgtttcctaattaaccaaagttagtactccacatacaactgggtgtgtttagtttcatgccaaaatttaaagtttgattgaatttgggacgatttgacagaaaagttggaagtttgtgtgtaaaaaagttcgacgtgatgttttatttttgggggaggggggttcaaggtttggaactaaaccggggcactgtcaatctttccgctgtctgccacgttcatcggcatcaatgcttgagctgaccaacccaatggctgctggcttggggagacaagaggaatatgaagattcagttttacatgtgggatattaattattttctaatatattttgctgacttagagcaaatttaatagtacagtctactactagctctaattcatctatagccgatctaatagccaattcatacaatagttacttactatacgattaatatatggtcccacctatcatacacacattgcatcttgaagtccgtgctacagccagctataaatctgtagcctgctactcttctctctcaccatttatcttattaaaatatgtttatagttggctaatagtctactattgtaactgctcttagatggccatgtctgtgctacattggcgaaaccaccatgcttcaggcaaggagggggaggttaatttgaacggttttaagagttgaggggtgtatattatacccagttctgaagttaagggtgtaatttagataactgctacgttatagttcgcgcggggggggggggggggggtaaaatggacttatccctttctttagggataagttagttattttaaattgaaactagcatggtggcctgcgcagattgcgcggctagcatcattatattttgtatcatataatagcatatatgttttctcattgtatttttcaaagatattaaaataacaacataattttaaattttgaactaactttacgaaactattaatgtgtaatatttatattgtattttatatacgtgttagttattaattattttaaatattaaattttagttatttgtaaattatatttatatatggactctatactcacctttcaatatttctatttttttaatttcgaattttcgttatctgtaaaccgtatttctatatagactttaggctcttcttccaatattatttatttttaatttttaatttttattatttctaattgtatttctatgtggactctaaactcatctttcaatattctttaatttttaatttcgaatttcagttacttctaaattgtattcttatattgactttagactcttcttcctatatttttaatttagaattttagttatttgtaaattatatttttatacggactataaactctactttttaattttattatgtttgttccgatttttagttagttttaaattcctatatggactctatactctacttctaatattccttatttttaatttcgaatttctattatttcctaattgtatttctatatggactctatactctacttctgatattccttatttttaattccgaatttctattatttcctaattgtatttctatatggactctatactctacttccaatattctttatttttaatttcgaatttctattatttcctaattgtatttctatgtggactctatactctacttctaatattttttttatttttaaattccgaatttcagttatctataaattgtacttttatatggactctagtctcatttttcaatattccttattttttaattccgaatttcaactatttctaaattgtatttctatatggactatatttttctttttctccgattaatatgagaatttctagatcgtgagagcgaacgtggaggctttcttttctattcctttaataagttaatagattccttgggatgattaatgcttacagtaaacttttgcgctcttcgacgtgttattgctctcattgacgggccatgaaacaatgttattccagggtatagcttcagcccagcacccggcccacgtaagacaacctgcgtgtggcatcacactgactgtgtcgacggtatcgtttgtgcaactttgtgctaaactagttggcgcaacggttggactcaacttggtccggatcggatcggagtatcggacagagtcgtcgacgtgctccggtgctgtgtgctccgctggccatcgcagattcaccgcccggccggccatacgcgtcagcagctatacaagggtgcagcgttcagtcacagcaaacctgaaagccggcgccagctgcatgttctcgcctgcgcttaattagcttacttccaccgctaataggaaagaaaactgtcggaaattaatgcttaaggagcctgctttggagtagtatgaccagcatattttccacccgtaataaacttacatttgtgatcgtgggttaccaaagttaccggtgaaatgagaaccctttgtacacgtacgtgttgtttgggagaacatcaataagctcggagttctaagttcttttttttaataatggaatataatatcccgacctttactcaaaagagctacagccaattattatatagtaacattcaagaacaaagtgtaaatctaaatgaatagaacacaccgtagagaaaagcaaagaatccagtctaacgtaaggagatcacaattattgaagtctatttgtaaatctccaaccataattagcaaaaagttgcataaccgtagtctccaattttcgacatgcaatttttagaaactcttcatcttctagttgtgcccaaaaccgaagccaatgagttgccctgaaaatgaccagcatataggaaaatgatggtgatttattaaaaaccatatcgttcctacaaagccatatttcccaacaaatgacagaagctccaataagtattagtttactcattttcttatcaactcacaaaaaccacccattaaaaatatgagataagctaactggaaaattaaaaccaaaagagaactgaactgttctccataggaatttcacaaaatgacaattcataaagaaatgttgaatagactcattcttcaaacaaaaagaacacttcaagctgccattccagttacgccttgccaaattatccttagttaacacaacccttttaagcaagtaccacatgaaagtttttatcttaagtggcaacttaaacttccaaatacacttatttatctcaatatagccattattaattaaagctaggtatatagacctcaccgagaacaagccattctgatggaaattccatctaaaactatcagacgaatcattcaactggatatgtactatagaggcacacaactcatgccaacaaacaagattctgactaactaaagctctcctgaaagaaacattaagcggaacatatcccataacagtggcaatagaagatgttttccttcgaacaattgcatacaaagacgaatatttatccttaaaagccaagttacctaggcatttatcttctcaaaatctaatttgttccccattatagacagtccaagaacccatatttaagaaagtacttttgacattcaaaattaggggggtgatggcgtgaggcgacctcctcggcggcgcgctctccctcctccctctcctcgagtggttccgccttgttgtggggccgcgcggtttcgtcgttgtctgcgaccacgccttttccaggcacgtgctatgcgagaaaggggctcgttgccgaggtatccaagttcctcttcggccgcttcgccgccgaccatgccgctatcgccatcgccattgcaggagtcaaagtcgaagtcgccaccgtggcctacttcccccgcctgccgccgttcccctcatcctcccactgccgcgagccgccactgccctcgcccgcctgccctcccgccgtcgcccatgggctgtcgccgctgccgctcggccaccgacgacgtcacgatgccgggcgccgggtggtgcaggtggtggtggtgcgagaggaacgacgagcgacgcgacatggactccagcccgctgcttcagctccagtccaatgccgccgtcgctccagctagctcccgccgccgccgccgccgctcgctccccacggatggccgtaggggagagggagaaataaagagagaagggaggggggaagaagaaagggagaagatggcatgtggggcccacatgtcagtgggccccacaattgtgtgtgtgaatgacaaacgggtcccacatataacttttttaattgaaatgccacctacgcgccacgtcagcacacagactaggtcgatactgccacgtcagtgaaaccgccctccaaaaccgccgagagagtcaaattgcaccggtttcaatagtttgggggttaagatatccggttctgtggtttagggtcacggattagattttgattacttttgagggtcaccaagtaaactttttccgccaatgtgacgccagcaacgagaatcaaggatgggaggaggccactgaagtagatcgagctagagaggagggcctgcagagtgggctgaatccaagagaaatcgtatggtgttcaaggattctaaagtgaggataattaagattgtctcacaagtgctactaagcaggttatctgcaacttgctcttctttaaaaataaaaagggtggacagatgcccttgcttaaacacctttttccattagaaattattaacagggaatcgattgcacaattgtctgcaaattgttttaaagataaaaacggtggacagatgccctttcttttctgaacatttcatgtactctcctccactgagaacacaggaacattctttcccatgataatacagaagtacagttatgggattcccttaaaaatgaatacgtataatgattagaaacatgggatggacataccaaaatgatgattttcgttgttttattttggttgattctggattaaatttttggatgagtaaagagaagggaggagggatggaggatgatatacgtgccttttggcgaatcagctcaaggcggggcaacactattgaaaaggcagagaacggtggcagcacggatgcaggcgacggacggcgcgaaggagaagggagaggggagagaggcgaggggagtcgggggacgacgtgatggagagactgaccagacgggcggaagagaacggcggtggcggcaatgggaatcgatcggtggcggtgcgacggatgttccggcggtggcgcagaggagatcggtgaagcggctgtcgctggcgatgtgggcgagcaagagtgagcggtggcggcgggtggcgattagggtcgaggggtgggagcgggaggcggggcacgggttggggtgcgatcgactgtgcgaggatggagaggtgtaggtcagaggtgtagtgtgtagagtccatcagaatcgttcaatcggatatagaagatgaatatggattgttggatttgatgaatcaggatcgtttagtcggatatagaagatgaatacagattgttggatttgatgaatcatgatcgttcaagaataataagaagatcgtactctgtaacaataatatatccattacaaatgaagccgttggcaagtgtagattatttatagtgatggtagcggcatagccgcacatgtttaaatcgatggatacatgtacaaccacaaccaataatgacacactcttataaccagctaccatatgattataaatacaatgtatcgacagcttttataatctcaaacaatagcccatcgtgccttcgggccggcccgactagtattgggccgtgcctgagccgtgtatgccgcccgtgggctggcacggcacggcccggtgcatcggtcgggccgtgccggcctgacaagcctcggcccaggcacggccgggcttgggccgtgccgtgccgggcggcccagatggccatctatagtctccatgcagtatcgtcatcttattatcttaaattcttaattcgttttgtggtgtgaagagtcacccaactttgatgacgacatcgtcgtagcttctctgcagctctccgaccagcttctgcagcgctacgcgcgacgtgccgccgtcgctcaccgccgacatcgccgcccgccgggcccacgcggcccgcgcccgcatcctctgcgccgcctctccgccggcgtccatcagcatcctgatcttctcctccacctcggctctcccaacgacggccgcgccgccgccggagtccaccctgaccccggtgccgacgatgtccacgatgtgcctcgcgttcagatactgctcggcgatcatcggccacgccagcacgggcttcccggcggcgaggctctccagcgccgagttccacccgcagtggctcacgaacccgcccactgactcgtgggccaggacgccgcgctgcgggacccaccccctgacgatgcgcccctggtcgggacccacgtccaccggcggcgaccacgtgttcgaccgcaccgcccacaggaaggggtggccggattgcaccagcccgcgcgccagctcgtcgagctgctcgtcggcgacgtgcgcctgcgtgccgaacgacacgtagaccaccgaccccggccgcgctgccctctcgtcgagccacgcgaggcagccctcggggtcgtcgttctcctcgtcccgctccggcgtctcgccggcggcggggagaagcggccccaccagccaggcgcgggctccctgctcgtagaacgcctctactggagccacgtagtcaccgtcaagcgcggcgaagctgttgacgaggatgccccagctgcggacgtctgactggaagacgttgtcaatcaagaaccgggtcaccgggtcgtccatgtcggtgaactttgcaacggaatatggtatgtcctccgccgtgatcataacattttccggcatgccggacacgtgaaaaggggatccaccgccggcgccgtgctcgacgccggacggcgggctcacggggagcaacttgcagatggccatggagaagcaggacatgccgtggaacacgacgcggcggacgccggcgtcggccgcgacgccgtgcgtgaacccgaggaagaagtcggagacgaccacgagcggcggggaggaggacagcgacgccatgaactccgcgaagggctcgcgcagcagcgccgtggcacgcaggaacgccgggtagagggacatggaagggagcgcgtccgtcgactcgacgccggccggcagcagcggcggctgcagcgacgggaacgggagcacgacgaggtgcaccgaccccggcaggcggcggcgggcgaaggcgaggttcgccggggtggtgaccagggtgacgcggaggctcttgtggtggaccgacagcgccgcggcgaagtggagcagagggagcgtgtggcctttcgccatgaacgggaagatgatgacatggtcgcggctcgcctcaggctcgccgctgccggcggcgccgttgacggcggcgcggttggctgaggcggccatggcagggctttgttgtggctgggtgcgcgcttcagagttgaagctgtccttcaccgatgttttttttttttttgagaactaccgatgtttttattatatagtaaaacttacgaagtaggttcgtattcccatgatcttcaacaacttgtttcaaaagaaacttttattctttaaaaaaggtattcctttgtctgaaattaaatatctgtacgctaaggagtaaagattatcatattcagccccactccggtgctttatactctgattagaaagcaatctgggccattgatcgtattttattgtagagctgagatctagttctactctcactagtattagtggaagtagaaatatgaaagggtgttttcgtcaagagaaaataatcgcgtaggggtattatcgtattttttcagtctcttactcagcctatcccgatccgattcctctcgcttcgtcgcaatttcaccgctgcccgtcaccattccactccatccctgcctccgtcgcatgtcctggcgcctgctccccctccagcgccgtcgccctcgcccttcctcgccgccctcgtccttcatcgccgccttctaccccgccagcacctctccgtcgacgtccgcctccccgcctcccccgctatcggcggcttccctccgtcgaagcccattactcgtcgccctcgccgccttctcctctggcggcgtctccgcgccggcttgtgagcccccaccgtcgccgtcctcctcccccgcccccttctccagcgagtcgcgtcgcgtcgccgcccctccacccgcctcagccggctctcgatgaggcctcttcaccgcgtcgcttccccccgccaccgccgccacgttctcctccccatggaccgccgcccccttcactccaccgctgtcgccatcgacctagccgccatcgcggctctcccctccccataatttccccggccccttctccgtggacatcgacctagccgccgtcgcggctctcccctccacatcatcccccgcccccttctccaccgtgccggtaccgctggcgtccccctgcaatcgccgtccccttctccagcgagtcacctcacgtcgttctcttccgcgccaccagcaatcccgtgtcgatctcctccgagtctccctctagcaacctcctccttggatggtggtaagtaaacatgtcaaaatttcttactgttatgattttgcagattaaggttgtttgttcttcaatccattgtattgttctttgattatttgattgaatggttgggagcagggtcagtttgcaagatgttggcatgcgcgaagggtatccgcatgccggcgaaggggttatcggagttgaggtgcgacgttgaagcagatgcacgtcggtgacgtcgacagcttactgccctgagtcaccccgaagcgtaaggtttcatataccgctccttctcaacaagtattcaaatatgaaatatgaatattatctcaaaaaggcatcaatgtttgggatccgtcaaatacccaagtagtatgtaaatgatttaataaggggaagagagcatagtaaggtaattgtggtaaatgttcgaaagataatccagttatgtcgtggttggtagcagtggacgatctttaatgttgttcagttcggagttgatcaaaattccggctaagtcctgtcgaaatgttttcacttccttctgcataatgtaaagggagtgcactttaaatgatttttcatattgggaagcactggtgcaaaatatgaatagaggttgttgtagttgcctgtagttgaatttctgggagataagatccgctccaatgctccatgaacttaagggtgtacaggccacacgagacgctacaagaattttgtcgttaggctaacacgtttccgtaattgaataatgtgaatatcatgtggaagagtttgagtcacccacccgtctccttgctttggcaatttttggactttgttgtactcccattcggtaatattgaaattaggccaatcgtgttttaactgtgggtgctgtttctctgtcccgtgtaatcccctctcgatagctaacagctaggaagttttgtgcaacgttggtaccatctttactgattggctttgcgagcgaatctggtatttacacctcacgtcgcttggcgttaataacggctaggtaccagtgtgtatctttaatattaattgggaggaaaatctacagatgttcaacagtaagatagagtcataaattgaattagccattacatagatagcttaagtaagtattaccatgtcaaatgctagatagccgcgtgccatatctctaatccatcgtttatttcgaggtttgcttgcttcgacatgcactccctctacatttagtagacttattttaatggccatctctaggaaggccttgccatctcccctgattcctttcactttatagcggaggcattggatgtatgcatccatgacctgaatttgaggttagttgagttacataacaaatatagttataaaagaatagtaggcttgttaaataggcgaacttacatcatcattcaagaattctggttgtgttagtactttcattcttatccatttaacctccacttgttcaatatgcaccatcactttgttatcctctgtgttattaatgtaggtaatgaaagggtcttcttttttagtcaactctacgaaggtaggacaaattagtaatagatctatagaaatgttaaatggttaggcattaccttctgaattttttaacggtgtctagccattcatttttttttcttcttttgacctcttaaggcgttctttggtgggccattgtctatgatttgttgggtaagatcttccttctcgatgtacactagaatagggtaagtcaaatcagtaacacacaaacatagaatataagtaaaaaattatggatgatgtagagagttcatacattcagatatttcatacggtgtttggttgttttgtttcctcttcttttcaccccgtaattcgtctgtgtctggcatgttagcttctttatccgtttacgcttgaaaaggaggaaagttagtaccatttacatgagcatatgtaactattaaatagcatagtacctattgttttctttgtctgtgcttgggttctgattatgtccttctttttacccctagtttcgtagatgaagtcagtccgattagtcggtttgtatgttcttccagtaggacctgtaagtctcttcctgctttgattgctctggttactgttgtcctgttaggtaacaaagtgcacgttagtattatgataagttgtagaaacgttagcgagagaattaaaattcagtttaccttcgtttcacaagtcatgttttcattttggtttatatagtactcttcgttatgatttgatacatgctccctaggatcaatttgttcttgttcaacatcctgcaatagcgtcaacctttttttagcggtgttacgtgagtaataatgattaacagtctagcttatcatctttacctcaaacacatgcgtagtatcttttcgttcagggcattttgaatcattttccatgcaatctagtatcaatgctcgcatacgtggccaaaaatcctttgtgaaatcgttgaaattatcttgtaaagtttggatgctttcttgtatcctttcttgtaaagtgatatcggctgattgttctgtggatattatagagtgtacctgaataccacaagtgagaaaaggatgtcaaacatattttgtcaaatagagttcgtattaaaaccccataatatatacctcttcagaagtgcatacaaaatcttcattggtacgtgtttctgagtcattgtcgtgcgcattttcattggggatttctttgcaatctatagttcccctaatgtcgtcgacaacctatgttttagtcaaaaatgtgtattagagattttacagacaattgatataattagtgtatagtattaaaaatgagatagttacctgcccttttccaaaaaggtaaaaaagtcgttttttttcttttattttgtcccagtactgaattagttgcctttcgcggccagaatgatatattgtcacagccaatttatctattcgcagtttttcccaataccaaatctgcaagcatttgaacataagataatgagtattgctatgaaaatatgttaatgtcaattttgtaaacatactcaatttgtgcattgttttgaaacgaacctgtaagaggcatacattcccctcaatgtttgtttccttctctctaaattttaatatgcctttcagtaactgattcagggttagactagaccagtttagttccctcattttgtcaacgtcgtcgacgagattgagatatcctgagcgcacatatctttgagttgtaagacatatgaaggatccaattgagaaaagaataaatcttcgaatgaagtggtcatcgtagctcgaggagttgattattgctacccgtaatgcttctaaagtaattgttgtttgtccttcttttttgtacaggttgaacaattcaggtttattgatttttggtgcctcaaatatctcatctcctttcgatggcagtccaagcaaacaatcgacatcatcgagtgtcatcgttacgaacgtaccattaatattgaatgctttcttctccttgtcgtagcttcttgcaatctcattgcacaagtcccggtaaatatgtattttgttaatctttagcaagttgccaagtcctgaaacctcgatagctttcttttgaggtggacttagatgtagtattacctcggacatggcatgtggagagcaaactagagttccctgattaacagaaaagagaataagagtttagtccatgtgaaaatttatgcaattgcacatatatatgattgcacattaccaaacctagagatcatttaatcctgctagaaatcaattagaaatcaaaggaaataatgcaacaaacttaagctgtaatgtatgcattaatcatttttttatcctttacaaaaatacatgagaaaagaaaagaaaattcatgctctggcatgttactcgtctgacatgtttaagtgatgtcctccatcactgttctggcagtctatatggccctctctataatttgtttaatcttcattcttatgtgcaggattcagtgaggttgaggagtttcaggggagcaacatgagtgaggtcttcgagggcaacatagtactgtcaggtctgtgccaccttcacccatgaccacatccctcactttggtttgaaagtttgatagtgtgaaattctgaacatgcagtggctaatatagatcggtcgtcgaggcgtggtaattatattgaaatttccaatcaattctaacatatattcagtataattcataagatctcaattgggttgacgattcaacaaatataaatcagattgtctggatggaatatcatgcattattgagtttctatgctagatggtcacagtgtgtctgtgtgtggcgtagccctgctattttacttctttgatcatgaggccaacatttcattcaacataaatatgcactgcatgtttccaatttcattgctcatgaggccaacatttccaggattcaacataaatatgcactgcatgtttccaatttcattgctcatgaggccagcgccatagttcagacagtaaaaaagacaggctcagaaagcagtacaatcgtttctaagggtttgaattgttgtagtattaacaaaattaacaaacagttggtgctaatgaagtgctgtagtgccattgagtctagatcatctccgcacattgttggctgaaatttcaacttgtaatcctgcataagccgtctccgaagaaatctaagatgtgagcttcgcattgggaggaaatctaagttatgagatgttcttttgtcaatgagatgttttatttttaatattctaagttagtttgcacggatgatcatttagaataagctagttgataaatatttattaaatgatacactatttggatatttattaaatggaactatattccaaattggtcagttaaaagaacatgatttcatcagattggctggtcagatcatatgtacagtactaggctggatctctgcatgctcacaatcgtgatgtcccactgtgtttttgatcgcgtgagatcgattcgccgtctgtctgtgcggcgacacaaacctatccttcattgatgcttcttctccagcgatctggagtacccatctatcaaaggacacaaatggatgtgcaaaatcaccatgaaaacaacaagaacatactatgggacaaaaacagtatatgattttctcactataagtatctgtagtgaaggtcagcaacattactagcataaatgctaaaaacagtacagtgatacaaaattatgatatatgtgaacttatatacaaaaacctaggcgatgaagataaatactacccttagcctgatagaacaatttcctcaacaaaatacagaaggcctcaggttttatgacgctttgatgttccacctgtgtgctgaccgtggaccacgagtgatcccctcataatattgggatggaagctttcctttgttccaagttttcacaaacttctcaaacagatcacgagcagactccaaagaaagatcagagaaaaatttgcctttttcttccttcgaccaggttgcgaactcgttgttctttgcaaaatattcatctttggatatttctttgaaatcctgtttaagtaaaaacaaaagaacaatgataagcatggtctcaaggagaaaggaaatggagagttcaaagggtgcagtatgacattatttatgttttgaacagtttaatacttccccaaaattgttgttagtcttaaaaatataaatggcatacatgacacaactgctgtccacctctccagatacagataagccattttggttcttgtgaactgtgaccttaaacaagtacctacttggtatcactaattttcatcacagacacacaaaaggaaataaccttcaaactgatatcactaattcaattcgatgcaacagtaaacaaaagcttttactttatattcagtcttcagagacaaatacatcctggcaaggttctgaaaaatttcattgttcaggaaaacaaaaggggctcctaatcaggctgggtaagatggctacagaacatatgccagcacggcgaaaaaaatggtcgtaagaaatctgcgataatctatccctgattcacgtactgaagaattaactgaactagggacatgctccagtttggttctacttgtaaagaaaaaccaacctcgttccagtaccatagttatgcgaagcccaagcttgtagaacaattcatatatgacttatgttttttttgttgttttacaaaaataatttcatgtattctatagaaagtgcacagtaagcagtactgaagtgaactagtgatgctggctttggttgctattctatatatttgtaagatatgaaatatacctttcgttgctgccaaaacctgatgattccctttctcttcagtgtagacacttcttttacaagcacagaaagttcatccaatggctatttcgaccggatcgttgcagttttgatggcagtttgtatggcaatcattaatttagttcggtcagtaaaagatcttgctgcaaagagattgccagataaaaacgagtcacaacacaagtattcaacattatatccagactcaatgccaaaagagtaattccgaccaccttccccaactcctggttttgttgaagctggactattttcgtcagtcttgcaaaggctggtagatcttgaagagaaattcctgatgcacaagggaaaatacttaatatgcacatcttgagaaaatattaaattaatccaacaaaaaaacaatgccattaatacaaaagatacaaagtttgtgagccacaataaccttattggttatttgagtgcaaggtctcacggaatggccttcatctcttcgatggagctccttttcccctaatttcatcaggatcaaggactctcttctctaatggctggttactagataaaaagtgagttggcataggaccaaattctccggccacgatgttctcatgggatgacgatcctttatccaaaatcccctttaagaaatccatcgtcttttctgtctgctcagggttcctagcggcctcaaagaaagcatcacttcccagatttcggaggctacgataacgaaccatgtgttcaaaccacacattaggatcggtattcctgtatgacctaaatgccgcctttgctcccattgtccacctatccacgacacaacatcgagggatggtgtcaataccaaggaacatgagtacaacaaaaaatgtgtgagcaagggatgtcttcgcactccatcttccgacagtgacactccacaccttccaaagactggcctctaaaagtaaccctcacttcatcccacacctcattatcatccttcaaaccaaaaacatacagtgacgaaccatcttgattagtcccactgatgacttcaagtccagcaattagccgtatctgtgcacgaactttcttgaacacgactgctgtgtatatacggacagcgtctttctccaatgggtcggcgtctattctacaaaaagggaccgaattggtagacttagcgtccaactgagcctccttcttacgcaggcgttgtatgcacaacttaacatgtttgactaagcacattagtgacatgtttctcttcagaagggtgtgaagctttgagtttagtgactcactacgttggttgctgcgcatacccaacaagtatttcccatctgtataggcagctgcccacttctcccttagtcggtacatcgatcagggcgatccattgaccattccccgtgcctccattctccttaaaatcagcccaacgtctctcgaactcctcctcatccatactcttataaattaattttcttagctcatcgagttttggcttacgaaggtgatgactcatattctcctctatataccaagtacacaatctatggtaagcacgcggcattaccttactgatagccttcgccattgctaggtcgccatcggaaattaatgattttggatgcacttgacgcattgcctccaaaaaagtctcaaggagccaacagtaagagttgacagactcattggatagaattccgcacccaaaaattgttgtacttctatggtgattaactcctatgaaaggaatgaaaggaagattgtacttgttcacacggtaagtgctatcgaaaataacaacaacaccaaaagcagcatagtctaaacgtgattcagcatctggcccaaacacattcctaagacgccctccctcatccgtggtgtatttgaggaaaaattatggatcttcttcatgcttccttgttagatatttcaacacatcttcagcatcacgacccttgatattcttcatctcgtaccgagtaaagaaattataaaggtccttcctcacaaaaccaacctcgtccaactcatcgtagttattctccataacctccatgatttgaaaggccctaaggccactcatgcgaagctcgaccgcttgggctttcttagaatcactcatcacacgatgaactccttaaaaaagcaacatggtcaggatttgcaagttcgtgcgtatgttggttatcaaactccttaacaaaccacacacccttctcctcgttccgctcaatctcaagcttagctaagcaaccacagcaggtcagtgcccgtggctccctttttcggtctgtcctctcaaagtgcttcaactccctgtacccttcacatgagcatacgaattgcctccatataatctcaccgtccttccgcttcaagttgtttttcctcacactgaaacccttccccttagcatagtctacatagaatttgtaaccttcctcctcgcttgaaaaaaccacagtacccattattttatactcttcctgatcctctaggctcacatagctcgaagacattatgtcagacctcacctacggaaaagtagaaaaaacaaacagaacaagcacccaaatataaccttatgtcctttatacctcataagtatataaaaaaaaagaacaaccatcaactgcatagatacattgccactctaaactattgaacaataattactacagatcccccacaatggctgcaaattctgtttgtaagctaaaagaactaaggcaagcactaataaattaattcaatgtactgctagtagtactgatgaactatctgcacaagatatgatttaacttcccacctttgctgaggtttatctatgtagattacattctttccatgccctttaactttatccatttcagcattgaagcgtcaaattgacaaatactctaactacagaccatgacagaaaattgggcagtgaacaatgaagtatcaaattgcttatacttgaataaaatcatgtgaataaacagatgtgtgaaacatcatgtcaagcaaccatgctaaattattagtgcaacacatataaaaggatctcttgctttgcagcacaagcttgaagaaaaaaagcagcagcataaattcaaaccagatgatagcagtgacaccgacgagggcagtggactgatctgagaagactctcaaacaggagatttagagtggtcctgcaaatgtcccactctccctctgttcattccacttctcaacctgagacaggaaaagctaatgatgaccaagaaaaaaactaaagtgtggttcttttaacagctaaatttcctagtcatgcacaacagtaataacttgtaaaacacacacacacacacacgcacagagggcgagccaatgcggtacagttaagaactaacacacataacagtcgttgacaaactgagtaaatctccaccgtattctatagttcgtttatcagataaataattttgcacaagccacatcgttcacaagaatcaggtcatctttattgaatcctaatgattcaacattggcagatatgtttttcactcaaagatgcattttgcacttgctactctgtaggacatgttaacatcaccactgaagcatcaaactgacagaaacgaatcaaatatcaatgtgtataaccaaatataccgaagggaatgtgctgttttctacttctgaccagtgatgtgatatgaaaacatcgatgggaaacaactaattttatggactggtatttacaaaaacaatagcttttaaaatccagaagaaaattttcagatttagattcagcaattcaggtaacacattagtcccatttcggcaagttcaactgctattgaactgaaaaataagatttccccgtttatattcaagacatcaactataattcttttactgttaaaataatatattaaagtcaccactgaggagaggaaagggaacagaaagtcaggttgggggggggggatgggaagagtggatacctgatgatttcgccgcacccagccactagcagcgccgcaggccacgccgccgcctgcgtcggacagacgcgacgcaccgcgccaccagccgcgacgccgcctgccaggaggaatagccgccgggcgcgctgccgcctgccggtgcctgcctccgaccagatgcgaaccgaagggggaggggggagatggccgggccgacggacggcgccggagggactggagacggcggcgagggcgggaagggcgggggaggcggactgcgacggagggggcggagaaggcgacgcgggcggaggagagggacggcgactgaggaggcggacaaggcggcgacggcgagcgatacggacggatgcgggcaaggcagcgacgccggggaaggaatagcctacgatgtgaaccgatgcgaaccgaagatgcgcaccgaacaaaacaccccttaccaaaattacccctaaaggatattagaagattacttatctaccctttaaaataaacggtccagattaattctactcggagtataatatttcaagtatattgcaccggagcatcactctatcatattatgtgaaattgatgcgtcaatataaaatgctgagatccaggcatcttttgtgccacttaattaattacctgggcagcaactagtattagctagcaagtgtgactgtcgattgggctatggcctgtgaaagtctattattactctcttccaattagatcgagagtgaaaacactgccaactactctcaatagaagagagaaacgaaatcaaagtggtttaagcgattaatcctaaaatataagtatttttagactctgacacagtcttgaagatgctactttgatcaataatatctataaaaataattaatatgttttaaataaaaaattacatattataatagtttgtttaatgataaatttagtaacatcaagtttacatgattgattttttttctaattctgattaaagttgaaaatatttgatttgtcattgtgtttaaaatgattatattttactatgaagggggtagcatatatgtaataataattaggacacaacagcaataaatgtaccatcccgagatgagatagatggttggtactctcttcgcgaataatataaggtattatagatagaaagagtacgagatacaagaaacacagaatatgacaaaaacctaagttggtcggtgagtgatggaaataaaaataaattgagagtgggcggatgtagcattgccgttgtatggcttgttttatacggatcaaatatttgaattaaaatttgaaatatatattatttttctcgattttatatatatatacatgcttctaaatattttacacaaatatacctctcctgtaaactggggacgcggcaccgcaccattggctcacatcaaacatgtgggaccgattaaagaggacggttccgcggcgccaacacgcgcgactgtcacggtcccgcaccaaccagtcagtcgcgcagaacgggcaggcggcaccgcgggtgatgccgcgtgaccaatctgcgccactgccgcaaagtggccatacacatatacacattcatatatagcacaacacactaattagctaatgctatgggcattaggaataagtttatttgattatgtacttgatcgtttgcatttggcgtggtgtcgctcgaccattatgcgggatcataatccagtcccacgtttcaacctcatgccatcgtcactcccttccgttcccattggtcccgcatggccatggcgcggcaccgatcctgtgccgcccggtcgtgcatgtgttggcgccgcgggaccgccccctacagccggtcccgcgttttggaggtgtcccgccttttttaggtgccccaacgatacggaggtgcgccaacgatacggtgccacatcactaatcaacgggagaagtatatttttataaaatttttagaaatatgtatatatatatatacaaaatcgagaaaaataatatatattttgaaatttaattctcgaatatttgacgtgtgaactgcgtcgaagttaagtcaggctcaattgttgaacttatcgtagcattaattagttctgtacgactataataaaaactacggttgcatttcttaataaccaatatgaccatgctagctagcatggatgggcttaacagtgagaaataaaagccattggtcagagagagcgtgattctagcatgtagctaggatatatagatattgctttcatcgttcttctgtctgggaccaaccctcttaaatgaatccacgggtggagaaaggagctttactcccggttcgtaaccccttagtcccgattttcaaaccgggacgatcaatccaggactaaagatcactatctttagttccgggtgaaaaaactggaagtaaaaatacatctttagtcccggttggtgttaccaactggcactaaagatagagcatttttagtcccggttggtaacagctagcctagctagctaggtccggttgctctattattattttcttttcttcattgtgtttttaatatattgattttactctatccccatcctaaaataccaaataaattatccccaatcctcaagtccccaaatcggccatattcaaatagatcacaaaattttaaaacaaaattacatcacaacttctacaaaattcatcacaaatacatcacatattcacggacatcacacacaaatcaaatacacagatccgaatcacaaattcttaaaaaaaagaaaaaaaacacaggctgtcggccgctgccgcgccggccgccgccgcgccggccgccgacgcgctacccgccgcgaggccccgcggtccgccgccgcgccgcagcgccgcccaccaccgcgaggccgccacccgggcctccgcccgcctgcgcgccacctcgaggccgccggccacccgatgggatgatggggagggaaggagaggaaatagaggagaagttagagaggaggaagaggaagggatgatgggggagggaaggagagaagttagaggagaggaggaggaggaagaggaagagatgggatgaagagatcaggtcagtgaatgaagaggtgaagagataaggctgcccgtctcctcctcctcgatctcgcagatggcagatgcctcgtactctccgccacgatcttttgtttcggttggtattaccaaccaggactaaaaatatatcttttgtcccggttggtaacaccaaccgggattaaagattaaaaagaagcgttttttcccggatcgtgttaccaaccgggcctgacgaacgatctttagtcaaacgggcataaagaataagaagtagctgctaactttttgaaccacgactaaaaataatctctaatcccggcttttattgcaaccagtaataaaagtggattttgactaaccgataaacgatgggttcaccaccagcgatctatcttcaatattagactttctacaaacactcttataccgctatgaggcaccctacaaacactcctataccaccaagtgacgctctaataaatttagaattctaaaataaatctaaccgttagttttcatttaatctggtggacccattattttttaccattaatctataataaaaataaccaatctgatttatcttaaaaaggcccacgtaacccacgtatgtgcatgtacgtatacttcatgcacgggcccacatccatcttttctcttttcttttttcttgttcgctcacaaggataaaaaccgaattaattattctagcccatagatattaactacagcctatatatatatgcaaaaatatatgtacgtaccaataatatattatattttttcatatattatagatattacgctggccccacgtccctccttttctttttttttctttttttttgactcacatgacataaaacccaaattaatattaataattatatactaaaagtttattagactttctacaaacgctcctaaaccgtcatgtggcatctacaaactactaagccgccatgtggtactctaataaattaaaaaaaactataaatcatgagaaaaaaacatctaaccatccactttcacttaaattgataggcccattattttaaccgtcaaatttaatctcatataaaaataccatgtacctttcccacctctcccccttagtcgttatgttctccctctccccacgtacacccctctctctccctcccctctatgtataattcatttttcctatattagttaatgggggaaattcgatataaaaatttcaacatttgtaacatctaaatcatatatataaaaaaataaacatctaccctttaattttttattaaatttagtggacataacacttcaagccattagattagatttattttttctcatccttaaaaaaagacatccatcctcctctccgttttctcttaggaaatcctctatgtttttttcctcccattctctctttatgaaagcttttgcaataataaattttaaataagaatacttctaaatatatattatttgcaacagtaaattttaaataatactaaatttttatcttttaaattatacgttcaatttttgatctatttgtaccattgtattatttatgattaaaatcacaattagaatttaagacacatgttgactatattttaacttgtaaaattatattcatttaagttttgttgagaccctttacatgttattcaaacatatatgaacaattattaaagaaagtgacattatgtactatttcatcatatatcacttcaccggcatgcataactaaaacagatttctgaactttaaaaagttctaaaaattctgaattatgagaaaaacaaaatataggttataccataatttgatgcatcacaaaatatgcataactaaataatatttacttaaaaaaatatttgagtcatatcctagctgtttgtccacctatatatcattccaaccttaagatagaaatgacctattctgcaccgaattctacttgataaggcaatataaattatatggaactaaagataaagctattttttttctgtataacatgataatataacggtaatgttcagcttcagaacaagcaagcaaaagctgcatgtgtattgccctatgtatctatatagtatatatgaaaaatccattaaacttcctaaaaactctcacaccgtcaggtgagactcctaccaatgctcctaagttgccacgtgtcactctaataaattagataaaaccttacaaattttgcgaaaaaacaaaaaaaacccaaccctcgattttcatttaattcagcggatccactatttttaaacaattagattagattcatttaaaatacatctcatataattatatatatatatatatatatatatatagagagagagagagacgcacacacacgtacttttgtactatactactcacggcaaaaaaaggaaaaaaataattaccaatgaaaagaaagaagggttaacgctgccacgatcccacctaattgctacgagagaaatgtatatacgtacggttcacccaaaaaaattgaaaaaaatttctcacatgtacaatacgtactactatccatcgaattgagaaaaaaaaaccccagacatgtacatactacgcaccatccacccgtccctaataaacttatcaataatgttggatattttcttgagaaacatagtacaaatgcagccgctcacaacgcacgcacactcacccttacgaacgcgcacgcacacactctacccctatgagtacctctgagagattggaccgacatattttgacattgacaaagtcaccatgagtgcctcgctgccgatgggtacgtcgtctaccactgaatgaatttgtcaagtctgggacttgaacacgagtgggcaatttccatcacaagaaacctaaccagttgagctatgttcaattcaaaataatgttggatattaaacaacctaatttttaagctacatttttggaatactcctatgccttttaaaccagtgaaatcattatttttaatcattagatctatcttatataaggaaaacaagcgtgcattcatggtacatcacatttcaaaaatattattgttcaattatattcacgttaggttgcgtagaacctcttgcccactctacatgaaatgtttatagatggattatctctcaaactacataaatcgtattaggctatataaaatttagtggagcttcatgtcccaccaaattcatcctctaataaaccatgataatatatatgcaataaaaaaagaaaaacacactacttttgctttgcacttacttttactttcgttgaaatattttctaaagaaaataagtctaccttcttttcaaatgatgaataagattataaataactgcatatagatattacttaaatatgatataatataaagctaatatgttaaaaattataaaagcaactaatgctaacaaaaatcatttacgaagaaatcggggtagacgttctccggttaatatattagttttagtgtctcaaacttagcgtacgacgtatacccgcgtattttgcacgggctacctagttgctggaaaaaggcctctcgatgttacccacctaatgaaggatcgccccatgtaatctgatatgatctgcctaaggtccgtgcatacagcacaatcaatttccccttatttctgcacacaaacatgcaggttattaatttgttgggtggagtattacttattcctttattaagagaactccaacacgtatttctccttttgtaattgatgcaattgtcagaccgttttgtacttatataaagagtatgtacgctctctctgtccatagaataactgacgatgcacgcaggcacacatgggatgaatcgatccctccaaagagtggcggaatcaggattcttaggcctcaactaatgtaatttacatagcttttcctttaattttctacccccttcattttaggtcataaaacactttaatttttgtcaaagtcaaactactctaagtttttgactaactttatagaaaaagtagtaatatttttaacccaagacaaatatattatgaaaatttattcaattatagatttaatgaaaaagtagtaatatttttaacccaataaaaatatattataaaaatttattcaattatagatttaatgaaattatgctggtgttgtaaatattactactttttctagatcttgactaaagttaaaacatctataatttattcaattataaatttattcaattatagatggagtattttacgaagttttaaagtacaattctaatgaatatttagactcaggagtagggctacagccctaattgccctactcctgtctccgcccctccctcgaaaggaactttattaataagttactatagaccatccattttacaagaaccaatgtacaaatatcctatctataagcatcctcatttgtaactaaagtataatcatcaatttttccacatgcttccatctcagctccggtgagaacgccatagacggtagaggggcttggactggagctgcgagagagattttccacaatccgcttttggggggcgtgaggaacattgaagccttcacaaagccttcacatattttttctgccatacatagagggaggagggctttagatttgttttagtttcttcggaccttcctattatttattcccggatctatcactggagaccctcctattatttcttcctggatctatcactgcgacatgctgattcttctctcttactaaaggtgaatacatgcgataggaaaaaatgcatctgtatttctcttcaattctcaccaagttttctccttttttactcataccatgtacaacggtagaaacgagtatgatatctcttagatgattatttagagattatatatatagaatagttgaaacgataaagggcctcacctagagttgcttcggtaaatgctttatgagtagaagtaacatttagcatcactacactattcacgtgcttgacctttgagccacacgaacatgttatattcgatccagccaacatccgggcgatccccactggagcggagacagactacggccttgacccggcgaagctgctcgaggtgatgcaggccgacgccgacgctggtctcgtgcccacctacgtctgcgccatggtggactcttccacctcccgcactacgactcggccgacgggtcgggctcccggcagaaggggtcagcctcgagggagaacgcgaggcagtcggcgcagatgggcgtactccggctgcgtcggcgggagctgcgtcggcgccggcggcgggcgctcagaagcattggggatgggagaggggagagagagttgaggagagggagatgggaagagaggaggaagaaaggggctgagaatgactcgtgggacccatgtgggacccaacatttttataattaattcatgtgtgtaactgacatgtgggtcccacgaagtttactatttgtccgggtcaaattgccacgtaagcgttacgtcaatgccatatcagatgaagaccaattcaaattagccacgtatgcgccacgtcagccaaaaccaccgagggacctcatctgcactggttttgacatttatgggacttttgtatatggttttctggttgaagtatgaaaatcggattcatttacaagttaagggatctcggatgaacttattcgtttcggttttggggatcagcacccagcccaccagtgccaacaggtgggctagcgctgcggcctacagcttccatcctccgttgcatgcttcatcgctggcaggggccacgagcccgtgagacgtatccgcgcgattacgaagcggaggacccgcgcgcgcgccgcgcgtgagccgtatacgcgagcgcggttttgcacggctttgctgatgactcgtgaccagccgacgagacgcatgacgcgcccatcgatcggcgcagtcgtatcgaatatcgatgaatcgatcccgcgtgctcgcgcgtactacaccggaagcggatcgatcgatcggggcgatatgagaactagcgttggtgcctggtggtgtgtgctagtgggcgattcgattggtagagctaagctagcgcaccagttgactccatgtctccatcggtgcgtgcgagctgatcgatcgagaggagagtgacacgacatgatccattaaaattgatatatttatgccgggcctcttgatttttcagttcttgcgcggcggcgtgattgtggccaacttaaccttgactaaccggagaaagtgagcagaacagcaacggcactaccatgcctatagatagattcctcctccatgtacgtcacaattaacgatcaagcgtgagtatatttacgagaaaagtcactaaaaccaaaaacaagtgagaattctgtgagcgatgagcatagaatagaccagagcaatattactatgttaggctaaaaaataaaggtgatcaaatcgaggggcccaattaatctcagctcaccgagacttctataaaacccggcttggctccatccaagagttgtcatcacagcatccgcgtgatcgaccagtcggtcgttttctcggctgtggttgcacgcatggcgaccttcactggacgtaccagtctcctggccacgctcgtcgtcgtcgtctccgcggtgatcatggcctgctccgtcgacgtctgccatggcgcccgcgagggtcagatcagctttttcattttgacttcacttgctactactccctccattttcaggtttcagtatataaggcgttttaactttggtcaaaactattttaagtttaactaagtttatagacaaatataataatacttataatactaaattaattttatcaaatcaataattaaatatatttttataataaatttgtcttagcttaaaaatgttactttttttttacaaatttgagcttaaaaatgttactatttttttttataaatttgatcaaacttaaaacagtttgactttgactaaagtctaaacgttttataacctgaaacggagggagggagtactttattttgatcagtgtccagtgtatgtgtgcctgtgtggtctaacgcttggatgcatgcgcgcgttgatgcaggagcattttcccgtcctgatccagcgccagctgatcaccgtcccaaagacgacgacgtctacgttcccggtggcggtggtgagggcggctacgggcctcggggaccctgctacgatcccctgatccccggccacggcggtggcctaatacccatcaggcctgatctccccgcccccggctatggacgcggacgctatccctgcttccgacctctcccctaccatcccacgccgccgctgccgccaccgcagaatggggacaccccgccgccgtgatcgagcatggccggccgccgcgacgacgacctcacgcgacccaatgcaccctataagctacccctccatcccaaaaagagttcaattgtaactatgaatctgaacacacatgtgtcgaggttcgtagttagaaattggctttgtatgggacggaatagtatacgcgtatacgtatgtatgtatctatatatgtcgagggcacgtatgtacgtacgtacgtatatacgttgatctctcgcaggtactagaacgtatacttgttactagctatatggatcatatataccgttcttccgtcttccatgtgctagtgttcattagcaggaataaaacggataggtgggtgcgtgagtgtgtgtgactggtttcaaacaaataaagtgccgctgtgttaattgtcgatattgtgttggtccaggttcacacgtactccctccggttgttgatagtcgacacagttaatgttagataaacacttgatcattcattttatttaaaaaaattatgcaactataaaaaattgtaagtcgtgcttataagtatatttaatgatagttaataaagtcacaacaaataaataattattatataatttctaaaagatgttaaatgtgtataaaaactcaacacaatcgttcataaaactaagggagtatacctgatgatagaaacacctcaatgttatggtatatccatagaaaagcgcatgccaaacgattttgaagatttaaaattcaaggaagttatacatgactagctgttgccaaaaaatttttgtctaacacatgaaggactgagagatctacttaattctaatgcaggttctaaaagtcgggttcagtgcgtgtcagttagtttgattctacaactaataaggatgataggaataattgaaccaatgaaccaattggctagtactgatatagtgtggtaaatacaggttggatagtttttcttgatcggcccatcttgatagaatttggaggtaatgatgaaaactatgtgaaagtccatccagataatgataatgaaaaaaaaatctaacttgcaaaacttcttcatctgatgcttcaccacatggagcgtgtatcggtgagaaatttagggccctctatcggtgaggtagtggaaccttattaaaccactcaggaatggccgtcgatacataaaagtttgctctttgggcttaagcccaaactattacctcatcacttcagctatcttcttgcacacatatcatctcttgtattgtccatattataccgatgaggagttgttccttgcatgttccgatctcttagtggttgatactgataaagaatttcaccatgttggtacttggtaccagtgccctctatcggttgtttgatgatttccaggaggaatctcattgtggtgcccccccccccctctcaagttgaatgtccttaagatatttgaggcactcctatcatcattggcatcaacattgacattgacatcgatctgtatatcaaagtttgccatcgtcttttttggaagacaaactagtgatcttgagcaattcattcatttactgtttgcttgactaaatccatcagcgtcaacacttcagattgaccgattgatgcaagatgcatagcttcatgccttcatgaaccaaatcttgaaaaaacttctgcggattagcgagctcatcttggcttggtttaccgatcagaactggccttggaaattatggcttcttaagtggtccttgttgcatcatgctgaccgactctagacaaagattttgaaaatcagccacggactgctccacctattgcctcagttcctccttcaaattctctattgtgactgggatcatgttgttagcatcggctttttcttcaacacgttggcttgaatataatggttccattgggcgtgccaaaatatgttgccacaaaattttgtccaacacacgaaggtctgagagatccgccgaactctagtgcaatttctaaaaatcggttcagggtgtgcccgttagttcaatcctgcaactaacaaggatgataggaataatcaaaacattgaaccaattgaccaatactgatatagtggtagatgcaggtctgaaggtttaagcatatgttggctggaggtccgacgtaggtagattaaaatgtacatcagctaatgaatcgataatatgataactaaagcttagaataatgcggctagaactccgatgaatattgcataaaaacctatcgacttagtagaagtaaacttattagcaacaatctaatagatcggatctaaccgagacggtatacaataggatataataggaaaaacttatttagccgatagatctatacaaatgtgatggatgtaccagatcaaaccaagtgatcaagcaatgcagccttagccaaagctgatatgtcaagataggcaacgattttagcaacaaattagaatatatcgacccgaaccgagaaattaaagtcctagctacataaatgaccgtatttctaaatacctcattatctataaatagctcaatatctattgtacatatttgacccatagttggatcatccattttgagaacatagctgctaaaggagagagatatatagtttgtaatttacatgttataacttatagacttaaatttctgtgattacattatatagtcatgccatgaattatcacttttcaatccgtcttgtatatagttccgtattcgtttttggttttatcattaatttcgatcccattttctaggatatggaaatggttaaaggtgttttgcgaccatttctgactctctttttttcacaccggtgtgcatcggcaagagaacggagcggaccgaaccgaacgacgtgcgttgcgagcgtgcgtggtgtgccattgggtcatcggtggagcgagctaggtagtagcgcactagttgacctgaccccatatcttcgtgcctccaaatttttccgttctatgcacggcatggttgtgggcagccttgactaactggagaaagcgagcagcaccggcactaccatgcatatagatttctccatgtatatacccaaaagagcaaccgcactaaaacccaaaagagaagtgacgattgtgtgggtgatacaaatatatagaaatagactagacactccatagcattattatcactactaaaaacgatttttttcatggtgtcacccttttatttttattgacgggttaatgaaataaacacttgtaaaaatgtattgaaggattttaggtcatgaaccaccagcaaaaaaccaattttcaccgacgaatgcttaggaggtctgtaaaaaaaactctattttttgaagcagacttcttaagtatccgccaacgaaaattgatgtttcgctggcattaaaatcgcacagccctatggcccactatccatgccacccactaaatcctccgtctcctcagctccctcctcccttcaacttccccacctccaccgtgcctgcgtgccacacgatggtgatgatgccacggcagcgatggcgatggcaacgggaggcgggtggcggcggatcatgtgacgagaagggacgaggctggtggcaacagcgatggcaagccacggatcttatggcggcatattcggtggtgacggtgcctggatgccacagatccagcagcggaaggggaggaggcggtggcgaagatgacgacaagccatggaagcagtggtggcagtgacctcaggcatagatccggtggaggtgacaggtcccatggcgtgggtggcttcgatgaggctccgacagtggatccttgtccatggtgttggcgaggggagctcgtccatggcagcgatagacgttgtgacggcgacgaccactcctccttctcatcggcgatggaggaaagagactaggagagggcagcgttgctcggctcggcttgttcaacgcgattccagatcttgctgagctaagtcctccctttcccactccacctatgacgaccaccgtcggtgcaacgacaatgatgaacagcacggcgacgggtgacggcgatgctatttcatttgcatctgttattgttgtttgcaaattgaaaatggagtgaaaaatctatgtagtgctatttggatatggatttgaatatggatctgatgaggatttgaatttggatctctagatgtggatttgaatatgcaatagcttctcttctcttaatattgattaactttttattggaaaaataacctttttgctggtggtcctcctagtagtgctgcatgcgaaaatcgaattttgcaatcggtcgtcttaggggctcgcaagcggaccgtaaccgctagcaaaaatcatcgatttttactggttttaggtcgctggcggttgtgtcagcctcctatgaaaacatattttggctgccggaaaacctatttttttaagtagtatatgctcaaataaaagatactatgtaaagttaaatggaggagccaatctatctggccttttctctcctcctcgatcgagctgtctataaataccgacttggttctaagagttgtcataacatctcgatcagctgcgactgcgagcagctaattacagagtaagggaagttggtactatacctgtcttggccgtttcctttgctggttgtgttttgtgcttgcattcatggcgaccttcaccgaacgtacccgtctcctcgcggcgctgcttgtcgtcgtctccgcggtgatcatcggctgctccgtccacgtctgccacggcgcccaagagggtcagctacctagcttcttccttcccctaaccccctctctcagctcattttgactttaatttgcatcagtatcatactaacaacagcgtactactggacgtttaattttccctgtcctctcgtccgtccagctgacctgcaggctgctggctactaccgacgcggcggcagcatggatgatcccgacttcgattttccctttcccggcccccgccatgttgtgtgcaacgacgggccttgccgcaccggcccaggccgattacgtccctacccctttccgcgacctttgccgtaccgtcagacgccgccggcgccaccgtcgccgccgctgccgccaccgcagaacaaacagatcccgcctccgtgatgaattgatgatgactgttcatgccggccggccggccgtcatgatgccacttaattatatatgcatatggctaattaagtacgtgcgtgtgataaaaacgtacgcacaccagagattacatacgcatattgtacgtgcggcgaacggccgggcgctagctctcttgagcggggtacaacgctagctacagcacactattgtgttattactaattaaaaacgaataatgcccgtcccgtgtgcttgtgtttcattagctggaatagaacaggtgtgagcgtgtaactatgcggtctaaaaaggaaataaaagactggtgttgtcaatgctaagagcagtgtactcttccaatgctgatagtgattatggtaattaatggcctatcacatagtatcaaattagatgtggcaaagagaattactgagataggagaaaaagcataccatttctttgcaaatgaggcactaccaagacacaaaccaacacaaaaaataaaaatagtactaggcaagtaggcatcaaggtggtgtcaaactgtcagtgtacaaagtggctgggttgtttgaattggtcggtggcaaaaggggctattttggttggctcccacaacttgattagtattatcgcatcttaagtttggtacatgtttaactgattcaggtggttgtttggttcatagccatacttatcacaagatgctttctccatcatgtaagttccacatgccattgaggtaaaaaagagtagctcaagctagctaaactgttgttctgatattgctaaccacgtattacataagttagctgaaaacttatgtcatgctctggtaatttaaagtactcaaccaaacatcccttaagttttgccacaccttgctttgttaaaggtgtggtatatatcccacataaagtgtgaccctccaatatcgatccgtcaccctaatgcgataacagaaggtgggtaggtgcagcgcgcgtacgtgctcgtggcggggcacgctgccatgcgtaatgaagtagcttctcccgcgatggtggtgagtgagcggaagggggagatcacgaggagggatcggttcaggtctcattgtgcgacgcgaggctacggctatcgctcaaagtgcataaggggaaaacggacgtcacggctcggtgtctcctccgccctcttcaaatccctgtccctccgccgccgccaatgccaacgccttcctccacactgccgccagtcatcgccgcacactcccgcgccctatggtcggcgccgtgcaggcagcacagcaggagctcgctgccatccccaccaaaggcatgagccgactgcccgagagtggggacgtcgacgaggtggccaagcttctattagcgatcaagttgtgggggctcttcgcagtgaccggccacatcatgcggagccgttcctggacaagatcctcaccgcaacgagggagttcttccacctatcgccgaaggagaaggtgatgtacagcaacatggtcgacgccgacgtggcggcggtgagaggttccttcctgaggtctaccgcatcgaccacatcgacaccaacaggcagatcctcaactggtgcgaccggctatacctccaggtctagccagaggaggaacgtcggctggatttctagccagaacacctgctagcgctccgaggacttgaagaatacacaagaggaacgaacacgcgtggcgatggtgtctcgctcccctgaccagttggttgggtcacaaaagccattgccgatcctcatccctcatcctctgccgacgttgacgactttctccatgctgttgttggttgccgctattcgcaccctatggcctcgcgcgccgcatgcagcgtctgctcccatgccaactccctgttccagccaccaccgcgacaaaaactacagcgagaaacaaagagaggagaaggagagaaataaagagatgaagagagagataggtgaagaggacctaacatgtggggcccatgctgaaaagcatggttgactcagtcaaattaccacatcagacaaaattacccgctacactgccctgtgacatatgttgcaccggttttggcagctaaggaatcgttgtatctgctatttcggtttaaggacgaaaatcaaacttgctgtcaagttaagagacctaaaataaacttattcattgtgtgcgcgtgcgcctggcccatcaccctgcccgtaccaacaaagggccatcagcctcgatcccccggctcctgcgtcgtaggctcgtaaccatatctccgcaaaccccccggacagtacacccgccggccgatacctccgggaatttttttcatttttaaaattttcttttaaaatatttaattaaataatctatcgttggaaaaatttacaaaaatagaccctgccgccctagtggagggcggcaagctgatgtggcagacggcaactcgacgggcggtgacggccgattgaaaaagttgaattttttgcattaacacccttgccgcccactgccagggcggcaaggggcctccatgcaaaaaagacaacccgggaagggccatatcaacagagctggaaagaagcatttgatttggttttttttgcatctaggtcctttgccgatgaaaaaaaccagccaaatgcttctttccagctgggcaaaatgcattacgcctgtaaggacggcaaggaccaaagcgcaaaatgcacaagtgacgccgtcgagccgtcgtctgccacgtcagcttgccgctctccactagagcggcagggtctactttttaaaatttttgcgacaatagattatttctgtaaatattttaaaaaaaattaaaaatgaaaaaattcatacctccggtgggtccgcaaggtcgtcgcggcgaggcaggagggctggaggcggccgtgtcgtgtaatcccgtcatacgcataacgcacctacgcatcgatcttccagttttgctactcggccaaaccctttacccgtgccgttgtttcgaaaaacctgcatccaacgacggcatgatgtactttgctacttatctgttttgaaaaagctcacacgcacaagtgtttgggtccaaaagaaagtgcatatacacaaagcatgccatgctttctacttatttgttttgattaaataggggaaaggtccgccctcattttataagtggatagatttttttcacgtgtggatcaaatttaaccttaaattttatatgaaaaattataaaatccacctcataagtcagttaaaatttgacatttcacttgataaatcattttattcgaaatgctcaatctttagtcggttttaatataaaaattaaaccaccctaatacatatgagcttaaccgaatcagcatgttatcactaatgtagagccacccaagctaagctagccgagtcatccttgtccaaatgcttgtattagacttattctttatttttttcgtcatatagcgaaactcagtgcaacaacgcttaagcactcatcaaaaattctatttgagtactctcaaaaaaaaatatcaagactatactcctagaaatatttgattttggtataaaccatattgacacctcacagtttatgaaaacgtaatgatttggttaagcacatgtacattgggggtggttttaacaacagaactaagtagggggtaggcattcgcagcaaactaacttacaaggtaaaatgtcaaatttcaagtgatttctaaggtgatttttgtaatttttcctatttttgtaaagagaaatgtgtgctgatatgtcatacgtgtggctaattattattttggtggtatgaaacacgggtgctggtatgtgtgacaaattattcttttagtgataacctacgtactagttaataccaagatgtttatgttaactttatcaatctcaagatatatcagtcattctctcagttgtaagaataaggtgtacatgtatgttcgttgcacatttgacaaaaaaaacccttagatttgagagactttttacatggctagaactgtatcgagattcaagcattaatagtaactgtatactctcaacccctttttctcccacacattgcttggcaaaatgggaagaagcgagctcactggtgatgcccaccccacctccaaccctggtcggcgcctaatggcgcgaacggcacctgctaggcccgcccactcggcctcttcctctcccttgtttaccttgcccctatctccgaagccggctgcgccgcttgctcgtgtccaccgctcaccgccgccgccggtcttctgcctcgcacagctaaaccttgttggttgggccaccggtggaacttaaggagaaggagaaggagtcagcacaaatcttagcatggacccggtggcccaaaatcagatttctgacagaaatcccgtaaatttttgttgtactaaggcgcgattaaaaaaaagaagtgtatttttccagaactcttcatacgtaattatttagatcgtatatatacaaaaagataagcacacatgctgtcaagagcttaataagatccactcccttgactaataaagcaattgtcaaggtagaaagccaaaagacattggaaatttagtatccagatgcccttagatttagactctcgggcccagtttgcatggagagagacgatcgagtaacagtggcgagcagatatgcctataaatacggccacccctgaacaccatcgaacatgcagcaagaaagccagcagaatatataagctgtgtgtgtaacgactaacgactcaacacttcgagctgccgatcgatcgacccagctggtgatcagtaccgcgcgcaatggcgtccttcgctcgatctgcccgttccctggcgctcctgcagttggcggcgctgctcgtcgcctacgcggtgatcaccagcaccgccggtgatttctccttcttcttcgtccttgctgagttcgcttccatgcacctgattgtgcaataccctgattttgtcttcattttttcatttttgcagagatgttggtggatccaagcgaccctttccagcccaatgatccgggttcgggctggctcgaccgagttccccgtgcggctgccggtgtcgaccgcgttcctcgcgctgcggccgccggtgtcgaccgcgtgccgcgtgctgcggctgctaccgtcgaccgcgttcctcgtgcggctgccggtgtcgaccgcgtgccccgcgctgcggctggtaccaatcgtgtgccccgtgctgcgggcgatcacgaataagcgagtcgcacagccgtgatgcatggctgattggcttctggcccgatcgatcgcgttcgccactacttcgcgtatacaagtaattaatgaaaggaatagcacatatggggtaatcagatagtagtaattaagtaactggagagagtcagcgaggagggggcttgcatgcctgtcgctagtagcagaacttgtgagttgtgatgataagtacgaacaaaatgggaggcaatgccggctggctgctcggctatagctgccttctgatatgagtgagtatgttatattgtaattagcttcagtttatcagaatataaacttcgagtttcttacgtgtttctccatatttagccgtgtatagtggatatagaggccgaattcatttccgttataaaaagtaatgtgtttggctatatatacaaggctacctccttagactatgtgtttcgctatacatgcaaggctacctttgttaggcatgttcaaagtagagcctggtacagactttcttagctagggctgtcaagaaaactcagaagtcacgagttgctcaagctcggctcggcttgataagtattcaaatcgacccgagcttctctcaaagctcatcagctcgatctaacgagccggctcgaaccatttgacggtggttcaaacttcaaacttttcaataggcgtgtgcttgcacattctttttcgctgtccattccaattatttctcccacactcaagtttcaaaatatcaccaccagacatcaatacttgagagttgagaccttagcctacaaacccaaccacttctaagcttcttttccatccctttatgcccagacctaaatcaatttctctcgtcggtctcctagatccccaatcctaggctgctcctctgccctagatctagttgagtcctatatttttcaagtcctaagtgacctagataaacgtggagaggctgtgttgctatattgtaaaatcaacttctttataagagcatgcctagttctgttagcaacaaaaaataatcttacacacaattaacccattgaatcgtgcttttcatttcatatcttcttattttccctagttttaactctagtttgtccgtctccactagtttgcgctataaaccgtccattcttgccgtgaaaatgtgaatccctttgtaggttaggtttgccgtgaaaatagtatatactacctccgttttttaatagatgacgccgttgactttttctcacatgtttaaccattcgtcttattcaaaaaatttacgtaattataatttattttattatgagt

SEQ ID NO: 4853 - DNA, 44402 bp, Oryza sativa
ttcatcttatgcttccaagcggcatagtccgtaccattgaaatacggagctttgccgctataggtactcacataaaatgtagatgtagttggatagtcataaggaaacataactcccttatcaccatctttgccttcccccgtttggcccgacatgatctctccaagtggttaagcctaattaggagattaggctctgataccaattgaaagggtcaattaggcctagaggggggtgaataggctaatttaaaactttatgcggaagctaaaactgagttagggtcggaaagtctgatccacagtcagactatccgaaaatatcagatagtctgatgttggatcagactgtctgatccactaaaggaacactacaagtagatctagtgcacaaacaagagtatggcacaaacagcgactagatctaaagcggcacaaaagcaaagctaaataataggagaagagatatcaccaacaatgaagttcaccgagttgttcccggagttcaaatccttgaggggattctactctacgttgaggagctcactaagagccgggtctttgctaaccctttcctcaagaggttgcactaagcactcctctttccactaaggggtatctctttccttgtggaggcgagatccggccttcacaaacttctcccggccaaccacacgtagatcggtggctcgggagtgacacctagccgtttaggagtcctcaacctccaagagtaacaaacaccacacaactcttggtcaaaccctagtgctcaagatcgagtgaaacacacactaggccctcaaacaccaaatccacaaccaccaagatctactacacaaagaacaaagagggatttgagagagggagagagagctcaaagatccaaaacactttagcaccaagctcaacccaaagtgaatgtgaatgaatgagttgggtaaccctagaaaagggttaggtggggggtatttatagaagcccccaaaatgtggccgttgggagagaatcttttcatcccacctcggaaagtccgaggtgacatcggatagtccgatgtttttgacccccaagcaggccagagacagagaacaaaattctagaggatttcggacaatccgatcgatcggaaagtccgatgtcatattggatattccattatttttgaaccaagaatttcatcctctcacagagactcaagttccattgaatttcggagtctctggatcatcggatactccgatcacatcggatagtctgatttaaaactcactcaaaaggaataaaaagcaattcaaaatagagagtgaagttctgagaaatttcagatagtccgacgtatcggatagtccgaccttatatcggatagtccgatattttttagccaacactcagaccgaagacagtgagcaaagttctgtgaaatttcggatagtctgagcatcggatagtctgatcaacatcggacagtccgacagacataaaacaggaacacttcaaataaatgattttgagcactagtgttctaccaattatatgcatgtggcatccctcttaatagtacggcatcctaatactcaagaacacaagatatacatggattagaagacaattaccacaaaagatgccgcaatacttattgtgttgacatccactcctttttcatccttgcatacatctcaacaaaaagcattagttaccctctaattgtgttgtcattaacaccaaaataaatgaggggtcctagatgcactttcattctccccctttttggtgattaatgacaacacacttagaagtaataaaagattaggattttggtggagctccccctaaatatatgctagaaatgaaataggagagctccccctcaatctatgcactagattagaaatgacaatataacctcatgcatatgccaatgacaagatatttcacacatttgagcatggataatagataattgcacataacaagacacaaaaacccaagggtcgactagccatcacgaaaggagatagattagagatttttgatgataggtggttctccccctttggcaacaaggcaccaaaagggaaaaaatagaggatcactcatccttatcagaatcctcgccctcctcacttgactcctcagcatagtcaccttcctcctcctcttcttcttcctccataggagccttgccatgatccgcacgagaggagcttgcctcagctgcaaaagggtcctcaatcacatcctccccactgtcctcaacctcagaaccatcgggagaacacggcaaatgggtgttgcgaaggagggtcttgatccgtcgagtgtccttcttccttgctctgcgttccttggcttgccgaactgagatggtcttgcataagttgaagatggacttgaagaacctcaaggacgagttggagtccggcttggtgacggtagcggagggaccggcacgagaagaagcacgagtggttcgtccagccggcacagcagcaaccttgatgggacggacttggtaatcggtatgtgccacctccttgtgaaacttcttcttggacacaatctcaatcatcttcataatgtaaggcccatagccaagtcctcgcttaggcatcatggagataagccggatttcttcaaagatgaagtcaaaggcgtcaaagagctgtgggtgagccttcatcttgtaaagcaaatttcttgtataggcaaggacgttgctagcatcaccttccttgggattgagagttttgcgcaagagcttgttgagataggcatagaagggaaggagacctttgatggtgcctaactcatagtccacatcttggtacaagaagtgaagagaatttgtgtccatgggcttctcatcatgaatcttgacacgattggtgcgagagcgagtcggaaaccccaaaatggcagcaaacttagcatatgtcacggagtatatgatgccatctgtcatccaatgaataatcttttctttgttgggctcaaaataaagtgtggcatagaattgtgcgaagatttctttgcaccatgggtattgcaagcccatgagttccttcaagttttgccgagcacaagcttcaatgacttcatcaataattgaatcatgcaactcctccatatacttccaatcaacccactgcataagaataggccccttcttaggtgcattcactgtctcatagtaatcctgctgaaaaaggttccaaaaccgaggatcagtggacaactgttgaaatttgtagagatctttcttacgctctttctccacttcagtccacttgcggttccaccttatgactctccgatgataattaggatctctagagggagcagtgataaagaaaggcccttcttcctgagcggcttgctgagcggcaatgtcctcttctaaatgaatctcttcctcaaaggatggtgcatgagaaccactaccttgacccggctcagaagaatccgtaggattgcctctccttacttttttagcaggtgcacttgatctttctccactgactcggctgcggcgaggaggaagaggagcaccatgctccacattagccacttgagctgcttggtcagaggcttgagcttgcgcgtcaatggcatctttgcgagattcggacatacgccgtatagcatgacgagccttggaagcgggagagcgacctcgagaactcattgtcccacggcgagagtaaacttgattcttgaactgacccgtgatcatgaggatacactgatttagaacagaggataatgattaagaagaagtggaagaagaatatttaaatgtgaagcaaggagaaatttggactgggccaaaaggaggtcggatagtctgatttgacgtcggactatccggtgtacatcggactatccgacagcatatcagacaatccgacggccttttgccctagaccaacaaatctcgattcacacaaacatatccaatggaatcaaaggatcttctaggtactagatctaggcactaaaacaagaagattcaccgaaggaaatcttgaaataatacaccatgagggagatcgagggaaaacaaggaaatacctcaagaaccactaagagaatcactggggaaccagtgatttggaaggagttgagggagggaaaccaccctaaagtgaaggaatagcaatcggagactccgaaacgaagatttttggtggcctagaactagggtttggagtggagaagaggggtggagagagaaacgactgagacaaatgactgaaggggtaagaaagagttacccccggggaggttaagtccccttgcccttggccccacgtcggatagtccgatttgaaatcggactgtccgattgtagtcggatagtctgacttgatgtcagacagtccgacatcctttgtggcagagacaataaaggatggctcaaggaagatttttttcaacaacattttgataggatgaactcgatggctagactattacttggacaaatgcagcaaaagaaagaaaactaggcaccctcgagagagggaatgtacgaatctatagcaaattgtgcaaggaccaagattcattagagaatgagatccccgtacacatagatttcaagttatccacatagattatgactagtgtttattcatgaattgaatgttcactttgtcatgatatggcaagcaaacctattctagtaaatgaaaaacacatgcatgcaaaagatcaagccacattccgagaatccaagatatttagctcacttctcaactcacaaaacctagcttcatctagaggcttggtgaagatatccgccaattgtttgtcggttctcacatgttggatgtctatgttgcctcttgtggaatggtctctcaagaaatggtggcgaatatctatatgcttggttcgggaatgttggatggggttattggctaacttaatggcgctctcattgtcacataagagtgggattttggacacatttaggccatagtctctcaaggtttgcttcatccaaagaagttgagcacaacaactccccgtcgaaacgtattccgcttcggcggtggatggggcgacggagttttgcttcttggaagaccaagaaacaagggacctacccaagaattggcaagtacccgatgtgcttttcctatccactttgcacccggcataatccgcatcggcataaccaatgagatcaaacctcgctcccttaggataccaaagaccaagattaggtgtgtgcactaaatatctaagaattctcttcacggccacaaggtgacactccttcggagcggcttgaaatcttgcacacatgcacacactaagcataatatcgggcttagatgcacaaaggtaaataagtgagccaatgatggaacggtataccttttggtcaacgtctttaccttgctcgttgaggtcgaggtggccatttgatggcatgggagtgtggattggcttcgcattctccattccaaacttcttgagcatgtccttcaaatactttgtttggcaaatgaaggttccttccttgagttgcttgatttgaaggccgaggaagaactttaattcacccatcatggacatctcaaaacgtttggtcatcatcctactaaactcttcactaaaagacttgttagtagaaccaaatataatgtcatcgacatatatttggcacacaaaaatatcattatcatgtcttttagtaaaaagagttgaatcggctttcccgatctcaaagccgtttttcacaagaaaattgtgaagacactcataccaagctctaggggcttgcttaagcccgtagagtgccttgtggagcttgtacacgtggttgggatacttcggatcctcgaagcccggtggttgctccacgtataccaactcgttgatgggcccgttgaggaaggcgcttttaacatccatttgatatagcttaaaattgaggttagtagcaaaagcaagcaatatgcgaattgactcaagtctagctattggcgcaaaagtttcaccaaaatctaatccttcgatttgggtaaacccttgcgccactaacctcgccttgttccttattacgaccccggcctcgtcttgcttattgcggaagatccactttgtgccaatcacattttgccaaggtcgctccaccaaagtccacacttcattctgggtgaaattgttcaactcctcttgcatcgccatcacccaatccggatcattaagagcttcttccacccttagaggttcaatagaagacacaaacgagtaatgctcacaaaaatttgcaatacgagaatgagtggatactcccttgttgatgtctcctaagatgttgtcggtggggtgatctcgttggatactttggtggattcttgggtgagctagatttatcggagagggtggcacttgctcgccttcttcaccttgatccaagcttgaagtggagggattgtcggcttgggttaatgtaggtggctctacttgtgttgaggaagaggccccttgttgtggctccctaggacgcacgtctccaagagccaatcttttgattgcttcgctagggtcctcctcttcacctaacacatgtgagtcgacttgctctacttgagagccgttagtttcgtcaaatgtcacatcacgcgcgatctcaacaataccggaggtgttgttgaaaacgcggtatgcgcattcatttgacccatgcccaagcaagaacccctcatcaactttaggagcaaactttgaggatctagccttcttattaagaatgtagcacttactaccgaaaacacgaaagtaagagacatttggtttgttaccggtaagaagctcatagggagtcttcttaagaaggcggtgaagatagaggcggttgatggcgtggcatgcggtgttgacggcttcggcccaaaaacagtccgatgtcttgtactcatccaacatggtcctcgccatctcgatgagagtcctattcttcctctcggctactccattttgttgaggtgaatatggagccaagaactcgtgcttgatgccttcttcatcaaggaaactctcgatgcacgtgttcttgaactccttgccgttgtcggttcgaatgttcttgatcttgaggtcgaactcgttttgggctcttcttgcaaacttcttgaagattgcttgtgtctcactcttgtcatgcaagaagaacacccacgtgaagtcatcaacaataacgagaccatatttgttacctccaatgcttagataagcaattggccctgtcggtgacatgggaccgggggtatcgtgactagaggcttgggtagccgcggtcgcccacgtggcctgaccccctcggggggggggggtcgggcccgagggtgacgcggccacccctccctctgtctccccgaggggtcgggccgcacccgtttcggccccgagggctggggcgccccgaccccctgtggttttggcgccacgtgtgtgggttaggtgagcacagcaggcgctcacctaaccgcatttatagcgggttagacgagcgcgccacgccgcattcaatgcggcgcagcgcatgcttatccggtccgtgaccagtcgcggtgtgtgaccggtcaaagaccggtcagatcgcgggttaggtggcaacaggcggcctgtcacacgcctcgccccgtcccgtcggaatgatgagagcttcctggctctcgtccctagccggagccggcgtgctaactcctggagttggtatgtcagtcccggtcagattcattccagacttcagcgcaagaatggcaaggaagtcgccggccattaaatgaagtttgaaatgggcgtcctccggaaaagctgacgagcggggcaggagacgagcgcactgcttgtcaagggtcacttccggctgtagactagccctcattgtaaaaagcatgtttcctttcttaggcagctagaggcccctgtggtgaccgctgaccagataaaaaggaggcccaggcctagaagaagggggattttcttgggggatttttgaggaggagcctgaactctctctggctctcgagctctctgtattccttcacatacagatccaccagaacacaggagtagggtattacgcttctcagcagcccgaacatgtctacgtcgcccgcgtcttgtgcgatccttctcgctgacattcctctgatcgagggcgaagaacctcacatagcgccctcggccgaaccggcaaaggggggcctgcgcggtcttccggtgaggggccccacgctccgtcatctggcgcgccaggtagggggcgcgcgtgtttttcgaagccctcgtcctctttcgtgtgcgccaagcttctcccgctcagcccaatggccgaacgggcagtggcgcacagcctctctccgaacgctagcggtgacgacggggagcagaacccgcgccgtcgggctcgcaccccaccgtccccctctcgccgaaatcttgggcggggggaggcgctcggggaggtcggaggatccgcgacatcgccgcccgcgggcgacgggggaggacggcgagacggggcgcgtcgccgcctcgactacggcgatggcagcacgccccagggcgcgctccaggctgcgggtgcgctcttgcgtcacccgcccgtcgtccccgatccagagactccagcccgacgttggctggatgacgtggccgacttggtcatgacggcgcagcagcgcctaggcgccggtgggcggccctccgcccccgaggcctctggcgctgccgccgccggctccacgtcgtcaaggcggagggcgcggcgagcggcggccgtcacccgccgttcgtccgccattccctcgtcaacgcctccgacccaagaagatgagcgtggggggtcggatgcccggctcgatatcgagcgccagcgcgacgatcgtcgcgccgcccacgcaacggagggcgctttctcgtccggagcgccacttcggtccgggcacgggggccggcccccgtgtccccggttggcggtgccggctgtcgagcctttgtggcgagccttcggaacgtccgttggcccccaaggttccggcccaccatcaccgaaaaatacgacggaagcgtcaaccccgccgagtttctccagatctacacgaccgggatcgaggccgccgggggtgacgacagggtcatggcgaatttcttccccatggccctgaagggtcaggcgcggggttggctaatgaacttgccacccgcgtcggtccactcctgggaggatttgtgccagcagttcaccacgaactttcagggcacatatccgcgcccaggcgaaaaagcggacttgcatgcggaacagcgagggtacgatgagtctcttcgctcgtacattcagcggttctgtcaagtccgcaacaccataccgtgcatccccgcacacgcggtgatctacgcgttcagggggggcgtgcggcacaaccgcatgctcgagaagatcgcctccaaggagccccagaccaccgcgcagctttttgagctcgcggaccgtgtggctcgcaaggaggaggcctggacctggaactcctccggctctggcgtggcagctccggccgcccccgagtccgccgctcggtcagggcggcgggacaggaggagaaagaagaagtcggcccgttccgacgacgagggtcatgtactcgccgtcgagggcgcttcgcgggccccccgaaaggggaggcctgcgagcgacaaaaagaaggaggccggcgctcccagcagggagcgcccgaccggcaagtggtgcaccgtgcacaacacctccctccacgacctcgcggactgccgcgcggtcaaaagtttggctgagcggacgaggaagtgggaggaggagaagaggcaggagcgccgtgagggcaaggccccagcggctcccgccggcaaccggcgaggtgaggccaagcagaaggcccccggcgaggatattgacgatggcgactatgacctggggttctaggagcctgaggccaccatcgccaccgtcgatgggggagcgtgcgctcacgcttctcgccgaagcctcaaggccatgaagcgagagcttctggccgcggcccctacccatgaggcgacgcggcgggcgtggtggtcggaggttgccctcaccttcgaccagaccgaccacccgccatgcgttgcccggggaggacagatcgcgatggtggtttcccccaccgtttgcaatgtgaagttggggtgtgtcctcatagacgggggtgcagccctcaacatcctttcccctgcagcctttgacgccatcaaggccccggggatggtgctccggccgtctcagccgatcatcggtgtgacgccggggcacacctggccgctgggtcatatcgacctcccggtcaccttcggtggctccgccaacttccgcatggagcgggtggacttcgatgtggcggacctcagtctgccctacaacgcggtcctggggaggcctgcattggtgaagttcatggcagcggtccactacgcttatctccagatgaagatgccgggccccggtggccccatcaccgtccatggcgacctcaaagtcgcacttgcttgtatggagcagcgcgcgtaccacctcgccgcggcgtccaagcccacgggtggcgacgaaaggctcggcacctccgtccccgccgccccgaggcagcggatggtcacgtgcgacgaggtcccggtcaaggaggttgccctgggcgacggcccgtccaagaccacacgaatcggtggtcttctggacgataaataggaagacgcgctcgtctccttcctgcgggcaaatgccgacgtcttcgcctggagaccggcggacatgcccggggtccccagggaggtgattgagcaccgtctcgccgtgcggccgggcgcaaggccggtccggcagaaagtgtggcggcaggccccggaacgtcaagccttcatccgcgaggaggtggcgcgacttctggaggccggattcatacgtgaggtcatccatccggagtggctggcgaacccggtcgtcgttcccaaggcgaacggcaagcttcggatgtgcatcgactacaccgaccttaacaagaatgcaggtcctacttttcaacgtactactcgaatttctttgggtagccaaataggacgtaatgttgaggcctatgttgatgacttggttgtgaagacgcgcaaccaagagaccttactctcggatctagcggaaactttcgaaagtctccgctccgcccgcataaagctgaaccccgacaagtgcgtgttcggcgtgcctgcgggcaagcttctcgggttcttggtctctgcccgaggcatcgaggccaaccccgagaagatacgagctatagagcggatgcgcccccccagcaagcttagggatgtgcaatacgtcaccggctacatggctaccctaagtcggttcatatcgaggctgggagagaaggcgctacccctatttaagctcctcaaacgctccgggccgtttacctggacggaggaggctgagcgggccttcactcagttgaaggcgtacctcagttctcccccagtcttggtcgtcccggagccagatgagccgttgctactctacctggcggcaaccccgcatgtggtcagcgcggcgttgatcgtggagcgcgacgaggacaaccctcactccgcgcatccccaccctgtgtcgactcgacccgggagagagcagggaagagaggcccccgagccgaacggcggcccgaggcccccgacggccggagctggccctccgcctgcttgtccgacggtgccaggcgcccccaacccccaggatggccccggggccactgcgggaaggccgcgcctgtcgccctctgaccccgaggtcgtcggcacagaagccgagtgcgccccgcgtggcctctcggacaaagagcgccctcgagatgcggcccctggcgaagaggatcggccccgccgaaaggtgcagcggcccgtctacttcgttagcgaggccctccgggacgccaagacccgataccctcaggcccagaagatgctctacgctattctgatggcttcgaggaagttgcgccattatttccaggcgcattgggtcacggtggttacgtcttaccccctcgggcaaatcttgcataaccgagagggtactggacgggtggtgagatgggcaatcgaactctctgaattcgatttgcgctttgaaccacgccgcgcgatcaagagccaggccctcgccgactttgtggcggagtggaccccagctcccgagcccgtctccgcccccgaggccacctcggactcctcgcagctgcctcacaccgcctactgggtgatgcagttcgacggctccctgtctcttcagggcgccggtgcgggggtcacgttgacctcaccgagcggagacgtcctcagatatctggtccgcctcgactttcgggcgaccaacaatatggcggagtacgagggactccttgcgggactcagagtggcagctggactggggatccgccgcctcctggtgttaggcgactcccagttggtcgttaaccaggtctgtaaggagtaccggtgctctgacccgcagatggacgcttacgtgcgccaggtgcggcgtatggagcgccatttcgacgggatagagcttcggcacgtgcccagatgggataacgcggtcgccgacgaactctcaaggctcgcttcctcgcgagcccagaccccaccgggcgcctttgaagaaaggcttgcccagccgtcggcgcgacccgaccccctaggggagacggacgcgcctgaacggcccccgaggcccgtcggagtccaggcctcgggacccgaggggagcgctcccaactcccctagattgattgcttggatcactgagatccaggcatacctcgcagataagactctacccgaataccgcgaagggggtgaacgcgtccggcgcatctccaagcgctacgtgctggtggaagggaccctctatcggcgcgcggctaacgaagtcctcctgaagtgcattcctcgggaacaaggcgtcgagcttctcgccgatgtccatgaaggcgagtgcggagcccactccgcctcacgcaccttggttggcaatgcctttcgccagggtttctattggccgacggctctcaacgatgcggtcgacctggtccggcggtgcagggcgtgccagttccacgccaggcaaacccatcagccggcccaggccctgcagaccatacctctttcatggccgtttgctgtctgggggctcgatatcctgggtccgttcaggagggccccgggcgggttcgagtatctgtatgtcgctgtcgacaagttcactaagtggcccgaggcttatccggtcatcaagatcgataggcactccgtgcttaaattcataaggggcatcactgctcggttcggggtgcctaaccgtatcattacggataacggcacccagttcactagtgagctcttcggtgactactgcgaagacatgggcatcaagctctgcttcgcctcccccgcccaccccagaagcaatggccaagtggagcgcgccaacgcggaaatcctcaagggtctcaaaaccaagaccttcaacatcctcaggaagcacggcgactcgtggatcgagaagctgccagcggtactctgggcgaaccgaaccacgccaagccgagcaaccagggaaacgcctttcttcctcgtctacggcgcggaggcggtcctcccatctaagctcaccctgaggtcccctcgggtatccatgtattgcgaggctgatcaagatcagcttcgccgagacgacctcgactatttggaggagcgaaggcggcgcgcggccctccgagctgcacgctaccagcagagcctgcggcgctaccatcagcgccacgtccgggcccgatcactctgcgtcgacgacctcgtcctacgccgcgtccaaacgcgtgctggactgagcaagctctcaccaatgtgggagggtccgtatcgagtgattggcgtcccccggccgggctccgttcggctggccacgggcgacggcacagagctgcctaacccgtggaacatcgaacaccttcgtcgcttctacccctagggggggtcgggtgtcatgtcttgggctcgggccaaccccgcacccctcttgggcgtgcagggttggccgggggctaccacatgcatatacttaccttttttctcttccgtatttcaataaaagcactttcgattccctgaggactgtgtctgtgccatcgttttccttttgaagaatcttggcttgaattagcacgctcgtgctcgaccctgccctcggtggcccgggccggctaaaatcgccaaacggggcccagaaccgagccgtgccccggggcgtggtgaactccggggggggggggaatcggcaaaggcccacaatcgggtcatccataaccctcggtcaccacgctcccggcctggccagtctcgacacgtggatctcctcaggcactagccccgacccgcgccgcttgaggctggggcctgggcacgagccctcgttcaagccaagacacagaaggaccgcggcacagaccaacctcgtctcatacatacaacaaacagaactgacgtagaaattccctctttatttgattacagattaaatcagtctatacaagaagggggcccgaaggcctcggaaaaagaagaaaaagttattaagattggcgggggcctggggctcactccgacgcgcccgggtcgccggcctcgtcgtcgttgtcgttcgcaccgtcgtcaccgccctcctcgtcggagtcgagggcgaacgcgagccgaggggccgtaccctcgaagctgtggacgatgtggtcggcggcgtcccggacctgcgcgcgcgcgccgtcctcggttccgggagggaacttgtccagcgctgcccacggggagaagtcagggtccctggcctggtagcttgccagtacgagctccaccgccccccgggcaaggtccctcgaggatgacttgatcgtctcttcgagctcctcggggagccgctggagggtcccggccatctctgagaggcgctgggcgacgcccccctggttggcggtgaacttcacggtccgctcgccccagaggcccacctgccgcccggcgcggtctagacgggagacggcgtcccgaagcatgccgggccctacctcgttcgccaagcggagggcctcgacctccccggcggacgagtccagcgcgccctgcatctcggcgatggtgtgttcggcggctgcgaggcgggcgactaggtcgccgtggcccgcggccgccccaccgctgtgcgctctcgcgtccagctccttcgcccgcgcctcgagctcagcagcccgctgatccagcgcggccctctcggcgcgggcgccttccagattgcggcgagcctactcctcccgcgccgcttcgcgaaggaacaggctgtccgccagccgctgcgccgcggcctcggcttcctcgagagctcgcccccgctcggtgagcacgtcctcgcggaggcggagcgcggactcctcttcggcgcaggcggcctcgtgcgccgccagtgttgcctcccgggtggcgacagcggcctcgcggtctgccaggtccttctccttcgtgtccagggcgcgggcgcgctcctccagcgccgtggcgcgagcctcaagggcctcttcgcgctgccgggacgccgcctcgatctccgccgcccgccgttcccgggcagcggcggcgtcaaggactccccgggtggcgtcgagcttcttctctagctccgccgcccggctcccgtattggaggcagaggtcgtcccgcacctcctcaagtacggcggtggcgatgagggcagtctcccgctcctcctccacctccctggcgatctccgccaggtccctacgacgggcctcgagctcggaggcgtgccggcggtgtgccttgcggcccgcctccaccatggcctccaccgagcgtcgcccctcctcgacgcgcgcccacgccgcgtcgagctccgcccgctccgcctgcagggcctccatccgggcgcttaacccgtccagcaccgtgctgttcacggcgactaaggcctgcaggaggggctccgcgctcagtggggcagcggaagacagaggggagagccgcctcggtgtgggtgccgcgcggctcggcccgccgatcgacgtgccggacccgggggcgtcccccgaagctggctcgtcccaagcatcgcccgaggggtcgggcccgagcggcgcgtccgcggcctcgtcgtgggtggcctcggaagtcgtcgtcgcctcgggcggagtcgggtcgggggcttggcaggccgcctggcgtacgcgcgccgcctcctcctcccggacggactccccggcccggcggagtctggcctcctttcgagcggcctcctcagcctggcgaacccggacggcctcctgggcagcctcctcggcttcccggaggcggtctgcggcttctcgccggtcagcttcccgcctccgggcctccgcggtcgccgtctcctcggcctcgagcccgccggacttggaatggcggggggggggcgacgggatctcgctgaggcagaagaaaaaccagaagacggaaagaaacgggtgagtgaaaactcgccttgggagatgggagaatgaatgcggtcgcgatgggcgcggggacaaacctgcggggaggtcggctaaacgaccacctcgggggcgagatgaggttcccccggcatggctcggtcccccccatcttgcggagccgtttcttctttcgctccccctcgggctgcggcgtcggcacagcaccctccgggcgcctgctgctggcacgcaccgccccgcccccttggggaggagatggggggggcgtgccctcctgcttcctctttccccgggcgtcggcagggcggctgccccccgggcccccgtcgcggggcccagaagcgtgaccccctcccggggtagattgtttccctctacggctcccgcccgcgccatcgtggcctcgggggacccgctcccccgacgccccgactgcctgcatgatggtcaggatgttggcgcgatccggatcgctgcagagggggaggacaccttgggggataagggatgcctccacggagctgagattcagcacccgttggaccaccatcctgaagtcctcagggacccagtcccatttgcgcccctggtgggtcctcatgaagtcctcgggcccggtgtactcccaggcaccccgggcgcgccgctggagcggcgcgatccggcgacgaaggtagtcgccgaaaaccatggcccccgtaagcccttgggatcacagacccgccaggcggtcaagaacggcgtcgtagctgtctcccagatctaccgtcgcccgccagctggaggcctgcgccgggggctggctcggaagtcggaggcgcgcttcgtcggcgaggggggtgtagaaccaattgctcttccagtcgtcccacttcttgcggaggacgcagggaatgtagcggtgcagcacctgcccccgcggctggaagtagcagccaccgaccaccgtcggcggcgacaccggctgtacagtgaagaaccaccggaacagccggagagatgggcgcaccccgatgaacatctcgcacaggtgcgcgaagatggccagcgtcattattgcgttgggggtgaggtgcgccatctggagatcataaaactccagaacatccatgaagaaattagagaatggcgggaccagcccggccattgcgaaagagaggaagaagacggaccgccccgggtagtgtggcgccaggcatccctcgcccagctcgaccacctcccggccggtggcagattccggcatgaatcggcgcggcagcccggcctgcctctcgctcacgatgcgggaaggcggcagcacgctaccatcaagcggtgcggagccccgtgccatgacgccggcggaggaggagcttgagagcgagcaagtgcggcgagggtagggcacaggaaacgaagagttagagcgcaagtggcgaaggcaaggggaatagtggcgagaggaaggaaacgaatcccttcctcggcgtctttattcccttgccagcgctatgtccggctcctcgcttcccgtgcccactaccttgccccctcgtttctcgcgcccacgcctccactaaccccactcgcccgtttgcggcgcacgcggcagatgtgcggccgtgacggttgagatggggcagatcgtgcgcgcattaactgcgttcgccaaccgagaagagcgccatcatcatgtctccaggcgaaacgaaccggcttgtcccgattcgcgcgctgctcgagtaatgcagcggtcttgaagagaccgctcattattgtcgatcggttttcccttgccgatgcgcgcgatttacgaccgctgggtttctgcccgcctgtagagaccggccccacctgtcaccaggcctaaggagtggcgtcacgcccgagcgcttccctcgaggggggcgatcgccctggcgtaacgccgggggctactgtcggtgacatgggaccgggggtatcgtgactagaggcttgggtaaccgcggtcgcccacgtggcctgaccccctcggggggggggggggttcgggcccgagggtgacgcggccacccctccctctgtctccccgaggggtcgggccgcacccgtttcggccccgagggctggggcgccccgaccccctgtggttttggcaccatgtgtgtgggttaggtgagcacagcaggcgctcacctaaccgcatttatagcgggttagacgagcgcgccacgctgcattcaatgcggcgcagcgcatgcttatccagtccgtgaccagtcgcggtgtgtgaccggtcacagaccggtcagatcgcgggttaggtggcaacaggcggcctgtcacacgcctcgccccgtcccgtcggaatgatgagagcttcctggctctcgtccctagccggagccggcgtgctaactcctggagttggtatgtcagtcccggtcagattcattccagacttcagcgcaagaatggcaaggaagtcgccggccattaaatgaagtttgaaatgggcgtcctccggaaaagctgacgagcggggcaggagacgtgcgcactgcttgtcaagggtcacttccggctgtagactagccctcattgtaaaaagcatgtttcctttcttaggcagctagaggcccctgtggtgacccctgaccagataaaaaggaggcccaggcctagaagaagggggattttcttgggggatttttgaggaggagcctgaactctctctggctctcgagctctctgtattccttcacatacagatccaccagaacacaggagtagggtattacgcttctcagcagcccgaacatgtctacgtcgcccgcgtcttgtgcgatccttctcgctgacattcctctgatcgagggcgaagaacctcacatagcgccctcggccgaaccggcaaaggggggcctgcgcggtcttccggtgaggggccccacgctccgtcatctggcgcgccaggtagggggcgcgcgtgtttttcgaagccctcgtcctctttcgtgtgcgccaagcttctcccgctcagcccaatggccgaacgggcagtggcgcacagcctctctccgaacgctagcggtgacgacggggagcagaacccgcgccgtcgggctcgcaccccaccgtccccctctcgccgaaatcttgggcggggggaggcgctcggggaggtcggaggatccgcgacatcgccgcccgcgggcgacgggggaggacggcgagacggggcgcgtcgccgcctcgactacggcgatggcagcacgccccagggcgcgctccaggctgcgggtgcgctcttgcgtcacccgcccgtcgtccccgatccagagactccagcccgacgttggctggatgacgtggccgacttggtcatgacggcgcagcagcgcctaggcgccggtgggcggccctccgcccccgaggcctctggcgctgccgccgccggctccacgtcgtcaaggcggagggcgcggcgagcggcggccgtcacccgccgttcgtccgccattccctcgtcaacgcctccgacccaagaagatgagcgtggggggtcggatgcccggctcgatatcgagcgccagcgcgacgatcgtcgcgccgcccacgcaacggagggcgctttctcgtccggagcgccacttcggtccgggcacgggggccggcccccgtgtccccggttggcggtgccggctgtcgagcctttgtggcgagccttcggaacgtccgttggcccccaaggttccggcccaccatcaccgaaaaatacgacggaagcgtcaaccccgccgagtttctccagatctacacgaccgggatcgaggccgccgggggtgacgacagggtcatggcgaatttcttccccatggccctgaagggtcaggcgcggggttggctaatgaacttgccacccgcgtcggtccactcctgggaggatttgtgccagcagttcaccacgaactttcagggcacatatccgcgcccaggcgaaaaagcggacttgcatgcggaacagcgagggtacgatgagtctcttcgctcgtacattcagcggttctgtcaagtccgcaacaccataccgtgcatccccgcacacgcggtgatctacgcgttcagggggggcgtgcggcacaaccgcatgctcgagaagatcgcctccaaggagccccagaccaccgcgcagctttttgagctcgcggaccgtgtggctcgcaaggaggaggcctggacctggaactcctccggctctggcgtggcagctccggccgcccccgagtccgccgctcggtcagggcggcgggacaggaggagaaagaagaagtcggcccgttccgacgacgagggtcatgtactcgccgtcgagggcgcttcgcgggccccccgaaaggggaggcctgcgagcgacaaaaagaaggaggccggcgctcccagcagggagcgcccgaccggcaagtggtgcaccgtgcacaacacctccctccacgacctcgcggactgccgcgcggtcaaaagtttggctgagcggacgaggaagtgggaggaggagaagaggcaggagcgccgtgagggcaaggccccagcggctcccgccggcaaccggcgaggtgaggccaagcagaaggcccccggcgaggatattgacgatggcgactatgacctggggttctaggagcctgaggccaccatcgccaccgtcgatgggggagcgtgcgctcacgcttctcgccgaagcctcaaggccatgaagcgagagcttctggccgcggcccctacccatgaggcgacgcggcgggcgtggtggtcggaggttgccctcaccttcgaccagaccgaccacccgccatgcgttgcccggggaggacagatcgcgatggtggtttcccccaccgtttgcaatgtgaagttggggtgtgtcctcatagacgggggtgcagccctcaacatcctttcccctgcagcctttgacgccatcaaggccccggggatggtgctccggccgtctcagccgatcatcggtgtgacgccggggcacacctggccgctgggtcatatcgacctcccggtcaccttcggtggctccgccaacttccgcatggagcgggtggacttcgatgtggcggacctcagtctgccctacaacgcggtcctggggaggcctgcattggtgaagttcatggcagcggtccactacgcttatctccagatgaagatgccgggccccggtggccccatcaccgtccatggcgacctcaaagtcgcacttgcttgtatggagcagcgcgcgtaccacctcgccgcggcgtccaagcccacgggtggcgacgaaaggctcggcacctccgtccccgccgccccgaggcagcggatggtcacgtgcgacgaggtcccggtcaaggaggttgccctgggcgacggcccgtccaagaccacacgaatcggtggtcttctggacgataaataggaagacgcgctcgtctccttcctgcgggcaaatgccgacgtcttcgcctggagaccggcggacatgcccggggtccccagggaggtgattgagcaccgtctcgccgtgcggccgggcgcaaggccggtccggcagaaagtgtggcggcaggccccggaacgtcaagccttcatccgcgaggaggtggcgcgacttctggaggccggattcatacgtgaggtcatccatccggagtggctggcgaacccggtcgtcgttcccaaggcgaacggcaagcttcggatgtgcatcgactacaccgaccttaacaagaatgcaggtcctacttttcaacgtactactcgaatttctttgggtagccaaataggacgtaatgttgaggcctatgttgatgacttggttgtgaagacgcgcaaccaagagaccttactctcggatctagcggaaactttcgaaagtctccgctccgcccgcataaagctgaaccccgacaagtgcgtgttcggcgtgcctgcgggcaagcttctcgggttcttggtctctgcccgaggcatcgaggccaaccccgagaagatacgagctatagagcggatgcgcccccccagcaagcttagggatgtgcaatacgtcaccggctacatggctaccctaagtcggttcatatcgaggctgggagagaaggcgctacccctatttaagctcctcaaacgctccgggccgtttacctggacggaggaggctgagcgggccttcactcagttgaaggcgtacctcagttctcccccagtcttggtcgtcccggagccagatgagccgttgctactctacctggcggcaaccccgcatgtggtcagcgcggcgttgatcgtggagcgcgacgaggacaaccctcactccgcgcatccccaccctgtgtcgactcgacccgggagagagcagggaagagaggcccccgagccgaacggcggcccgaggcccccgacggccggagctggccctccgcctgcttgtccgacggtgccaggcgcccccaacccccaggatggccccggggccactgcgggaaggccgcgcctgtcgccctctgaccccgaggtcgtcggcacagaagccgagtgcgccccgcgtggcctctcggacaaagagcgccctcgagatgcggcccctggcgaagaggatcggccccgccgaaaggtgcagcggcccgtctacttcgttagcgaggccctccgggacgccaagacccgataccctcaggcccagaagatgctctacgctattctgatggcttcgaggaagttgcgccattatttccaggcgcattgggtcacggtggttacgtcttaccccctcgggcaaatcttgcataaccgagagggtactggacgggtggtgagatgggcaatcgaactctctgaattcgatttgcgctttgaaccacgccgcgcgatcaagagccaggccctcgccgactttgtggcggagtggaccccagctcccgagcccgtctccgcccccgaggccacctcggactcctcgcagctgcctcacaccgcctactgggtgatgcagttcgacggctccctgtctcttcagggcgccggtgcgggggtcacgttgacctcaccgagcggagacgtcctcagatatctggtccgcctcgactttcgggcgaccaacaatatggcggagtacgagggactccttgcgggactcagagtggcagctggactggggatccgccgcctcctggtgttaggcgactcccagttggtcgttaaccaggtctgtaaggagtaccggtgctctgacccgcagatggacgcttacgtgcgccaggtgcggcgtatggagcgccatttcgacgggatagagcttcggcacgtgcccagatgggataacgcggtcgccgacgaactctcaaggctcgcttcctcgcgagcccagaccccaccgggcgcctttgaagaaaggcttgcccagccgtcggcgcgacccgaccccctaggggagacggacgcgcctgaacggcccccgaggcccgtcggagtccaggcctcgggacccgaggggagcgctcccaactcccctagattgattgcttggatcactgagatccaggcatacctcgcagataagactctacccgaataccgcgaagggggtgaacgcgtccggcgcatctccaagcgctacgtgctggtggaagggaccctctatcggcgcgcggctaacgaagtcctcctgaagtgcattcctcgggaacaaggcgtcgagcttctcgccgatgtccatgaaggcgagtgcggagcccactccgcctcacgcaccttggttggcaatgcctttcgccagggtttctattggccgacggctctcaacgatgcggtcgacctggtccggcggtgcagggcgtgccagttccacgccaggcaaacccatcagccggcccaggccctgcagaccatacctctttcatggccgtttgctgtctgggggctcgatatcctgggtccgttcaggagggccccgggcgggttcgagtatctgtatgtcgctgtcgacaagttcactaagtggcccgaggcttatccggtcatcaagatcgataggcactccgtgcttaaattcataaggggcatcactgctcggttcggggtgcctaaccgtatcattacggataacggcacccagttcactagtgagctcttcggtgactactgcgaagacatgggcatcaagctctgcttcgcctcccccgcccaccccagaagcaatggccaagtggagcgcgccaacgcggaaatcctcaagggtctcaaaaccaagaccttcaacatcctcaggaagcacggcgactcgtggatcgagaagctgccagcggtactctgggcgaaccgaaccacgccaagccgagcaaccagggaaacgcctttcttcctcgtctacggcgcggaggcggtcctcccatctaagctcaccctgaggtcccctcgggtatccatgtattgcgaggctgatcaagatcagcttcgccgagacgacctcgactatttggaggagcgaaggcggcgcgcggccctccgagctgcacgctaccagcagagcctgcggcgctaccatcagcgccacgtccgggcccgatcactctgcgtcgacgacctcgtcctacgccgcgtccaaacgcgtgctggactgagcaagctctcaccaatgtgggagggtccgtatcgagtgattggcgtcccccggccgggctccgttcggctggccacgggcgacggcacagagctgcctaacccgtggaacatcgaacaccttcgtcgcttctacccctagggggggtcgggtgtcatgtcttgggctcgggccaaccccgcacccctcttgggcgtgcagggttggccgggggctaccacatgcatatacttaccttttttctcttccgtatttcaataaaagcactttcgattccctgaggactgtgtctgtgccatcgttttccttttgaagaatcttggcttgaattagcacgctcgtgctcgaccctgccctcggtggcccgggccggctaaaatcgccaaacggggcccagaaccgagccgtgccccggggcgtggtgaactccggggggggggggaatcggcaaaggcccacaatcgggtcatccataaccctcggtcaccacgctcccggcctggccagtctcgacacgtggatctcctcaggcactagccccgacccgcgccgcttgaggctggggcctgggcacgagccctcgttcaagccaagacacagaaggaccgcggcacagaccaacctcgtctcatacatacaacaaacagaactgacgtagaaattccctctttatttgattacagattaaatcagtctatacaagaagggggcccgaaggcctcggaaaaagaagaaaaagttattaagattggcgggggcctggggctcactccgacgcgcccgggtcgccggcctcgtcgtcgttgtcgttcgcaccgtcgtcaccgccctcctcgtcggagtcgagggcgaacgcgagccgaggggccgtaccctcgaagctgtggacgatgtggtcggcggcgtcccggacctgcgcgcgcgcgccgtcctcggttccgggagggaacttgtccagcgctgcccacggggagaagtcagggtccctggcctggtagcttgccagtacgagctccaccgccccccgggcaaggtccctcgaggatgacttgatcgtctcttcgagctcctcggggagccgctggagggtcccggccatctctgagaggcgctgggcgacgcccccctggttggcggtgaacttcacggtccgctcgccccagaggcccacctgccgcccggcgcggtctagacgggagacggcgtcccgaagcatgccgggccctacctcgttcgccaagcggagggcctcgacctccccggcggacgagtccagcgcgccctgcatctcggcgatggtgtgttcggcggctgcgaggcgggcgactaggtcgccgtggcccgcggccgccccaccgctgtgcgctctcgcgtccagctccttcgcccgcgcctcgagctcagcagcccgctgatccagcgcggccctctcggcgcgggcgccttccagattgcggcgagcctactcctcccgcgccgcttcgcgaaggaacaggctgtccgccagccgctgcgccgcggcctcggcttcctcgagagctcgcccccgctcggtgagcacgtcctcgcggaggcggagcgcggactcctcttcggcgcaggcggcctcgtgcgccgccagtgttgcctcccgggtggcgacagcggcctcgcggtctgccaggtccttctccttcgtgtccagggcgcgggcgcgctcctccagcgccgtggcgcgagcctcaagggcctcttcgcgctgccgggacgccgcctcgatctccgccgcccgccgttcccgggcagcggcggcgtcaaggactccccgggtggcgtcgagcttcttctctagctccgccgcccggctcccgtattggaggcagaggtcgtcccgcacctcctcaagtacggcggtggcgatgagggcagtctcccgctcctcctccacctccctggcgatctccgccaggtccctacgacgggcctcgagctcggaggcgtgccggcggtgtgccttgcggcccgcctccaccatggcctccaccgagcgtcgcccctcctcgacgcgcgcccacgccgcgtcgagctccgcccgctccgcctgcagggcctccatccgggcgcttaacccgtccagcaccgtgctgttcacggcgactaaggcctgcaggaggggctccgcgctcagtggggcagcggaagacagaggggagagccgcctcggtgtgggtgccgcgcggctcggcccgccgatcgacgtgccggacccgggggcgtcccccgaagctggctcgtcccaagcatcgcccgaggggtcgggcccgagcggcgcgtccgcggcctcgtcgtgggtggcctcggaagtcgtcgtcgcctcgggcggagtcgggtcgggggcttggcaggccgcctggcgtacgcgcgccgcctcctcctcccggacggactccccggcccggcggagtctggcctcctttcgagcggcctcctcagcctggcgaacccggacggcctcctgggcagcctcctcggcttcccggaggcggtctgcggcttctcgccggtcagcttcccgcctccgggcctccgcggtcgccgtctcctcggcctcgagcccgccggacttggaatggcgggggggggggcgacgggatctcgctgaggcagaagaaaaaccagaagacggaaagaaacgggtgagtgaaaactcgccttgggagatgggagaatgaatgcggtcgcgatgggcgcggggacaaacctgcggggaggtcggctaaacgaccacctcgggggcgagatgaggttcccccggcatggctcggtcccccccatcttgcggagccgtttcttctttcgctccccctcgggctgcggcgtcggcacagcaccctccgggcgcctgctgctggcacgcaccgccccgcccccttggggaggagatggggggggcgtgccctcctgcttcctctttccccgggcgtcggcagggcggctgccccccgggcccccgtcgcggggcccagaagcgtgaccccctcccggggtagattgtttccctctacggctcccgcccgcgccatcgtggcctcgggggacccgctcccccgacgccccgactgcctgcatgatggtcaggatgttggcgcgatccggatcgctgcagagggggaggacaccttgggggataagggatgcctccacggagctgagattcagcacccgttggaccaccatcctgaagtcctcagggacccagtcccatttgcgcccctggtgggtcctcatgaagtcctcgggcccggtgtactcccaggcaccccgggcgcgccgctggagcggcgcgatccggcgacgaaggtagtcgccgaaaaccatggcccccgtaagcccttgggatcacagacccgccaggcggtcaagaacggcgtcgtagctgtctcccagatctaccgtcgcccgccagctggaggcctgcgccgggggctggctcggaagtcggaggcgcgcttcgtcggcgaggggggtgtagaaccaattgctcttccagtcgtcccacttcttgcggaggacgcagggaatgtagcggtgcagcacctgcccccgcggctggaagtagcagccaccgaccaccgtcggcggcgacaccggctgtacagtgaagaaccaccggaacagccggagagatgggcgcaccccgatgaacatctcgcacaggtgcgcgaagatggccagcgtcattattgcgttgggggtgaggtgcgccatctggagatcataaaactccagaacatccatgaagaaattagagaatggcgggaccagcccggccattgcgaaagagaggaagaagacggaccgccccgggtagtgtggcgccaggcatccctcgcccagctcgaccacctcccggccggtggcagattccggcatgaatcggcgcggcagcccggcctgcctctcgctcacgatgcgggaaggcggcagcacgctaccatcaagcggtgcggagccccgtgccatgacgccggcggaggaggagcttgagagcgagcaagtgcggcgagggtagggcacaggaaacgaagagttagagcgcaagtggcgaaggcaaggggaatagtggcgagaggaaggaaacgaatcccttcctcggcgtctttattcccttgccagcgctatgtccggctcctcgcttcccgtgcccactaccttgccccctcgtttctcgcgcccacgcctccactaaccccactcgcccgtttgcggcgcacgcggcagatgtgcggccgtgacggttgagatggggcagatcgtgcgcgcattaactgcgttcgccaaccgagaagagcgccatcatcatgtctccaggcgaaacgaaccggcttgtcccgattcgcgcgctgctcgagtaatgcagcggtcttgaagagaccgctcattattgtcgatcggttttcccttgccgatgcgcgcgatttacgaccgctgggtttctgcccgcctgtagagaccggccccacctgtcaccaggcctaaggagtggcgtcacgcccgagcgcttccctcgaggggggcgatcgccctggcgtaacgccgggggctactgtcggtgacatgggaccgggggtatcgtgactagaggcttgggtaaccgcggtcgcccacgtggcctgaccccctcggggggggggggggttcgggcccgagggtgacgcggccacccctccctctgtctccccgaggggtcgggccgcacccgtttcggccccgagggctggggcgccccgaccccctgtggttttggcaccatgtgtgtgggttaggtgagcacagcaggcgctcacctaaccgcatttatagcgggttagacgagcgcgccacgctgcattcaatgcggcgcagcgcatgcttatccagtccgtgaccagtcgcggtgtgtgaccggtcacagaccggtcagatcgcgggttaggtggcaacaggcggcctgtcacacgcctcgccccgtcccgtcggaatgatgagagcttcctggctctcgtccctagccggagccggcgtgctaactcctggagttggtatgtcagtcccggtcagattcattccagacttcagcgcaagaatggcaaggaagtcgccggccattaaatgaagtttgaaatgggcgtcctccggaaaagctgacgagcggggcaggagacgtgcgcactgcttgtcaagggtcacttccggctgtagactagccctcattgtaaaaagcatgtttcctttcttaggcagctagaggcccctgtggtgacccctgaccagataaaaaggaggcccaggcctagaagaagggggattttcttgggggatttttgaggaggagcctgaactctctctggctctcgagctctctgtattccttcacatacagatccaccagaacacaggagtagggtattacgcttctcagcggcccgaacctgtctacgtcgcccgcgtcttgtgcgatccttctcgctgacattcctcagatcgagggcgaagaacctcacatagcgcccccggccgaaccggcaaaggggggcctacgcggtctcccggtgaggggccccacgctccgtcaggcccagagaggtccatgtgtagaagttccaacggtcttgtagttgtcattacgttcttgaccgggtgatgagctccaatttgtttcccggcttaacacgcgctacacaccctatctttctcaaaaggtacatttgttagaccaagtatatgatcgtgctttagaagctagtgaagattcctcataccaatatgggctagcctccgatgccaaagccaccccatgtcggacttagccactaagcatgtctcatgtttggctttagttgaggaaaaatccacaagataaagcttgcccttgagaacacccttaaagactatcgaggagtcatcccttctaaatacggtcacatcaacatcggtaaaaagacaattgtagcccatggaacataattgagaaacggacaagagattatagtttagagattttaccaagagaacgttagaaatggaaagatcattggagattgcaatcttacccaatcccattacttttccctttccatcgtccccaaagactatgttctcttgcgaagtgccatttggatcaagggagcaaaacattgattcttctccggtcatgtgatttgtgcatccactatcaatcacccaacttcttccaccggagagatattcctacaagagatcaatttctagttttaggtacccacacttgcttgggtcctctcaagttagtgacaagtgccttcggcacccaaagaactctcttgatggaaacatttttgcccctcgggcctacatacttagcaacaacacgaccactaacattcttcttaagaacataagatgcatcaaaagaacaatgtgaagcataatcattaggaaggatacttttggccttaacaaaattgctaagaccttggggtctcttgatcatcacactcttgtccacctttccttttggtggaggaacatacccaagaccctcatggttgaagttgtccctttgataggctaggtactcttttagagccttactacccatatggcacttaagtaggccattgtgaaggagtcccataaacttctcattttgcttttgcaaagcactcaaagaaatagagttagtagcacaagcttcaataacaatatctttgcatctcacacatgattcattgcttgggacaattttggaacaagacggctcgctagggagagagacactattctttaaggtttcgaacttctcttcaagagagaggtatgctttgtccaagccatccactctctcttgaagttgagcgttcgccacttcaagattagcatgagactctttggtttgcttgtagagccgtaccaaagcctcatttttctctctccttggcaagctcactcttgagttcatgagatcgctctttctcacgaatgagcaaatcctcttgcctctcaagagttgcatattggtcctcaattctccctagcaactcactcaagtgtggtagtgattccttagttatggacttggacaattcgtcatccataacctcatcctcctcatcactaacaagatcaacattaaatgatttgagaggagaaggtaccttaggctcctttgccatgaggcaaatgggagcatcctcatcacttgagtagtcgaagagtctcagcggtgatgaaggcttgacggcgaacgtggcgactccttcttcatcacttgagcttgactcggagtcggagccgaagatcatcccaaggtgagcttggcaataatgttcccgcttgttatgcttatacttctccttcttctcatccttcttctcacccttcttatcttccttgatgtgggaaccatccttgaggtgagggcaatccgcaatgaaatgcccgggctctttgcacacatagcacactcttgcggaatgtcttccacttgacttgttggagtgatgcttggaagaatttcccttgaagaagccgcttcgcctcatgaacttgccgaacttcttggggcattgagagtttcgattcaatgtgggaatgactaagacaagttaggcgaaacagatatgcaccatagaggtttatccaccgtaggtttgtagacaagaatagtagtcacagcgagggatgcacataaataagaaaatacaaaaaacctttccatacattttaggcacagaaaacctgctttcaaaaaagatgaataaagtgttaactagcacaatctatcctcctacgtagacagtttgccagcagatgcagttggattctaaaacttctgcagtactctgggtgcttctgctggaccttggtgctagcatgcacatgaaatgacacctaatgcaatatttgaatacatgagaaggcaaatgagtgctgccaaagtccatggcaaatgtcacttcttggttgcgtagctggacacttgatccatatataagacaaatacatactcaaacttaaaaagaaaaggttaagcaagagcattgctacattatgataaaggtacacatcagtcacagaaacatcagagctttagggcatcgcatacctgcaaaggaaaaagactctctccaggaatagtctcatcaaatgcctgaaatcatcagagttgtgtcacttattttatattctcaaaggtacaggcaaaataaaatacatagtactattactatattagtgaaagcaataccgttccatcaatatcttcttccctcaaacgcatgacatattcaagaagttttccaccattcatgtgctcagtatcattttccttctgcttctgagccatcctagtcttgagttccttcgcgagatcattttgtgcaccattgtattgaagctcttcaccagtagtggatgttgaagcttcagccccatgatctcctcgcttcttaggtgggaataaatcatcaaaggaggcatctccaggtgtgcctatccttgtttttgttgcatctgttcccctttatctttggatgtaagtgttgctattatcattatgcttctatagctatagccttacatgaacaaatttatgaagaaaattttggagttccatcaatgtatacttatttttatacacccaacaagcttctatttaaatgtttagctacatgttcctatggatgccctgatgcccaaaatttaatgaaaaatgataccgttccttcttctgtggttagtggtcacatctataatctattgtacttgaaattaaatggttcttgatatctgaaatgtatatacgttcgcaagaaaattgtattgctgcgaattctaagttctgccactttacgcagaatctgaatcacaaaaatattgtgaagtatcttggatcattgaagacaaggagtcacctccatatcattctagagtaagcagttcgcaatcctcatgacagtttcttgatatgattatacctattaggctattagtttttttttttagcttggatgcttaatcttagtaaacaaggtagcaacacgttttccttttagttttgttctactggaaatgctctttagataattgagttccaagtaatttgacaatatatggtgctgcattctcaaaatagttagtaaacataagctaaagtcaatttcccactgtattagcaatgacgtgcacaaagctaggtttttccgaattcaagcaaaacaaaacaattcgaggacaaatgtagaaaggagaactaataatatgcccccactcagccagaacaactcggttaacgaacaattacatttagtgcataactaatcctaatatgagcttcctcttgtattttgcatggctttagtttagcaacattttgcattttgtatgtggcactttacaagttgtgactttaaatatatttgaagtttgggttttttgctggtttgtttagggagaagcatgtcacgtgttgtgattggttgaggtatactatgtcatcatacatcttaagttattttgttcatttatttagggcaagctgtaatagttgtgcaattaatatttttgcaccgaataaataattgttcaattcctttgtacccctttttgaagtttggttatcatgttctctgttctgtatggattgattttgtgtagctctagcttaggcttattatgccataagccaactttttggttttatggattgttgaccgtcaaagggagcttagtcttattctaaaagtgcaatgaccggattgtttaagttcagcctatacacccctgcaatctcacatctgcaacaatccaccctgccctgaattaagagtccacaatatgcaaggggatttaggggcttttggcttgtcagaggctataatcatgaataagttaactaatctgttctaggataagcttttatcttcatcatcgatctcctccttgctcttgctcttgcggctctcttcttcttcttcctttgccttcaatgccaagtcttccttcttgatgcttgtcattgagccttggttgatgtattggatgacctccttggactcttgcacaagcatgtcacgggcaagaatgcgtccgagcaaatcatgaggtgtgagagtcttgtagtccggacgctcacgaatgatggtaaccaaggtagagttccttgaagtgatggctcgaaccatcttcttgaccacaacctcatcggtcatgtccttggagccaagtcccttgatctcattgacgatcttgctcaaccggtcatacatgtcacttcggctctcaccatccaacatcacaaatctctcaaattgccccttgaggatctccaccttggactcacgaacactatccgtgccttcatgcaagttccgaagcgtgtcccaaatcactttggcactctcaatgccatccacacggttgaactcacttccactcaaggcactaagtattgcattggcggcttgagcgttcttgtgctcgttctcatcgtcctccttggtgggatcttcgggattctgcaaaacatagccttttttgactattctccaaatagatgggttaataaacttcaaatgcatcttcatcttatgcttccaagcggcatagtccgtaccattgaaatacggagctttgccgctataggtactcacataaaatgtagatgtagttggatagtcataaggaaacataactcccttatcaccatctttgccttcccccgtttggcccgacatgatctctccaagtggttaagcctaattaggagattaggctctgataccaattgaaagggtcaattaggcctagaggggggtgaataggctaatttaaaactttatgcggaagctaaaactgagttagggtcggaaagtctgatccacagtcagactatccgaaaatatcaaatagtctgatgttggatcagactgtctgatccactaaaggaacactacaagtagatctagtgcacaaacaagagtatggcgcaaacagcgactagatctaaagcggcacaaaagcaaagctaaataataggagaagagatatcaccaacaatgaagttcaccgagttgttcccggagttcaaatccttaaggggattctactctccgttgaggagctcactaagagccgggtctttgctaaccctttcctcaagaggttgcactaagcactcctccttccactaaggggtatctctttccttgtggaggcgagatccggccttcacaaacttctcccggccaaccacacgtagatcggtggctcgggagtgacacctagccgtttaggagtcctcaacctccaagagtaacaaacaccacacaactcttggtcaaaccctagtgctcaagatcgagtgaaacacacactaggccctcaaacaccaaatccacaaccaccaagatctactacacaaagaacaaagagggatttgagagagggagagagagctcaaagatccaaaacactttagcaccaagctcaacccaaagtgaatgtgaatgaatgagttgggtaaccctagaaaagggttaggtggggggtatttatagaagcccctaaaatgtggccgttgggagagaatcttttcatcccacctcggaaagtccgaggtgacatcggatagtccgatgtttttgacccccaagcaggccagagacagagaacgaaattctggaggatttcggacaatccgatcgatcggaaagtccgatgtcatatcggatattccgttatttttgaaccaagaatttcatcctctcacagagactcaagttccattgaatttcggagtctctggatcatcggatactccgatcacatcggatagtctgatttaaaactcactcaaaaggaataaaaagcaattcaaaatagagaatgaagttctgagaaatttcagatagtccgacgtatcggatagtccgaccttatatcggatagtccgatattttttagccaacactcagaccgaagacagtgagcaaagttctgtgaaatttcggatagtctgagcatcggatagtctgatcaacatccgatagtccgacagacataaaacaggaacacttcaaataaatgattttgagcactagtgttctaccaattatatgcatgtggcatccctcttaatagtacggcatcctaatactcaagaacacaagatatacatggattagaagacaattaccacaaaagatgccgcaatacttattgtgttgacatccactcctttttcatccttgcatacatctcaacaaaaagcattagttaccctctaattgtgttgtcattaacaccaaaataaatgaggggtcctagatgcactttcagtcgcctgcctgcctaccgccgcttgtctagctcccgcccctgcaaaccgatgaagggaagagatagattgatgatgacatgtgggccccacatgtcagtgggtcccacaatatatttttttttcttgtgaatgacagatgggtcccacatatattggtttaattcgaatgccacgtgggacgaagaccgggtcaattttgccacgtcagcgccacgtcagcaaaaccactctccaaaaccgccaagggagtcaaattgcaccggttacaatagttgggggagtcgtcctacccggttttccagttgaggggtacgaattagattttacctatatttaagggagtcaaagtggactttttccaaactcgtaggtaccctccccttctctcatctctattacggtacgctgtagcttaaaagcggtgtcgtactccttttaagtccaccgaaattcctgatcgagtgcatttttcgtataaagggtaccgtttctgactgtactatttttaaattttgttttttttctaatttctttctaaattgtattaatatcggcactgagtagtttaaataataaatatggtcaattattagccgatcaagcgtcgtttccgaagagaagccattgattctgaccgttttcacccatgcttccaacctcctcacaccacgtgcagcacacctacacatgtactccctccattcgaaaataaacgaatctagtacatacatctgttcagattcataatatttggatgtgttacatccattgctatgttaatttttattgggatggagggagtataacataggtataacgattttgctatatatttgttgataatatttttttctaaaaacttgataatgtaaatatagcataatcatagtgtaattatattgtaacttgttgtaactacaaattagttttaaaccgttcgatttgctttaaaatttgtgcaatggaggtaggaaaaaatcacaacccacgcatatgtgaggtgattcggtacaattacctccgttttcactgaattttcatgtcgcctaaggatttttaaaagttacgtataagttaaactatagactatagttatatgtaagtcacactgtaattacatcacgattatactataattacatctgtcaaattttttagttaaaatttgacaacaaatgtagagctaatccctatatacatagccaccatatatattcaatgttttattttctaatcacatttatagtttatccctacttgcatgagactggtctattacaatgtaagataatgttatttgtagtatacttatcccctcatcacacttagatgcgttctacagatgggcaaagagctgaaaagtcactcttttttcgcacaaacacatcctaaactactgaacgaggatttttttaagaaaatctacataaaaattgttttaaaaattacagtaatctacttttaaaatttaaaataactataaacatgtccgtgcgttgcaattaggggtggatgtcgagctggctcggctcggtctcgttatcctaacgagctagaaacctagcttggctcggctcgtctgcaagctcgagctagctcgtttagctcgcgagctttggggacaatagagaaattagccggtgacctcagggagaagctcaacctcaccggcgccgtgaccacggggagagcttgccggcgaccacagggatgagcttgctggtgaccacgagaggagctcaacagtggattggacgagctcgacctcgccggcactgcaaccatggggaggagcttgacggtgaaggaaacgagctcgagatcgtcggcgaccacgggaagaagctcgacggtggatgggacgagctcgacctccgccggcacttggaccgtgaggaggaatgctgggggcgagcggcggcgtcgggcgcagcgggcgggcggcgacgtcgagcgctgaggccgtcgggcgctgcaggcgggcggcgacgtcgagcgctggttccgtcgggcgttgcgggcggacggcgacgtcgagactcgagcgctggggagagcggcgcgagcggctggagcatcccacgcgaaacgcgacgcgaacgcgatgtttgtggcggcggagcgatggagtgaggagagaatagatcaaagactcgagagacatcatcagtattagggtttgctctaatctgatgggcctactgggcttgtgggctttgtagggtgcctgctgctgctggttacaaaagctcgttacggctcgcgagcgtctcgttatctcagcgtctcgttatctctaatgagctgaaaggctagctcggctcgttagaaaaataaaatgagccgaaccaagtcaagccgagcttgtcacgagtcgagcaagctaacgagtcatgagcttttcgtccacccctagttgcaataggtaaaggctatttcaatcatattattattagttttttaatgtaaaaaatagtatattggatttttattttgatagtattgatatctaatttgaattttttatggggatgatggccatatcctatacattgttttcttatgatttggcaagaattctaaaggaaataggagtccgactctcgtcccaaattaacatgaaagttttttaaaaagatttcttatatgacttcttacgtattttcaaaaggtgaacaaacttaaaaactgactcaaatacgaacaacgtatcaaaatatcagcgaaaacattttcaacttttataatagtagagattaatactccattaatcatatgctagttttgcatatcttttctttttctcctctcaaacgtatgataggatatggtgtaccctgttctttctacttggttacgtcaatttcttttttgatggatggagtacagctcaataatccgtagttcctccaatttcaccagttcgactatccacgccatatcctcttccagtaaaaaaaaaaaaaacaatcttcttccagtaaagctgggcgcaatgcttttttcttaaaaaaaaaagagaaaaaaaaaagaagtggctgatgcaagtatgcaacccaagtcgcgaaaccgcgtgctactcttgctaaacggtttcagcccggattccgtgggcaccaccaccactcgccggcagatgccgtcacccatggcaaaatcgtgtcgacatatatgacctgggcacccccacttgccgacagatgggccccactccactgcggggcccgcaccctcgcatgcccgcctcacgattggccggcgggtataaaaggcggtgaagtgagtggcgtgtgcgctctctctctctctctctcctactgtaggccaccaccaccgcgaccgcacgagtcaacctcacggcagccaagcgtttggttggggggatcggagcggcggcggcggcgatgcagtcgctgcaggacaaggcgtcggagtggagcggcgtggcggcgggggatgcgttcgccatcgacgatgggaacgtcttcgaggcgctgggcggcaccacgcagccgttcgtcgacctctccaccaacttctacaccaggtctcgcttgctttcgctcgctcgccgccgatctggttcgttcttcttgctcgcgatttcgggggctctgattcttgggggagtcaacagggtttatgaggacgaggaggagtggttccggcagatcttcgcggggtcgaagaaggaggacgcgatccggaaccagtacgagttcttggtgcagcgcatgggcggcccgcagctcttctcccagaggagaggtaactaacttgatttcactctgcttctctctcccactcgaaagctcagctcgtacttttgcacatgtggtggcgatgctcggatgtctcaactctcaagagggactgatggttgggtgcatcagctagtcgttggctgtggaggaaagagttgagatatgaggaaaattatcgttttacttgttgagaaaagttaacccagatttagttacaagctaatagccaagttccgcaacaattccactagttacaagctaatagccaagttccgcaacaattccgcaacatattttcttgggtacagttggtagaatttagctcactatgatttacatttcttgttctccttttactttagtatcattgctttttcatagtacttgccgttgccggaggtgaatctcagattcagtacagtgatttttttttttgagcaagagagcagaccctgtataaagatcttcattgttctgtaatccaattgtataccagcactgatcagtgatcaccagtgaattttcttctgatctcattcttttaccacatccatatgatcagcaattcagcattcaacaacatctagctgggagctcataatggtttagtgagatgttcactcttcaattggctctgctgatttatcaccaatctgccagttgatctatattggcgcaagaattgtgtgatgatgcccaataatatgtgcttgtacttagtgtttcgcgtaacttgcccttgagtaaattttggatgtgttctctgattttcctctgttacgaaccaatagcagctagatcactctgtcactgtgcacatcagcacatgtatcaaatacaaccgcctgaataacttgttgacctaaaatctgcctatttgatttttctttgtaggacatcctgccctgatagcacggcatcgaccattccctgttacccaccaggctgcagagcgatggctgcaccatatgcagcaagctgtggatactactgacagcatagacgctgccacaaaaaccaaaatgatgtattttttcaggtctgtgctacagctgaattcttgcaagcttacacattttgtcctaggatcttaatactgctctcttcctccaggcacactgcatacttccttgttgccggaaatgagatgacaaggcaaggccatggaacttcctgcaagtgcaaacatggagaaagcaaaccagcagaataacgatcgattcatgcctctggccagtaaggcatctggataataaacgattcgagcctttagcagcctatcctggtgttatagaaaaaaaaaaccatggacgatggaattcagaccatctattcattcacaaaaacagttgagctaactgttgtaggcttacagccactctcgaacacggagcaacccaaaattgatagaacctgcctctggaggaagttgcaaacttgcaatagttatatcatactctctatattgaacaacggatgtgttattttgcgtctggctataggctatagcatgtgtctacagacaggggggagagagcaaggtcctctgtttgaagagtttctagcaattgaagagaaactttagctccttcaaacagtacatatcattatttagattcttaataattatggaatctagaaaataaactaggaaccaacatctttagatctcagaagcttaaatttctttagagaccaatcagttacttctccgaaccttaaatttcttcaaataaggtctgagaagggaagccttggctgaagtttctcttatataaccgcactatcgttggtcccaccctcttgtagagttgtaggcttgcacattagtgcctgactgcctgtaatagcacttattatgatataggatgtgaacaacaatcattatcacattcgatgtgaacttggaagcctcgcataacgtaacggagtcggtttgggtgacattgcctagctatgtcacaacatgacattgggtaaatctggaccatcataaacaaatccaacggatatgccgcctgggcgcctgggtccacctgcaggtgcaaaataatacccaatccatccattccagcgcgtgacggcatcccagatccatccatcgcgcacgcgcttcgccagtttgcctcccgtcaccgcgagccagctgggagactcgccgccgccgccgtgaccggagaccgccgcgagtggggagatgaccgggcgagcaccgcgcgaggcgtccgcgctcgcctcgcccgcgtccagccgtcgccgcgagccagctgggaggctcgccgccgccgtgaccggagatcgactcgccacgcccgcgtccggctttctggccggggccctgtcgtcccgccgcggcaagggaggcgccaggccgccctgccctgccaccgcgaccgagggcgcgtggaggcggccggggaggcgctaggccgccctgccctgccgctgcgaccgggggcgcgtgaggcgccggccaccgggcctgacgacgcgctggtgcaggcaggcggcctcccagcccgagcacggcacatggaggaggctgtgtcgtttgtggagaatgcttcaaattttccagtgcccgcaaggtgtttgtggaaatgcccctgaggctgtgtggttctctattgtgaaatgcaaccgtcagggctaccgctgggaagcctggtcctgccctgcctcctgggatgatacagagtcctaattggaagtgaattgttattgttggcattgtgagattgggcaaattgaatctgtaatcttgatttttgtcatcaaggaaaaggtgccatcggtagcacttaggcaaattgattgagattgatttggatgtatgactcatgatgctgtaattctaaaggtagctaacaaattttgagatgtgtcattgtgaaatcttaaagagatattgtgcagctaacaaatttttgagatgttgcccaggtccatggttctggacttatgtattgtctggtttatactggacatgatatatatactccctcaattttttaatagatgacgccg

SEQ ID NO: 4854 - DNA, 24221 bp, Oryza sativa
cggcccaagtccctgaagaggccgccggagcggtggaagcggcgtgggcgcggcagcggggacggcgtgtgaaggccgagggttgtcggccccttccgtcccgacggcggcggcgacagcgctggacatcgtggaggcacaactccgcgcgcttccgctcggcgggcgcggcgacggcgctggacgtcgtggacgaagacgacgaccccaaggtgcggctggcgcgcgtggagtggaagctgaggctggacggggcgacgaacgagctggaggacctcgtgggggagatggaggaggccgtcgaggcggagaagaaggcgcggtgctgggcgccgtggcggcagcggtgcaggggggcggcggaggtggtggccgggtggctgcggtccgaccctaggatcaaggtcaggttggagcttgacgtgggaaggctcacagtcaccggcgtgtacgtccaaggcggagagctcttggttcttggatgatgtgactagcgacggtgaaggaatagctgcattccagtgaagcgatggctgcgctcgacgccaaccggtcgccatgacaaccaaaacaaccgaaccgagggttacccgacgacgacggacgcgtcgtcctcgccgtcgccgctcgccacggaagtgactatgctagcgaggagaacttagatgacatgtaagtagcgaaattaatttcgcatcgcagagcatatgcatcgtaatttcgtcgctcgctgactcgcttgccatgcattgtaattaaccaaaccttaaactcttgtttgcatgggcctcaaatcaatcccgaattatccagcccggaatgagggccatcccgagaggatgacacgtgggtcccacacatatttattttaaaaggaaaaagtacgaattaccccacgaacaatcgcggtcgtccaaattatccccctgaaccacaaaaccggatattcttcacccccaactatgcaaaccggacgaattacccccctcgaaccaattcagagtagttttgtccaacgtggcgcacatgtggcaatccagtcagcatttttgtaataaaaaattgtgggacccgcctgccatactcttcttcctctctctctattctctctctcgctcttttctctcgcggctcgcgcagcgcgcacgacgaggacggcgcggggacgggcggtcagtgtgggcggtcggcgacggcggaggcagcgagcgcggcggaggaggcagcgagcacggggaagcgaggcggcggggcagggtagcggtggcggaggaggcgagcggcggcggggtgcggcgaaggaggcagcggcagcggcgaggcgagcacggcggcggaggcggcgaggcgagcgcggcggcggagccagcgagcgcggggaggcgagcgacggggcagggcggcgaggcagggcattggaggaggcgagcggcagcgggagctcgcattgctggaggcgaggcggcggcggtggggtgcggcgaaggaggcgagcgcggcagcagaggaggcgatcgtggcagcggaggaggcgaggcggcgcgcggacggggctcgaggcgacggcggcgacgggtgacggacgacagcgcatggcgcgggcggggctcgaggggagatggcgacggcacgcggcgcgagcgacgacgacaggcgacacgattggtcccatctgttcctccgcttcgttgcgggcgccgtcgtgggctggggctggttgtcgcgcatggcgtcagccgcctcgccgccgccgtaccccgccaccactcgcctcctcctccaccgccgccctgccccaccactcacctcccggcgctcgctgcctccgctgccacctcgcctcgccgccgcgcttgctgcctccgccgtcgccgaccgcccatgccgaccacccgtccccgcgccgtcctcgccgtgcgcgctgcgcgagccacgagagaaaagagcgagcgagagagagaatagagagagagagaaagaagagtatggcaggcgggtcccataatttttttattaccaaaacgttgactggattgctacgtgtgcgtcacgttggacaaaaccactctgaattggttcgaggggggtaattcgtccggtttgtatagttaggggtgaagaatgtccggttttgtggttcggggggtaattcggacgaccgttattgttcagtggtgtaattcatagtttttccattttaaaattctaatgccacgcggaacaaagaccatgtcaaaaccgccacgtagacgccacgtcatcgaaaccgccctttaaaaccgtaaagagagtcaaattgtaccggttttaatagttggtggtcgagatatccggtattgtggtttaggatacgaatcagaaataatccgtccgcatccgcactggcttcgaatccacttagaaaatatagtatagaatatcgtatgacaactatccatccgaatctgatctgttttcatccctctagacttctatcttgtttttatttccacgtccgccactgattgactataaagcgaaccaacctgatttgtgcccagtgaccatatgctgatgcaggctataaactttctgcggttcattcacggaatttccaaaccttcctgatgaagcatctcttggtgggggagcacgaatcgcaaagcactacttcctccgtcccataaaaaactaatctagtatcagatatgacacatcctagtattacgaatctaaatatacatatgttcagatttattatattagaatatgtcacattcggtgataggttcgttttttaaaggacggagggagtagaggagtaaccgccaagtttcctgggcttggtgggccggtcgccaacagtttgtttgaacccagtatcctttccgtggcaaccaagttcccgtgagcccatcctcagccacccgattcccccatacaactcaaatcaacggcccaaaaacaacggaaccacccctcccggaaccttccagaacaccctatagcctcttgaaccttcccgaatcccacctttctataaatccctccaccttctccgacctcctcatcgtcaaaatcacatacacaagaagagcgtggaagagagggaggagaggggagagagcaatgccgacggggaggttgagcggcaacatcacgcaggactgggagccggtggtgctgcggcggacgaagccgaaggcggcggaccttaagtcgacgagggcggtgaaccaggcgatgcggacgggggcgccggtggagacggtgcggaaggcggcagcgggcacgaacaaggcggcggcgggggcggcggcgcccgcgcggaagctggacgagtcgacggagccggcggggctggggcgcgtgggcgcggaggtgcgcggcgcgatccagaaggcccgggtggcgaaggggtggagccaggcggagctcgccaagcgcatcaacgagcgggcgcaggtggtgcaggagtacgagagcggcaaggccgtccccgtccaggccgtgctcgccaagatggagcgcgcgctcgaggtcaagctccgcggcaaggcggtcggcgcgccggccgcgcccgccggcgccaagtgaatccttcgtggccggaatcgcacctccgatccctcctagttaggcgttgatccgtttgtgaatgtgcagtttgtttgtgttcttggcttaattttggggggaaactatgatatgctaactggctcagacgcatgtgaagtgatgatggctagaaattgaatttccgttggatttgtgaacacatagtttagttgaagcgcttttcgatccggttgtgttcaatcgtcgttgtgctctgcttctagttgtgactagctttgttctctgctcatatttcattgattgatccaagtgattcttcctgggaatcgcaagttcgcaactccgggcctccctaagttcctagttataggcgttgatccgcgttgtgaatgtacagttcgtttgtgttcttggcttggtttggggaaaccatgaatccatgatgctaactaggcgtatgtgaagtaatttctaatagaaattaaatttaccggccgaatcgttgtgctctgcttcttgtgtgttgtgcggtgcctagcttgttccctgttcatgtctcatcgacagctcaggttgctgctacctgtccggagctttggcggtccgtaaaattgatcgagtcactaactcggtgggttcaattaaccaatgtttattcgttcatttttctcggcttgaaacggatgaactccagaagagcatttttcggcttacatatttgtaacaggcttcacggctgagtttttatcttcacttttccaaccaacatctctcgtttttaaactgctaaacgatataatttttttaaaaaaattctatataaaaattattttaaaaatcatattaatcaatcgattttttaaatttattttaaaatatttaattaataatacctaaatgttgttttgttttgcatgctaggaagtgaggttttcatccctcactttcgaacagagccttaaagtatgttgattacagccactggtggatcgctgctctcgcaataggccttgtcacttaattctgccaaattatggactagttatgttttttttttctttttggtacgcagaaaaatatgtttggtttgctacattgacaaaatatgactatgctaaattatgctaaataatatttgtgtattatttgtgcggtattggaagtattggtagtagtaaactaagcgttgccaaaaattaatgcttaaaatgcaaatattttggtatggcaagttttgacttccaaggtaaaaaggagaattttggcttccaaaggtagtataaaaaggaggagaacaccaactggcatatacaaggaaaataatggataatgcaacttattgactctctgtaataatcttccaccgttacaaatactccaccacccagcaaatccaacaacaccaacatgtgtacatacgcatggccgactcgatcggcgacgagatccagaaagaactcagaaccagggggagccatggacgggggtgacgacggacttgacggcgaggaacttgtcgagcgcgtgcatgctgtcgtccttgccgaacccgctcatcttgcggccaccgaacgggcagctcctgtccatggcgaagtagcagttcacccacaccacccctgcccggatcgacctcgccatccggttcgccacgtcgatgtccctcgtcaccagccccgccgccagcccgtacctcgtcccgttcgccctctcgatcgcctcctccaccgtcctgcacccaaaattaatctctcttaccactatagtagtttcttagataataaacattttgaattgatatgacatatcatggtcagatcctctgcgatcgaaatcacgtaactttgtcacttacatgtggatccgatgatccctggatccacaagttagtgataaaggtaccgtgtatttgactagagaggatggcgatccatatatatagctgggtttacttgaacttcatcaggcacatgacggggccgaagatctcctccctcgcgatgaccatgtcgtcctgtcgttcagaatcgcaagcgaatcatcagagataagactgtgaagacacatggtgtgttcgtggtaaattctaaaggttaatttattttttatctttaccttcacattggtgaaaatggtgggctcgatgtagtaccctttcttaccgcagggcttccctcccgtgagaacagttgccccttctgccttgccttgctcgatgtacccgagcaccctctcatactgagccttgtccacctgtatgaacatagtagcagggcaacacagtacggtgatcagtctctggttcagatagttaatcaggcctgaatcatcactgaattattggaactcacaagaaaaaaaatgctcgttggatggatgatgattcagatttttcggaatttaatttcagactcactcacctgtggtccttgattgacgcgaggatcgaaggggtcgccgacgacccagctcttcatggtgtccgctagcttctgctcgaaccggtcgtagatgccctcctgcacgaacacgcggctcccggcgacgcaggcttctccctgcagattgatcagatcacggctatggctctcatcagtcaattcaatcaagatcacggcaatgcatggcgctctgccaattcggatgctcaccttgttgaagaagttcccgccgatggcgagctcgacggccttgtccaggtcggcgtcgtcgaagacgatgaacggcgacttgccgccgagctcgagtgccaccggcttcaggttgctcttcgcggaggcctccattataagccgtccaacctcagtagatcccgtgaaagccacctgcaaaaaaaaaaaaagttgtaagaaaccgatcaatgttcatgtgctaattgacagctgaatgtatgatatcttaccacgtcaacatccatgtgagatgaaattgcagctcccgctgttgggccgaatcctgtcaccacgttgatcaccccatccggtactcctgcctgaatatcacattccgaaaaggtcagagatattcagagttttagactaccagcaatcacacagcacaaaatgcctgatgcaagaacagagctactactatatcgtttttcttttttcaattttgcgtcctgttctaaattgaagattggattagctactttcttgattttcattagcacgttttccaaactatcaaatgttatgttttgtatgaaaattttctatataaaaggtactttaaaaaaataaataaatttatttgtcaattttctataattaataattagttaatgttaatcacatttctcgtttgtgtgactaatcttacttgcttattttttttttaaaaaaaattcttacttgctttgataggtgggcgaggaacagggcgctgaggggcgtctgctcggcgggcttgacgacgacggtgcagccggcggcgagcgccggtgagactttggagaagaacatgatggccgggaagttccaggggacgatgaggccggcgacgccgaggggctcgcggagggtgtaaccctggagctgcctcgacatcttgagcgtctcgccgtggatcttgtcggcggcgccggcgaagtagcgcaggatgccgacgcactcgccgacgtccaccgccctggcggcggcgagcggcttgccggcgtcaaggctctccagtgccgccagctcatccgcgtgccgctccaccacctccgcgtacttcgccatgaccctccctctctcctgcatttgacaaatgcgccattgatcggtcactttccagccattttttgcacgattgagaggaagaagaagatgaccgtactgatcccgacatgcgaggccattcgccgtggtcgaatgcttccctcgccgccttcaccgccaggtcgacgtcctccttgtcgccttcggcgacgcgggcgatcacgtcgccggtgcgggggtccctggtctcgaacgtcttacctggagaagaagcacggagcacggcgaccttccatgatcaggatgagattatgtaaagataaaattaagtgaaaatttcagtaaacctcacatttcatggttaaagttatataaaatcctaggtatcataaccttgatgaagagagttagttttagtttatgactctcatcaagagcaagaagtctttaattttagattggactgctatagaatttgacccatcgtacaaaaagtttctgatgataagaatcatactttcatggaactccataggggcatagggctataggcttcaacacggtagatgttttgttctgaattattctgagcaaacttacgacccaacgatacaatggttttttttctattcacaaagaaaataatttggaaatcgcaatgcttctatacgcttccagaggtgacacataaccgaactactattgttttaaagtttttcaaaacaccacctctatatatatttagtaaatatttacttaaaattgtaaaatgtagaatatatgtggaatttttagttgttgatttttttattaaggttttcggtttaactcttcgctactttgtaaaatattatcttagatatgttaaagtcaattgaaatattgtcttggattttgttagcatgcttttacatttcattaaaaaactttctatataaaatttactctacaaatatcaaataaatatattttttaaatttataataactaaatttaattaattatattctaatgacttcttgattttctgtgcactaacttcaccttaatgaggcaaaccccgaatttgatttttcttcagagcacgaaacgtgtataaaagtacacaagaaaataggatctctagtacggaagcatttatcttcttctgaaaattcagaaatgttccaaatctgaaacgtgctactgctagagccacatatgggcagtcccaatccataacactagacatggtttccataaactccacatcatcaagaaactagtgctagacactactcttccaatgcaaacaccactattccatactttaatttaatgctatttatctcacatgatgtcttagatgttgtgtagaaactatgtctcatacaagacatggttttcttctctttcctcatttattcacttgccacatcattttttgtcctaggtgacaacttatttaatgctatgaacactatcctagtcattgggttgggaatgccctaatgatttgatttgaatagttctttactacttagtactattagtacggagtactagctaatcattgagcaaaaaaaagatgtgagatgaaaacagcaactagccggggacgcgaagcacatggtataacacgggacgatgggaaaaatagatgccagaggttggtagagactgaaactgcaggcccgttcatgcttctttgtcgtgttactccttggcgaactgcccatgatctcatctcgccatcaaaccgtacgatgctaggagcaccacaagtttacggtaactcttcaaaatttactttctcggttataaaaattagcaatatagtactaaactttcttttttaaaaaaactatttttataggcaacacatgcagaaacaaatatattaaaaatgatgtatatggtttgctcccttcgtcccataaaaacccaccagtatgagaggtgatattttcaagcacagtgaatctgaacagaagactatccaaattcgttgtacttgtaaataccatatccaatagttttcagaatgagggagtatggcttatgaaatatagcaatatagtgaattgtttttttcataggcaacacatacagagaccaatcatattgagaacagtgtatgtatatggtttcatatagataaaacccatttcatctttttcatattatttttttcatatttaatgagaatggattttttagtgggagtggcctaagaattaatctaaactggctggtactaattaattatggagagaatcattaagagcaagtttaatagtacagcccactgctagctccaattcatctatatatagtcaatctaacagtcaattcatacaatagttgcttacgatactataaatatttggtcccacatgtcatacacatactgtgtcttggagtccgtgctgcagctggctacagatctgtagtccgctgctcttctctgttatcttttatctcattaaaatatatttatagctcactaatagtttgctattgtacttgctctaagaaacagcactgattgcgataaggaattgaatccctactagtatttggaagaaaggaaataaatcgaagagagcaataggacaaccacggcgattatgaattggatcccattactaggttttggtagagtacaattaagtcctccagtaattaacgcaggtgggctggacgtagctagataaccacagcccacggctagctagcgcgcggctaacacacacgtacgtacgtaccggaggccgcgtcgacgaagcgcccgttgatgaacagcttggtgtacctgatctccggcgtcgtcctgggcgtcccgccgccgtcgtcgccgccgtggaggcaccccgcgccgctgttctccgcgcgcgcctcgtcgccggcgtggtggtggccgttgctctcgctctcgctcgccatggcgcgcggcggtgtggctcgatcggtctctctctccgcgcgctgctttgctgttgcgtcgctaagcgagaagcgtagtcctactgtggggggggggggggggggggtgatttgggcgaggcgatacgccgatttaaagagaagcgtgcgccctgccctggccaggtgctagttgggctagccgtccttcaaatttgacagttttttttcccattcacagatttgactggtctagctgactagctagtcctttaaatttatcctaaattatagatgattttataatctgaagatgatcatttattgcccatgtacccacccctccctcccatttcaagcgcaaacatgagttgtcaaattttaattgtacgtcttattttattttttttgaaaaatagtacttttaatgttttatcatctgataataataaaaatactaatcataaaattttttaaataagacagatgattaaagttagacaaggaaactcataactacgtttaatatgggacggagggagtatactttatgagtctattaggttgatgttattttaaatctttttggtaaaattgagaaatacgtggatacatttaatttattcccaaacattggtaatgcctagataattttggtaacaatacatctatcctatcctattaaaatttgataatattaccaactcaccaaaactttggcattaccaaaattctagaaatgtttattttggtaataatttgagccagccttatatctcgcttatccactcttttatagtttattcctccacctacctatttttactttacttaatcctcacctatcatctattattcccattcgttctaaaataaacaaacatatcacacccctgtattaggtttgtttattcggatgaaaggagtaatacattattttatctcctatcatcatttttcatcacttgtacttttgctatctccttaataatcattaaaaaagggaaattattctatttgagacgagggagtatttccatcaccttactttactccaagacggcaaggcctgacaggcacccgcacatgggaaacaaacggacgagtcaaggagtgtactcatgtagtgtggtcgcgcactcacgtgattacctgaagaacttgcaaggattgggatctggtctctttttcaattcatcatcgatatgtatatatagagaagggttaattggatccatgccacgcgaattgtggcaaatcaaaaaaaaaaatgctacacctattccggaatccgggtgcaggccacaactgtttcgtcaaattggaaccatgccataatgtacgccctgcgcgcgctttgccaccgttttagggtaccgtattttcgtatggacgtttctgccctcgtgttcacgtgtgcttagaccagctccggtccggctcgaacaacccggtcgccattcgttccccacaccgaaaccctagcttcttggaggcggcgcaggcgacggcgccggcgcaatcgacggcggcggagcaggcttcggtgccggagcagggcggtggcgcaggcgaaggcggcggcggagcagggcggcagcggagcagggcggcggcggaggctacgacggccgaaggggaggacctccaccgatgggaggatgagtgcgcaggggcctacgcctgcatcccccaccgcgttggcaatgtatttgggcgaatcccttgtacgggttgcttccaaaccgtgagtaccttcccccatgaactctttatgcagataaaattacgatttgagtttcgatttgaactttgtatgtgcgatttgagttattgttttgtcattcgttggtaggcattggttttcagtcgatgttagggtgcaaccctatgcgacagtagatgctgatggtaggaaaatcatcagtaaaggaggcactgggcattgggtaatcgattcagagagtttttcgtttgatttcctaatggaaagtttgagggttgagtttaagtggggctcgaaccagtctccctcagtgtggtattttaacaaaaatttgggtgaggatgttaggctcataggggacactgatttgccagatattttcgagatgtatgcaaccgaggccagtttccacttacttgtagcagttcttgaggaaagcatggatgttgcttctgtgtgttgtgtgcatgagcccattgctatcatcccacctgagaacccttcccacaatgatggttctagacaagctgctactaatgatggttctgcacagcctacaacagtggaagcagatgttagagagcctgacatgtttgataattaggaagaatatgttggtgttaatgatgagcagttgtatctgcctccaaaacctactcagccacctgacacctctagccaatcctctcagcctgctgccacagggtttgtgtcacgaccggaattaacccaacgggcgttccttacgtgcatgtattattccttgtcccaggaggcaaggtacaccaaaagttgatacatttcagagtttatcaagcggaagcgtaaatagttaatttattacatgggcggcgaaggcccagcacacacaaagacaaacgggaaagaggggaagactagggcgacgaccacaggcgcttgacggcaggcacgagctagacaccaaagccttcatcttctaggaactccacttctgggtttgggaaaaattgagcaagactgagtacaaccaccgtactcaacaagacacacccacaagtgcagaataaatgcaagggagtacaagggggtttgcagtaaacagcattaaaagacacttagttgctcaaagctattttgtaaacacgattctagagctatgcaatattattaatcaaggccgtgaacccacacgaacctgccttaacccaaggcctacgatgattcagaccgaactggcaacccgaccctgggtcccagctcgtcccaagccaacccaggccaaccattccacattttagttgttaagcaggttttaagaattaaaacactaacttgggtacattgctcggcttgcccataaccaagggcgcggctattcgaatagattatactctgatcagaggtgtacatctttacccacaagacacatcttcctcacgtgtaaccatgtgccacataccaccacggtatacggacagaagacgtgacatagtttccaacccatcctagccatagacaagagtaccgacccaaccccacctacggccggaacccccgggacaggtaggcaggactgagcctctagcagcaggacaccggccctgtgccatgacatctcgactaccgggccgcagctcgtgtagccttcatttgtcctagagatgtccatcgacccccgacttcgtccatctccatccgtgtacttttgtttataaccagactgagccacaaactaagccttacccactagacatgtagaagtacggtagtgctttgcaacagaggcccgaagaccggtccttatatggccgaggtgctactatcaaaaccatgcacccgagcctagcctaaaaccattttgagggttttgaatagagggggaggtgcaaatccaattccacaataatccaaccattccatagtgtccaggtgatgagaatattcccaaagtctagagttataaaaccacctaatgttgcctaattaatcagcgaagcatctacctaaaatcatactagtggtaccatgagtagagtgtccactagttggggttttgtttattctagggtgaacaaggaaataataacaataacaataataaggtcataacaaaggtaaataggcatggctagataaaacagtgataacgcgggaatttaaataaagcggtaatgcaataatttaaatcaaaataattttataaactgggattcaatatgttcaaggatgatgtgacttgccttgctcgctttcccaaacgtcggcttcaacctccacgaagagcggatcttccgaagctgcagcgtttacacgaccaacggaaaagaaaaggattttactctaataaactccatataacaagcaggaacaaagcacaaaaatgggttcttgacttcttcaggaaaaattagagacttgaatggtccaattccgagttcaaatggccaagttatggccatttgaagtttatatgctctttaaatgaatatttgcgaatttcttcatttaaattttaattttaaaagggtttattgcgtcagccgaggggaggggacgcgcggaccgggtccacgggagtggggcccacgcggtagcctcacggtccacggtggaccgggtgcacccgggctcacaccggccggcgccgtgggccccacgcgtcagccgcaaccgagggcgcgggcggctgacggccgggccccacgcggcagccactcggcgcgcccgagggcggccaagccggcgcagcaggcgggaggcggcgcccgcgcccctatggtcgccggcggcggccataggcacggcggagcggcggccgagagaggggaagggaagggggaaaagaggcggcggtccacggctcaccctaggtcgacggcgacgacgaaaaaggcggcgggagcggaggaaggcggcggcgcggctcgggtcgacggggtcgacggcgttccggcggtcggtgagcgaaacgaaggggtggacgaggtcggcgaggatgcggcgaagccgaaggaggcggcgctgaggtgggaggtggtccggggcgacgacggcggcggaccggagctcggcggcgacggcggagagagagagcgacggcgggagctcgattccggcgaggaggaagggcggcgagaggcggaaacggacggaggaggtacggggagggtttaaatagagccggggcgagagagggcggccggggaaggaaggaaaccggcgcgggaggtcggccgccatcaatggcgccggcgagatttgcgggggcaagtccgcccgtttgaactcgatagagagagagggaaaaatggggggaaagggagagggaatcacggggaataaatccccctattgattgcacgcggggacgacgggatgcggcggattcggcggcggcggtggcgctagggcgcgggcgaggcggcatgagcggcgggaggaaggggatgacgggtgggccccacccgtcagcgagggtggcgggcgggcctgcccgtcagcggcgcgcgcggggagaggccgagtgggccgcggggagaggagagagagggggagggagatgggccgagccggcccaagagggggagggagggaaaggggacctttagggtttttctttttataaaaccattttaactttgtttatttcttaataattattatttgtgctctgaaaattccactaaaatttatttacgcattttaggcttttaggaaatatacaaaaatcctccaagccttatttgacttttaactttgcacattttaatttttggaggctttcacacggattttaattattctaggcataatttagaggatgtattttagagtcgttttgggacgtgacagtttggtggccaatcctctcagcctgctgccataggggttagtggtcaatcctctcagactgctgccacaggggttgaagctcctgaggtagaagtcactgatgaagctcaggttgttagagtgttgcatgatccagagaatccaaatatagtgaagaatgctctattccctgacatgatatcttttagaaaagcagttaggcattatgcaattaagaaaggttttgagtttgctgatttgaagacagataaaacaagattcattgcaacctgtcgcgctgaaggctgtccatggagaatacgtgcttccctaatccatgataagaaaacaattaaggtataaatgtattattttagttaatttattttttcatctcctgaaagtagtgttagttttagtaactttttatcaccatgtcatgtcatgcagattacagttcttccctttgaacacaaatatgcatctaccaaactaagagagggcaagatggctacacagggctgggttgctgataggcttggtgattggttgaagaacaatccaaagaagggtgctaaggatgcaagagggaagctgcaagaacagtatgagatcaagttgaagtattcaaaggcatggtcaggtatgaagttagcactagaacaggtacatggtaaatatgaggaaagttttcagttgcttttcaactggaaggctgaaattgagaggaagtgtccaggtagtatagttgaaattgaattggagaagttaggaaataaaatgtgcttcaagcgtttgtttgtagctctaaaaccatgtatagatggctttttgcaagggtgtaggccatatgtgggtgtagactcaactaagttgactagaaaatacactggacagttagcttcagccacctctgtagatggtcacaactggcttttttatgtatcatatgcaatttttgatttggaaactaataacaactggttgtggtttatgaaacaattgaatagagctattggttgtcctgaagggttagttatctcaaccgatgcatgcaaggggttagaaaaggctgttagtgctgcatttagtgatcatgttgagcatagagaatgcattaggcacctctatgctaacttcctaaagaagtaccatggttctgttatcactgagcatttgtatccagctgctaggagctacactgaggagggtttcaagtaccatatgcagcaaatatatgcagtgaaaccagatgcaatagagtttcttgagcaacatcattcaagaatttggtacagatgtggctttggagaaagcagcaaatgtgactatctgacaaacaatgtttctgagtgctttaatgctcagatcagaaatctgaaaggactgcttcctcatgaacttgttgacagcatacgagagttaataatggagaagatggccactagaagagatgttggcaagaaaatggatgatggaatcattccaggtgttatgaagcagcttaatgatgccacatctcttcttaaagtggtgaagattaccagaagtgatgatgggtttgcagaggtcacacttgtggatactgacaacaagactagaaggcatattgttgacctagacaaccaaaaatgctcctgtagggcttggcaaataacagggaagccatgcaggcatgcattggcctggatatgcagcagtggaggaaggatacaagattttgtgagcccatattatagtgtgcaaatgttcaggacagcttatgcaggcagagtaccacctatgactgataggacacagtggccagtagttgatttgggcttcaaggtgcatgtccctaagcagaagagaggtgctgggaggcctagagtacagagaataaggggatttcttgagcctggaagaaagagagtgaaatgcaagagatgtaaaagatttggacattttgagaaaacatgcaagctagctgaacctgtagatgcagatgatatgagcagccactgcaccccccaaaaacggtatattgctgtcattgtgcttccattcttaattagtctttgtgcaagcggtttgtgttctttaactccaacttgataaaaaaaacccaacttgataattattgttagttacactcctgatatattgtgctatgttgtagtcactaagattcaggcttgtatgcttgccatatggtctaaaaattctcacttttttgtaggaagagacaagtgtgcaggcaaggaaatgatccaggagtgtcaacaagtgaagcaagctgctctgcaccaaagaagaaaaaaacacctaggaaaaaaaagacaccaaaaaagaagaagactccccagaagaggaaagacctagcatcctcaagtgcaccaccaactagagtagttaggagcctatctacctatcttctactgtaatgccagctgcctcctctctaagtattttgctaattgccaatggctgtgatgaacttgtaatgcacgtgtgcctgtgaacttgtagtaacctatttgcagtgacaatgtagcctgccccatctcttaagtattttgctagtaaggctgctatgaaccagtaatgttgctcatgtatgtctatactgttgtatgcatatgttgagcctgaaaactgaaattatggaatgcatcaatgatctcttttgctgaaaatttactgtactcatgtgctctctccttttgtaaagatttctgtgctgtaaactgaaattatggaatgcaccaatgatctctttgctgaaaatttgtgatggacaattgtctgcatggcactgattctatacaggaatctgacaatttttcccagcaatctgcaaattttatggttctattattgtaacaattcactactttcttctcaaacatacactttcattcatattgttcagcactgcacatacacatactttcttctgaaacatactctttcattcatataggtcaccacagtacatacacatgacaatacatccatatttccaatccaaaatacacttgttgacaatacatccatttttttcccatctaatttctacctaccattaagcaagcaaataagacagtgatcactaaggtaaggtatagaagtctagcacggctaaatttaacttcttccaactgcttcttcatcgctaaacactccagcctacactggttgagtgtctcaattgttgacttcaactcattttcctttgcatcaaggacctcacaaatcttcgctttttcattcttctcatcatctaaatattggcgaagaatgtcgattgtttcttgcatatgatcgtactcgccggcgtgacagtacgcaaccatctcctcagcatactcattcagcaggtcttcccatatccataagaagcaacagccctaagcaaacaactaagaattaagacaccgaaatgaaaccaacgaaactaagcaagttcttaccgaattgccgcattgtagccaccagcgtcgaggattccttggtgtgttcgaaatctgcacagtggcggaggcaccgcaagcacacttcagcgtggggatggaagaaggtgattccatcatcgccttgccgtcgcgccaggaaggaggtgattccatcgtcgccttgccgtcgcgccaggtcgtactcgccgccggtcgcctgcgccgtcgctaggagctccggcgccaccgccttcggccggcgtagcctccgccgccgccctgctccgccgtcgccttcacctgcgccgccgccctgctccgccgccgaagcctgcgccgccgtctgcgacgccgccctccgtcgccgtagcctgcgccgccgccctgctccgccgccttccgccgccatcgattgcgccggcgccatcgcctgcgccgcctccaagaagctagggtttcggtgtggggaacgaatggcgaccgggctgttcgagccggaccggagctggtctaagcacacgtgaacacgagggcataaacgtccatacgaaaatacggtaccctaaaacggtggcaaagcacgcgcagggcgtacattgtggcatggttccaatttgacgaaatagtagtggcatgcacccggattccggaataggtgtgtcatttttttatttgccacaattcgcgtggcatagatccaattaaccctatagagaaagatcctccaatccgtttaattttataacctgctttgtttatacgtgatttggtttgacattcatcgatctttgccaataaacccgtatcatatttgatcacagaaaaaaaaaacttgtcgcgtttggcgattttgacgagctttggtataattttaacatcgtcaccgttgcctgccctccaacctttgcagccacctgacagctcagtatagctttgcatatgaccccacttagctctatgcatgccccatacatggcttggcacatccgtgttattgttgtctcatcttctttttctatatatccagcctagcttgacaagtttttgccttgttctgtcctcgtactctggttttaacagttacaagcctaccgttatactccctccgtctcataatataagggattttgagtttttgcttgtaacgtttatcactcgtcttattcaaattttttttaaattattatttattttatttttgacttactttattatctacaatactttaagcacaacttttcgtttttttatatttgcaaaaaaaaattgaataagacgagtggtcaaacgttgcatgcaaaaactcaaaatcccttatattgtgggacggagggagtattatttgtttcgaaaaatgttactgatatgggttgccagttgcccctcgcacaatattcacttatctcttttagacctatatggtactggcaccactgccatacgtactccttttatctatcgttgtgtataagatccatctctattcctatgttccaataaattaaaaacttttcaagtttttttaaataaaccggtatctttaagtgggtctaccagtgtaaggggtcggtccatccaactataaggacggttttaagttaagaaccggtacctacaaatgagaataggcataggttccaattaaatcggtacatatgagcatcatctatagcagtgtacgcgcataatttttcattagcaagtacgcaatgtcaccttatttccttggggtcaggttgaatccagcgacaccgaggctagaggagctgagataggacgtaggatttgaccagctttataaccaaaaggttaaacgaagtggacgattcactattgtttccacaaagtcttcggttatgatgtaaagtgaccagggacatgacatggaaagatgattctttacgtagttaatgatcagatgatgacaactatactactgtctttgttttttaatatataagatcgtttgacattttgacaaatgtttgatcatctgttttattcaaaactcttatacaaatataaaaaatatttaacttttataaaaaaacatttgatgataaatcaagtcacaataaataaataataattacataactttttaaataaggcaaatagtcaaacgagtattttaaaagatcaatagcattatatattaaacaacgagagtacttagctaaagcaaagaaaaataaacatgtacgttttgtttccttgtgtatttacaactctggtaggctcactcaagaaaggacagagtacatataaactccaataacgactgcacgttctaaacgccaaactgtgcaaacgtacaacaatcaataataaatctcatgttactgttttgacatcttctttatagcctttatgtacgttatatgcgtccattttctagcacgcacaagttgggagaagaaacttagctaaaattgcgtcagtgccgtaattaatttcttgtatcatcaacaagcaaaattttctccgagatctgaaaatgcacaccgacacactgtacgccccataacagatgccgcacgtgggagctattataccgttgaaattttcaagttaagaaatactagctctgtttcattttaaatgcaactatgtttttccgtacctaattttgatcgtttgtccatcttatttaaaaaaattttgaaaaaaattaaaaacataagtcataagtaaagtactattcatattcatgttttatcatctcataataacaaaaatactaattataaaaaaaattttaaataagacggacgattaaagttggacgcggaagcacttaaatttggacggagggagtaataccgagtctcttttatactaggtactataggagtaccattcaagtgcccatattttagatcaaaggtagcatcctaattggctgtgttttgtgatgtatggttgattgttgagacttgagacttgaggcagtaattttttttagataattaaacttgacgaactttgaagcacaatatgaaggaatttttatttcgataaattttcgttaccgtattcgagcctgttcctattcacttcgttctcatgtttaccaatcactaagtcgcgcgttgcgcaacaatgaatatacactcctaagtgttaacctgtacatattcctaagttgtcttgtaagtgttttatactgttattttagaaaagtagaaattagtggcacatcgttttgttgcccaatattaggatacaaccattcaagtatttgttgttggtgcatatgacacacccttctctcgatcactatattttcactcaacatattgaactttcatcacgatatatatattataagtatttctaaggcattttttatgctgaatggaatataaatgataatttagataacataatgttataaaagatgcttttgagctcaactataaacacaacactttagcgattaataaaaaaaatcaagcgtatactccctctagtttttaacggacgacaccgctggcttttgaacatgcttttgactattcatcttatttaaaagccatgtaaatatgaaatatacatataagttattctgaaagtacttctaataataaaataaataataaaaataattatgtaattttggtcaaatatatatttaaaaatcaagagcatcatatattaaaaactgaaacaaaataaagcatatcgaagtccatctaatatgctagtactttgtactattcgtaaatacattttataattttatttgaatttgagttgtgccattcttttttttctatggctgaccatgtgcctggcagctttgagacttcctcgttggaagtctagaagtttcttgagggcagctcctgtgccttgaaattttttttctggttttttaatagaagtatgaatctaatgtttcattttttgcttgctgtctgcatccaacagtggttctttcgtgacctagctcgattgcaagaaactttagttctttaaatactttagattcggaattttcccctgagaatcatgcttattttggcccggaaattccttccgagggcccccacacatagcgtttatctggccttcttttcccatgacaagccaacaaggccaaatacggattccatctccatacgttcatcatgttacgatggaccgaaatccaagcccatttatgtgttaacaaggcccaactatgctaaagttgtttcatatctggcccatcaacacgttgcagttatgggtcgtcattccacagtgggcttgtcacaacaaaactcgtaggaaaaagtccaatttgactcccttaaatataggcaaaatctaattcgtacccctcaactggaaaaccgggtaggacgactcccctaactattgtaaccggtgcaattggactccctcggcggtttcggagggcggttttgctgacgtggcaatgttgacccggttttcgtcccacgtggcgcttacatggcattagaattaaaaaaatatctgtgggtcccatctgtcattaaaaaaattatattgtgggacccactgacatgtggggcccacatgtcatcctctcttctctacctttttcatcctccccctctctttctcttcacgagagtgggacgagggccagcggcagcagcggtgaaggacgggcgggcgagggccggagcaggggccaaatcgtcggcggcggcggcggacgggggccggagcggcggtggccggcgcacccacggcgctctggagcgcgtaccgaagcgacgcctccacgacatcatctcccttcccgtcaatctggaccacgccaagccaagccactgcgtcgtcgactttgcatcgtcctcctctccgtttccccacaaaaatcccggagaatggcgcaccgaggagggagatcgacttcgtcttctccaactccggccgctggcgtaaatcttcgattcccgccgctccggtgagtctcgcgtcgattccttgcgcatgaaccaccctagggacctcactaataacatcagagcacatgcatgtttattacatcggtggatcaagccgtcgccgttcaccccggaggttcttgccgccgcccagcacgat

SEQ ID NO: 4855 - DNA, 42465 bp, Oryza sativa
ctctactctctcttcctaaatccccatcccctctctctcccctccctccctgctgcagcgagcaacggtgattgcttggttttttcctcgccatggcggtttcttggccatggctgtttgatttcttggttggcccgcgcgtgcgcaccaacttcccccatgacgatgtcaacgaggccgcgcagccgccgtcgcctcctcttcgttcctctccacggcgctcgtcgccaagctccaccgctccaacctcgcctccgtccaagccgcgcagcgcgataacagcaatgactcctccttctcctccctcgcctccaccgggctgccgctcaccgcccatggctgcacaccgtcgtccaccaggcgccgccgctcgctgcatcatgggagggaagagagaggggatggggatttaggaagagagagtagagagagattgagaggttagagggggagagagagagaggagagccttacaggtggggcccgcactatgttttttaaaaaaattgagaagcccacactatttagcccgtggactggcacggcacggcccggcgtgtcggtcaggccgtgccggcccgattagcctcgactcaggcacggccgggcctgggctgtgccgtgccgagcagcccagttggccaactatagtttccagccctgtggtgaccatccaccccgcccgccatcgctacatcactcattcggctacaactggcttcatctggtcacactcgcgcgaggaagaagagcaaagaagaggaggagagaagtccttcctctgatccctaacatgtggacccccacctgctgacttagcaagtcaaccacagtcaacttgcactggtttttgaagatggggagacatatccaattttacggatgagggagacaactagcaactgtgaggaggcaaattagacttgttctaattagagaatatagagaggggtaaccgggaatatgagatgaccatggtcgaggcctccagggccccatgctatgaaatttctcatccttgtgtttcattcagtacgattagttaagaaatattaaaacagaaaaaaaattcgaaagtgaacaatcttattatgtatgtggcataacagagtactgtgggtattgctgctcctgcgccagagggacagtaatgccaacagattagacaagttttaggttataagatccctatttggttaagttaaaaaaaaaggcgcaagaagaacacctagatgtatcataatactaatttcacttgccagtgatgaatggatggctgagtgcttctggcacagtaatcctcttctttggatctagcacaaatattttttccaggagatctttgaagctggaaatcatttttggatcatcgccggggcagcttgaaattgcagaaccaacaccctttggtttaatgttcaaaagcaacctattcacaacctgcaacagataaaggtaaaattaacaattaaatttatttaacagacaattgtaaaaagttatcactgtcagtgtaaataaaaggcgtaccgttttcgtgataggatccttctttctagcaagaaagttcaagttctggtcgaagtgttgcattgtgaaggcaccctgtttaattaggaacacacatcagtatgactgtatgagcagtttaatattctaaaacaaatatgcagactaccatacatattatcttctcggtatacacagaaatccaaataagtaatggaaatctaactttttttaaataaattcttacctttcgaagcatcttcttagggaaggggcccttcaattccatgtgaaggcgaagcatgtcattgttcgttgaaccatcaaataagatttttcctgtttaagttcagataagcagcacccagctgaccacatatccagtggatgatcataaggcaacccaagaactgcaggaagaacaagaaatcactaatctgtctgcaaaccattaagaaaccaagcattgaaaaagaggggatttgttttgagtttgactgcaaaagaaaacagtgtcgaagtcaagaaagatagtcaaataaggaacactgaacaagtatgtaactcacttatttcaggtgcccggtagaagcggctcacaagatacggtgtgatctcattatttccagcagacatagcactaccgaagtcacacagcttcagcaaattgttatctttatttacctacaaaatgacaaacatcaaaaaagctatgctaaataattcttctaccatatatacaaaagaaaagggggtgtaagtcatttttagccttttcctttctcggtcatcaagtacataaaactagtcataatttgtccaggaaaacaataagagtagactatgatactcagcaagattacataccagtatattgtctggtttaatgtcacagtggagaacaccacagtgtcttagatgcttcaacgcgataaaaatatgctttgtgtacgcccttacagcagtcagtttaagcccagtgccatgaccaaatttctttataacctcacgaagattcatatgaagagattcaagaactaaacacagatgattttgatgcataaaactagaaataatccgcacacagtgttgtttgtcttcacgatctgcagttcccaatttttccaatatagaaatttccctcttaccagacctgtacctgtatagtgaatgcccaaggtcagatggtactcttctctctattagatatattgccacaaataatgaataatttcaaagacttacttttcaatattgttgcatataattttgatagctacttctctacatccatccttttgagctttaagatccttcgcatgaacaacagtcgagaaaactcctttcccacggcgtgctgtaatttcataacggccctgtagcacttctccaaaatgataaactgtaaaattgcccccaaaaataagtcaaataatatagaacaaaccagtatataacttgagaagctgcaagattgataaggtataaatagaagtcagtacttactgtaatatccctcttcatcttcccagttgtcatgaagagtgtttttcttggcaagcatactgttttcattgccctacaaaacacaaaatagttgagcacaaaagttaaagtaaatgggataactttggcaataacataaaatacaaagggggcaaatagaaaaaaatatttgaagaattttttgttgaagtaagtagtaacaattgttattattcagaagtacaagtagtaagaacgtaccagcttgcgatcaataggttgttctccatcaataacgttgccaagaataacttgtttacctctctgtggaaatatcaaagattccaagtaaaatttctggatgatctagtgttacgattaccatcagaattctaaacaaacaatcaacttaacgagaaatatcatttaccatgggaataccctcctgaagacctgaagcacttgtcgtccttttattatgtgatatcctcgagcttccctcctgaagacctgaagcacttgtcgcccttttattatctgatgtccctaagctgattgaaattttaggcaaagtaggagacttcctcacattgtagaattttgcaccgacaaatacatttgataattcatgatcatttgtaatatcttccttggctcttaaattgttcgatctctgttttgtagcagcaggatcattgtttatttctgtcattcaaaaaaattggttaacaaaacttgaacaccttttaaacaacagagaaaaactcccactgtttctttttataaggcatatagtttcttcaatctcatttcaaacatacaaggcactgtgtgaatctattacttacattccttgtttacactcatttatcacatattctttattttacattgatcactgaccattatctttcctatttccaagacattcaggtacaaacagcatagtcattcgaatatctctcacatggtttcctctccttaatcattaatcaagataagccttataaaaagaaaagaagggtgtggggcagtaatttaaatccaaatgacagtttagggaaatatgttacctttattgtcaatgtaatgagcagatttttcctgttgcttccgatcctcgatgttctccaggtagttctcttcatcttcctccctgacatagtttgaagatgatttactaaaaaaaataaagcaactaaagttaacaaatatgatatacgagttaatcatatgagaaacctcacctgtaaggttctttcttctcttcttcaggtctccttttgcatttggcctttgtatcatccccaccaaagcttgatccatctttgtaaatgccagacataccatagtttgcatgcgtgtagctgatactcccttcgttcccatttactgctctagaccaacaagcatccatttccttacccctaaagcctctcttatctctcttatctatactatcattgagtttctcctctccatatctactgccaactctatctgtttctttgtaactgttcctagccgtatcatttttccgatttctccattcttcgtctttcttccttgtgctactattccatctatccatctccctaccttctccatgcccatgatgtgcactcgccttttgatcaaatctaccatcgccacttcgtctctcatgataagcaaggccatgcaaatcaactttcttttctaccaaactgccatgttttctctcgtccaggtgtttttcctcgctattacagatgtcagtgtgcctaccaatgtgacagccactctttttccttttcttatagcaccctctttcttcagtctcccacctcctgtttgaatacctatccggctcaccatgtctgtcatcaatcccatgttcataatcaagcctcacactgtttcttgagccatcagtttgaaagccagtttctctgctagcatgacaggatcgtaagcagtccttggaatgagcttcattatggtttcttgagccaggagatcttctagaatgatattccacaatggcttcatgagcagcatgatctgactttgctggataatcatgctcttgagatgggtttctagctagctgggaggtatgcaactcatttacatgtatattcaagtctgcatcggagttatcaccatgctcctgtattagaaatgaattaaaatgtaagtcaccatagaagagaaaattcaaaagcacgacgtgaccagtaaaaaaggaagcaagggagatctccctccttaacacaatgttcattgattatgatactacaaatttgttcgtaagcagttcaagctttatgtcaggaagcttggagcttctttcaggtaaacatttgctatcagcagcgcagtggagtctataataattcagacatgcctaaaattactttttttttttgcaaaccagtgaatattaaaagttgcatcaatgtggcaatagaagaacagaataggctgcggtgagacatacagtactttgaattcctgttacacaaaagttattcccttattcatagttcatacaggacgtgaattaacaatcatggcaagctagattagcttattgcttacaaattagtttagattaaattaacaattgtgtttaattttaactcaggacaaaaaaaagtgcatgccatctacccacaaagactgaggcatatgttactaataaaagttataagtaaaagacttcgttgataagtaacaaatgcagacatgttcttcacaaaagttaaattaaatttgattgttttagttcctatttcctagggtggtcttgcctgtgctctgacaaatgataacaaaacacaaatgaataggtgatcgagcatgccttcattgcttgttagttgcttccttaatataaactctacctccaaaattgttcgtcctatgactcgtattcctatcgctaacaacagcataccgccataccctacgcgctttgtgtacgattaagtccagaacaaaacagagcaaaattcgcccaaattcacatgaaaattaagaactccggaacaaaggatcaaggggtaacgaaaataacctataaccaacggcaacaaaatggatggggggcttggaacagaccggagcaggtagaacaccttgcactgagcccgtctcaccggcatcagcatccagccccctccccacacccacacccacggccgcggtggcctggtctagtatctcaccgtcctcggcctcgccctccgccggatccgccgcagccggcgagaccctatggcggtggcgatggtggccgcgcttgtggcgcttcggggaggaggcgccgtcctccgcgtcgtcgtcgtcgtgcggcgagcggcggtgcttgcgcggggagaggtgcgagcgggcggcctcctcgctggccatggagacccgagggaaccagctagggctagggtttggtacggaggaggaggggatcccgcgccgcggcgaggaagggtatgttggtttggagttggaagaaggaatcggatcgagcccgggaacgaattcccctcgtgatcaattcggccaccgttttgtaggaggaacggtcgattggagcagaccgttcgagttagacacggatgaggattgaggcggtgaggcctcccttcgagcttacagatttggggagatttcaaatagttcgattcgaaaaatgaaattgggaggttctttgataattgaaacgcagagatccttaagattattttatataaaaatagttcgaatcgtacaaaatccttcaaaaatttcacgttcaaacggacttcttagaaagcaagggaaccattggcttgggccattgtttcctttccggaataagttcactttgggtccctctatttgtcgcccagaccgattttcgtcccttgaccgcaaaactgggtatgacccgtcccccaacttacgaaaaccggggaaacatggtccctcggcggttttaaaggcggttttggctgacgtggcgcatacgtggcttgtttgattaggtctccgtcccacgtagcattgacgtggcgcttacgtggcaactatatctcagcaaaataataaaaagtgtggccccacatgtcagctgcaaaaagaaataactttaaaatggtggggccatgtgggccccatatgtcagcatcactcctctcttcttccctctcccttctctctcttgttccctttcctctctctctcttcttcccgggcagaggacggcgcgggtggacggtggagcaggcgagctccggcagcggcggtgggcgtggtcggcgccctggaagatgccatcgatgccgccgacctccacgcgcgccaggacggcatcgccgagcgcttctacaccgcgcttgtcgtcctcccgccgcctacgccgcgctagagccatgccgagctccctcctctcccgccagcgagctagaagggcggcggatggctaggcgagctccctggtctaccggcgagcgcgcgtgagtcgctccctcctctcccgccagcgcagagagatggggagttgacttgaacatataataaacattcaatgatgatacaaactgcaaagacagcttgagaggaacactagaacactgaactctgaaccattctgcacgaggtagtacattgtcataaacaaacgtcgcaaacgaccagtctaatgcgtgctctaccactcaaagtggcaaccaaatcgatggcacaaccaatcgaccaaacaaattcatatctcttcctctttgatctcttctccctgctcaatctcaagaacatacattatgtgttcaacaaattttcatcaaaaaatctcaagaacacgtcgtgttcaggcaaaagaacaacagagacaagaggcgatcgatggcaatggccatggcgaagctgttcatcacagggctgagcacggtgatcgcctactcgtccgcggtggtgttcaagggcgccgccatggctgtcgtgctcctgctcatgctggtccagctcccgggctacctcagctgcctcctcctctgcgccatcagagcagccgtcgagagggccgtggcggccaccttcgccgccgccggggacgccgtctcagcggcggcggacgctgcagtggggtagagggacgccgcgtcgtcgaacagcaccgcggcggtggcattcgtgtaggccgccatggggaggcccaaggcgctgcttgccgagatgctcgccatattcggcctcgtcgcctcgctttcgtgcagtccagcgacgacgaggaggaagacttccttgttgggtccgccccgggcgctgccgcggcccgccgccaccttcttctccggcgcagttctcgctatccccttctctctatccctctctctctatcctctctccttcctcttctctctatcccccctctctctccctgagaatggtgagtggcgacggaaggcgcacaggggcggcgacggagctgagacttgagaggcggcaggtagcttgtggagcggcggctggaggacgacgagcgcggcgtagaggcactcggcgatgccgtcccggtgcgcggagggtgtctgggtggtcggcggcggcgacacggatagtggcgaagcgacggagaagaaggtggcggagaagaggagagagagagagaggaaggagagaggatatagagagagagggtagtgaggatgacaggtggggtccacgtgggccccaccattttttttaattattgtgtgtgaaactgtcatgtggatcccatagtttttaatatttttcggatcaaattgccacataagcgtcacgtcaatgccacgtcagatgaagaccgagtcaaattagccacgtaggtgccacctcagccaaaaccggggtcaaattcttccgagggaacttatttaaacggtttcgtaagttgggggacctgttgtacccggttttgcgatcaagggacgaaaatcagactgggtgacaaatagagggacccaaagtgaacttatccgacatgcctaggcgtcattcgggtgtcatttcttaaaataggcgtaactttctcatacggactcggaatcaggcaaatgatatatccacggacatctacagaaaatgttacatccgattctcctcagctctctcccaaggggcgacacaacacgagggacgcagtggcgtgagtcaaaagagagagagagagacaaaaagagattccttcctttccacggtctaaaatccttggcccagttaggcagaccatccagccaacccactgaacagcccatgccatgacggagctgagacttgtcggtgactcgcgacacgaacgttctggctagatcgctggacctgaccaaaccaagaccaagaccaccccgctacgtgtccacccacgattggacccctcacgtggaccgttttcacggtgccttgtgatgtggagctcgtacagggccagaacactccggcgagtcctactccgatctcctcaccataatccagaacctatttaagccccccgcatgtacagcaagcatcgaccgatcacgatcattctccaagcctaaggctgtgttcgctatgggttgttcccaatagcacggaaaacggagcgatccattagcacgtgattaattaaatattagctatttttttcaaaaatggattaatttgatttttttaagcaacttttgtatagaaactttttgcaaaaaaaacaccgtttagcagtttaaaaagcgtgcgcgcggaaaacgagggagataagttgggaaaatggacgtccgaacacagaccgactagatactccattacacagcttcaccaaatcgcacatcgtagagacaagtgttgcatgagcagagcaagaaacatggcgagagataagcaatctgctttaatcgtcgcagcgttcgtactcctctgttcaggtaagcaccatggaatgatgcttggtttgatttgttttcaaaatttgcaatgtgctcaaatttgatcggttttttacttctttttttttttggttcctgtagggtgtttgtgcggagttgcagatggggcgaagggagggaggaagacgaaagggccggtgatcggcatcgacctcgggacgacctactcgtgcgtgggggtgtaccggaacggccacgtggacatcgtcgccaacgaccagggcaaccggatcacgccgtcgtgggtggcgttcaccgacgacgagcgcctcgtcggcgaggccgccaagaaccaggcggcgctcaacccggaccgcaccatcttcgacatcaagcgcctcatcggccgtaggtaaatgttcctcactagcttttcttcttcttcctgagctctctcgatgcaaatggagaagctagccgtggttgattgattgatttgggtggatttttccggcctgtcgccggcaggttcgacgacgaggaggtgcagcgagacgtgaagtatctcccgtacaaggtggtggacaagggcgggaagccgtacgtcgaggtgcgggtcaaggccggcgaggtgaaggtgttcagccccgaggagatcagcgccatgatcctcgccaagatgaaggagacagccgagtcctacctcggccagcgcgtcaccgacgccgtcgtcaccgtgcctggtttgtaatgcgaaagcttctggccgccgctccagaggttgacgacgacgacgacttatgctaagtgtgctctgcttgatttgcagcgtacttcaacgacgcgcagaggcaggcgaccaaggacgccggcacgatcgccgggctgaacgtgccgcggatcatcaacgagccgacggcggcggcgatcgcgtacgggctcgacaggaagggggcgggggagatgacgaacgtgctggtgtacgacctcggcggcgggacgttcgacgtgagcgtgctgagcctcgaccacggcgtgttcgaggtgctcgccaccagcggcgacacgcacctcggcggcgaggacttcgaccgccgcgtcatggaccacttcatccgcctcgtcaagcggcagcacggcagggacatcggcggcgacggccgcgcgctcggcaagctccgccgcgagtgcgagcgcgccaagcgcgcgctcagcagacagcaccaggtccgcgtcgagatcgaggcgctgttcgtcggcgtcgacttctcggagacgctgacgagggccaagttcgaggagctcaacatggacctgttcaagaagacgctgggacctgtccggaaggccatcgccgacgccaagctcaagaagtccgacatcgacgagatcgtcctcgtcggcggcagcaccaggatccccaaggtgcaggagctcctcaaggagatgttcgacggcaaggagccaaccaaggggatcaaccccgacgaggctgtcgcctatggcgccgccgtccagggcagcatcatcagcggcgagggcggcgccgagaccaaaggtaacgcaaatgcgtttgaattaccagcgtgttcggctggtcacgccatgagtcctcctcacacattgctgttcttggtgaccagacatcttgctgctcgacgtgacgccattgacgctcgggatcgagaccgccggcggcgtgatgaccaagctgatcccccggaacacgaggatcccggtgaagaagtcgcaggtcttcacgacctacgaggatcaccagaccacggtctcgatcaaggtaagcacatttcagctcgtgcattgacctgataacattgattcttcagttcttgagactgacgaagctctgaatttctttttcaggttttcgagggcgagcggagcttgacgaaggactgccgcgagctggggcggttcgacctgtccgggattgcgccggcgccgcgcggcgtgccgcagatcgaggtgacgttcgaggtcgacgagaacggcatcctgcacgtgacggcgtcggacaaggcggcggggcggtccaagtcgatcaccatcaccaacgacaagggccggctcagccaggaggagatcgaccggatggtgcgcgaggccgaggagttcgcggaggaggaccgccgcgtccgggagcgcgtcgacgcgcgcaaccgcctcgagaactacgtgtaccgcatgcggagcgccgtgcgggacggcggcatggccggcaagatcggcgacgacgacagggagaggatggagtccgccctgacggaggctctggagtggctggaggacaacgacggcggcgcacggacggcggagaaggaggactacgaggagaagctgaaggaggtggagcaggtgtgcggcccgatcatcaagcaggtctacaagaagagcggcgacgcgtcggccggcgccggagacgacgacgacgtgaatgagctgtagagcattttcgctgctccatgtatagtgtccgccacttcagaaaggaaagatgttgtgaagtgtaaacggatctcttaatctcttatcattagacactaatcttttttgtgttttaattaccattaatcttatctggaatgcatcaatggacaaattttgaggtatccctatctaagtctctaagctgttcatcagctagaggattaacgaaatgcaagcctcccactacgataactttgtgtttgctcctacacttacacgggcccacgtaatacaattagctaacttgctcgagctaacacgccagcaagttgcaacaatcttggatccgtaatactcgatccgacacacgagatgacgaggacgcactcacgcacaccgacatctacacatatgcatctgcggccgcgtggccaaggcaactcgcgtcgcgtgctcaaccgcacccgtcatggcgcgccaccacgaggacccggcggctcggcggcgggggcgcgcgctcgtcgtcggcctccgggccgaacacgaaccgcgcccactcccttgcccgcgcctccgcctccgcctcggcctcctcccgttcccgcgcgctcccagcccccgacgccgacgcgagcaccgccgcaacgagcaccacgacgagcaggggagccagcagggacaccacctgcgccgcgctctccgcgatcatcgtcgtcacagcgagcgagcgcgcgcagccgccacagaggagtcgcagcagcgtgtgttcggctgctcttcccgggcgtctcggcggcggcggcggccggcgccccactacatatacaggttcgccacgcgttagctttctcgtgcgcaaccaccgcgccatggatcgcgtgacgcagctagcgcgcgcctcgccgtctttcggcttgccgggtcatgaaaagtaaagccaatagcctgggaatggagaagagcagcgttctcatgcgtgtttgtgtccctcgtcgtcagctttacggttgcctgcgttggcgggaattaactctgctcccggtgatcctcggtctcatggggtaactgggtgatgcaattcattactggttgggagtttggtagtagtcgatacgcgcaatacacgagccgcacggactgaaaactgatgcagttcttgaattcgcaagaattgaaacagaaaccgagactgctttgttgctgtcgccgaaatgttgcattggattctgcaggtgactacagcggctgcggaagcacttcgtatagaaggagatttgccagattctttcgataattagtaggaaattactttgaaaataattgtcttttaaactatattaaacatttaaaaattgtctataaataatatctactttaaaaacataggataatatgtatagattaatcttgaaaattacttcagtataatcatatatatttattaatagccctacatatattcagagtcatttttaggataccgtgttctcgtctaaaacaattttttttttctaaatcgacattttttaaaaaaaatctggagagactacagagtatacatgcttcgttgactgagcccctttcagttgaagtatgcaaatcattcaggcacaacaagcatgaataaaacccactgctgaatttcataccgctatcatctatattcttgttttctgatctccaacataggatcatccaggggaaatttagtacacaataatcgccagctaattatcataaaaactacccctttccagctgagtgaatcttgttcttgtaccatcacgtacatgtcttgctgacttgtagaaccctatagctccaatagccaaccttcatttttccatttccgatgtcttcccgacgtcctactcaagagccggtgccacctcggttgggttaccttcaaacacatcagagcctgatgattctgactcttccgggaactcctgtgtttggaccgattccttgtaggaaggagtttctctgaagtctgtcgctccttcgttatacgttgccacagcgaacccacatgcaaccagctgcaaaagtatgcaaggtcaacagatacaaagtgagaaccaacatacaattgtaattttatcaggtcctcgagagataacatgaatataatcgatcaattgatggtaagaggatggaatggcatgcaaagttatctctgcagatcaggcggagacatgctgagaataatgttgaactgatgcgtgtcaatgaaaaagcaccaggtgctatcatcagtttaactcaattaagaaatgtcagatgatgtcttgctaaatagcatgtaaagaaataacttcatgtattcagcggctgatttatttccactattgaaataaatgtattcagcaaccgagcaacacacactttcttttccatccactagatgactagacactgcaatggaatcacttgtggcaagtaatcagtgtgctaagtgctaacaagcaatgcgatcaaatcctatatatatttttagaaggcgcaaaagctttgtgcgtcaatatattaaagatcaaatcttacatatgaatgaccgtaaatgaatttgaatgagtatgatgtctgatactctatattttagttggaacatcaagctcatacaatcactctaaaatttgaaacttgtaacttcagccccggacagtgccatggcatctcttctcatcacattgaagggcttgtccggaagttgtacttccattatcgaaggttttgtcgcatgcagatttcctttttgcacaattgcacattttgaagtttcagaatagaagcgtatcaattagctgaaatctaagtttcactaactgcaccaagctaaagatttacttctgagcacttgagcatggattattgataacaagttactagtttcccaacagcagtgcacaaaacgcatcaactgcagtaaagcggcaaagtaatggaggaggaggaggaggaggaggaggaggaggtgctcacgccgaagaagacgccgaacgcccacatgtactgcacgaagaagccgagggcgtcccactggggcccctcccagaagtcgggcttctccgggtcccggcagctcgggcatcggcgtcgtcgacacctcgaaccccagcggctccccttcccagtccaccccttccccggcggcggcgtcctcgtccatgtcgggcggcgcgggcgccgtgacgctaccgcctccccggcgcttattcttgccgcgctcctccaggcgccgctgcgtgcgggacgagacgccgcctctgcgcgcgcgcgccacgtgcagcgcggcccggctgcccaccagcgggaggtcgagccgggtcgccgcggcggcggaagcgggaggggcgcggcggcggacggccgcgccgccgaacggcgtgggcgaggtgaggagagacatgagccggcgccggcgatgtgacgtggaggctcgagaggctggagctgctgctgcgagcaactcctcttcctactggctgtcgacgcttctcaggatctgtgagggctgggagtgagagggagatgagataagattttcattttttctttttctccttttgttttctagttccgcttctctatttttcgtttttcatcgtttcagtcgtgtagcaggagcgctaaaagccatgaagaaactcgggtgttactgcattagatttcgccgaaaaaaaatcatgagctagttttgtctggtactccatttcaaaagagacaaaattatatgacattcggtgatttaggtacttgtataattaaagtaccctctctatttcatattataagtcatttttccttatttttaaaccattcttcttaaaacttctaccaggtttatagaatatatatatatatatatatatatatatatatatatatatatatatatatatacaccaccaaatcaattttattaaatctaacattgatcaaagctaaagaaacttgacttttaaaaaaaaagttaaaacgaattataatatgaaacggatgtagcaattttttttatcaaaataggtttgtttaatgcaataagtttgtaagatggcccaatagaaatatttttcaataaacaaatctaacatgttatttttatgtttttaaactactgtaaaattcattagtggttaaaaattttagagtttgactagacctaattcaaaacatcaaggatttatgattggagaggatagatttattaccataatataaatatagtgcttacgttgaagagttcattcttccttccttaaatataccagaaaaactatagaacggtctcccgttctaacggaatgactcaatataatagagcacgactgttttccagatccatttctcagatccgttttcttccccatctttccctgagctgatcgccatcctccacctccctcccttccccgactcctccaacccatatcgatcccatgtccggtcaccggagaaccaattgacgtcgttcctaaccctaaggcgtccttcatcctcctccccccttcatacaccagattggacatcggtgagagagatcggcgaggtcatggggccatcgggaaattggtgacgtcagcaagcggaaggtcattgcgacagcaagatcggcgttgtcttcgttgaggacggagaagaggagagaatgcaaggctgagagtgagggggacgcgcgaggaccagtgcactgacgacaaggtgcttcctacgcgtctcgagcttgccgcactgtgctcctcgctgctcgtctccattgtttgcaggtacgtcatcctcagttgataccgggtaccaggcctgatacctcaggtgtcaggtactaggtatcaagcatgatacctcgggtatcatccttgatacctcgaggtatcaagcctgatacccactggtatcagacttgatagccaggtatcagccgatacccataggtattaggtgccaagtactaggtatcaggtatcatgccacgaggaggaagcgcgggttgtcacttcctaaccagccagtgaaccatttaccaccgatttctcctctcctcttctcactcctctcctgttctccctctctcccctcgacacgctccctcctttactactgttgatgcggcccgcgaggggggtgagggacgtattaaatcgttctaattatatttgtgcttatattttttaaatcatgattggaagaatgattataaaaaattgtgattctaagggctcctttaaattgcaataatttaaaaatgtaggaatagaaagtgataatatatgtaatccacaagaatatgtcgaacatgtattgtaggaattttagaggaagaatattatcaagattagacttgaaaggagagatgatgcattggacttccaaaaggaaaccaaaaccaagaggtttgggctcatgtttgaaattccccaaaatatagaggaaaaaaggattcatatgcaatttttctagcaaatcctccaaatggaagggctcagaaaaattcctataggaatttaatcctacgaattttctataaaaacaatgtgttccaaagaagccctagacatgataatattttagtttcatgccctgataatatatatttttgtctctggtatatttgacgtttatgataagatttagataaacttcttcaagaaaaaaaaaggcatcaatagtttctcaaataccacttaatttaaaaagagataatcgcaacacacataattttcacatagcaccatccaaccaccattcctctgtgcccaatcgctggcaaaacaggttatccatgatcgtactgaatcaccatacagttatacattacacatgactctgcgaagggagtcagggtgagcatccaccagacaaccacacccaaggctacataatagctatgaaaagaacaaaacaatggcatcaacgacagctttgtcagcagctgcaaatatgaactccagttcagtttcaccagtctaggctaatgctcctcgagaggaaaaggttgtcgatgtagtctatgatagggctagaggcatcgatgtatctcctcatctccttctgcacggagcaatctgcagtagcaacacagcaccatttaaaatcacaagaacgcagaaagatcttcacccaaaggagaaatactcatttaaattcctgacaaacaacattcagggatgtcgcatttttgcgtaccagtttcgttgagcctcacgatcagctgctccctgcttggaagagtgtacatcccagcaccaacagccttcctgaccgcccagctgtgaaacggcgcgcaaacctgcccgtaagctgtcgtagcagcatcatacagcgaacattccctgcagaaaagaaaaaaaatgaatgccagaaaggccgtaagctgtcgtccattagagcagaacagaactacctgtcaactgtgtcttatatgagttacggatgccaactggccaataattctaccaacttagccaccatcggctgaatctgaatgtatatgtagtactaacaattgtcgccggccagccttgcctcagaggaggacaaaaggcacaatgaacaagttgatgaatatttattggtacgagacaagtttcagactgtcctggaatcgcctgatatgcttcagatttcatttcgaattgaaaaaaaatatggtgtgcttgggtgagagggaggcgacgtactgggtggagaggaactgctcgaagagaaccttgatgaggccgaggccgaggcggaccctgcgcaggttgcgggagtggctgccctgcttcttgacgcagtcgttctcgacgtctttgtccaggatgtcgttcagcgtgccgtacgacttcgccgctccgatgaggtcgttcacctgcagcagcagcagcagcaggattggtcattcacaagggaaatcgccgttagtacatttcttgccgccacaagtacatttcttgccgccacaagaattcttcgtggccaatcagaaaaaagaaagaaagaaagacgcaaagtcgcaaacgcgttttcatggagcatcgttgagaagtttcggtttttttttcctttcttggtttgcttttctagcgcaagaaaataacggaaaaggaatattccaaatcgggggtaggaggtgaacgctgcaagatctaatggggaacaggggatcaaacaggaataaatcgaaatttaaccagagtcaaaagcgaaatttcttgatgcgttgtgatgaagagatccaagaaacaaaataaagaatgagaaagacaataaaattaccaagaacaacaaccacgaacgagatcgagagcggtgtgggggatggacgagggtttaccttggcgacgtactcgatctcggcgaacctgaaggccatgccgaggcagctgaagaggacggagacgagcgcgcacgtgtcgccgaagggcccgaggcggagctccccgccgtcggcctccatcctccgggccagctcctcgaacgcctccgccaccgccgtcagcggcgtctccatccccttccgcgccgccaccacggccgccgccgcgtcgccgcaaatcggctccgcccccgcccccgaccacggcgtctgcgacctgaacccgagcatcctcttcctcctctccttccctccctccctccccgcgcgcgccggccaaactagccaaggcaccaccaccaccaccgccccaccaaccgcgcgccaacggacggtgcggtgcgagggtgcccgaaggacgcgcgcgcgcgtggcgcaggtggtgggattgggacgaggctggcaatggcgtacgcggcgacgcctatgtataggaggaggagaagaggaagccgggagaaatggagaatctctttgcccgtgtgggagacgaggaggaatggaacaacagggggtgagctggtcggcagatcggacgcttcctttatataggcatcagcgtcaagattcgtgctgggatataggagtacgtgccacgagcacgagtgcacgaggtggagtcagccagcgaaatgggaacacacaaaagtcacggggtcggcaaattttacacaaaaatataaagtgcatgttcttacaaaagggaagcattgcctttcatatacttgtcactcgttactatccagtttttaacatttgggacatgttcactttaatgacattttcaaccttaccaagttttggtatagttgctaaaaagaatggctacatttaatttgctgccaaattttaataactatataagaaatcttgccaaaatttggcaagttaccaagtttttggcatcaaagtgaacaggccatttatcactcatcttctatgtagaagttttatagtactatatacttagattgagaaaaaaatatttcttaatgtgatatccaccgttctttttcgcattattcaaacaattttaaaaatttaaaattaacatgataaataaatattaaatatatcatttcataaatatataagttcagatttacaatatttgagttgtaataaaaagaacaaatttatatgtaaacagtatatacaattttttttatatttttaccttgcatgtttataaagtgatatattatatattaatctattttgtttctttttgcaatttttcatgactgtttgaacgttatgcaaaaaagaggggatatgcattaacaatataaattatagcataaataaaactttcaagaattttagttaatcattttaaatgtattaatggttaaaatcgaaacactaatgttcaatgtaggagagtatatgaccttaatttgttactactgctactcatatttttctacgagtaaagaaaaaactaagggaagcttccgaagatgtttgcattgagccggaatcgaccgttgaataaagcacggagaatcggagatgcatctgggagcttcttcctaaagtgaccttgactagtgtaaccgtgtgagccatgacctgtacccaaagtaatctaggagcatcaaagcgaatatacttctctgattgcgcaaaaacctttatatgtttatggacctgtctagatcctatttcaaatttttttactctatcacatcaaacgtttaaacacctatatgagatattaaacatagattaaaataataactaattgcatagtttactactaatttgtgagacgaatcttttaagcctaattgctccatgatttaataatgttgtgctacagtaaacatttgctaatgatggattaattaggcttaataaatttgtctcgcgatttactgacgaattctgtaattagtttttttattagtgtccgaacaccccatgcagatatgctaaaattttacatcccttatgttcgtgaatgtactcgttcccccaaaaatattaaggaaaaaacaaacaaacaagagtactcgttccagcatgaaagcaatgctaaacaggcagtagacagtactactaatcattatatgtgttacactaaaaatgtagttttatggaaccgtgccagaacttcagaacgggtccggctcctcctgcgcctcgttgtgaagcaccactaaaacagtctggatatatcattgtcgtgtacaaaaatgattacgagtcaagaaaacgacccgaaataatgaaaaacaacatgatataacaggtgaagattcaggcatttcttaatgctcgagagcttcgcaacgacctggatttctttttgctacctatcggtttcggaatgcttaaaaactcttgaacatttcgcatcttcgggcaggcgccgtcgtatgatttttccgacgcaaccgcaacttgcacgctggaatgctcacgcgcgaggcccagtgacaccgcgaaaagcacaaccgtctaaactgtcgatgagctggtagtgtacagctgcacatgctgcgcattattgcgaaaaattctgggcaactgttattgagcggtacgaattcaaatatcgatgaacaggttatttgttctattttttaagtttggtttagctatgaagcaaaattcagaccgcatatgctttttgtttagtggtgattcacatcggggtgctttagacccagtttgaagcaagcaaaataggagcatgaaacaaaatcaggagaagagaatgcctcatcagttccgttttgtaacccttttattagttccgagttgcaaaccggaccacgaatccgagaaccgggtgaaataactgggattatctttagtcccggttggcggttggtggactaaaatggtagcaccacgtgcatattggtggtttttttctttttttattgtttttttttgctgtttccatcgaatgaacatcacaaattcacatatcaagatttcttttcattgttttttcttaaattcacatatcaaattcacaaactcacaaatcgaacatcacatactcaaattcacagatcgaacatcatagttcaaataaaaaaaaattactgatcaaatagacactacaacagattcacagaacatatgaaaaaatgttcatctaaaaacatctaaagtcacaaattcacaggccacctgccgccgcccacccccctcgtgtgccgccgccgccgcggcccgcgagaggggaaggggaggagggtagggggcactgtcgctgccgacgcccgccgccaccaccgcggccctcgaggggggaaggggggagggggggagatggcaaggggggtcgctgccaccgctcgccgccgccgccgtggcccacgagaggggaaggagaggagggcaggggagccaccgccgctgccgacgcccgcgagagcggaggaaagggaggagtgaaggagataagggagagatagagtgtgggaggcgtgcgcagtggattccgagaagataagggtgagtgagaggtgagcggcaacggttttgtttttaaatttttggtatctggatacaccaatcgaaactaaagatttaaataatctttaatcccggttggtgttaccaaccgggactaaagtgaggatcttttgtcccggttggtgccaaccgggactaaaaatccttagccccttgacaggccgttgaaccggttggtatcatatagtccctttggagtttttttagtccggttaccataggaaccgagactaatttgatttttggccaacccagcaaatatggtttctccagcagtgaacggaactccaaatcggaaatatttgccgggagtgaattgtagtgcttccttcataaagaaaaccttaagcataagcatatttcatttttctgtttctatataaaatgagatggtcatttatgtggtttttgtgtattcgagacttagataagaaaatgtgtttaaaaaaatcatctttccatttcgtttaatagtgctattaaattattgatcgaaacttgtacagttatttattttattacttgttttttacatttatgtacaattttgttttcttcattactcccccgtctctaaatatttaacgccgttgacttttttaaacatgtttgaccgctcgtcttattaaaaaaatttataaaatatgtaaaactacatgtatatataaaaaaatatttaaccatgaatcaaatgataggaaaaaaataataattacttaaattttttaaataagacgaacaatcaaacatgtttaaaaaagttaactacttaggagacggagaaagtatatgcgagcgagatattttttttaatgaagaaatatgtaatttttagattgaggggaatatatacgtacatccacgcgttgccacgcgccccagcgccgtgccgtcgaggcatcgaaattcgaaccacgcaacacggcaagtcggcaaccgaaagtgtcaaactgtcatcaaccacatttacctccccggtcacgatgtatacagtatacgtataggtgctattcgacgctgtttgtttgaaattgaacgctagctagcgcttgcacgttcactgttgtgcacttgtgctcacctgtactccatactttttatataaaaaacaatttcttgtttgacattttttttagaaagttcatcgggggagattttctacctgaattttttttagattggaaaaaatacttgtgcgtcacaacgggtgaaaactattttaatcttattattgttatagttaaggtgaaatatattgtgataactcgtttggatatatatatatatatatatatatatatatatatatatatatatatatatatatatatatatatatatatatagaaaatcatgagatgtaattaggagtccgatcgtcttaacttagtatgcgagttttttaaaagagattatacgattccttctatatttttaaaagcgaacgaatttaaaaccgatttaaatacggatctgtatttctaaaaacgaacaaacttaaaaaagacttattcacggatggcgtaccaaagtactggcaaaaacatctttaaaggtacttgtttgacgtgttagaagtggtttttatagaatgaagagaatatgcacaaacaatttcatcacactcattattaacattgccttacaaacatgcaagccatataatattactatactataaaaacattttaattggggatactggtcaggatctgaatactttagttggagcattgggagtttgagactatcgtcaagtgtgtccaactcacctcgacaaaatgaggggaattctgctgggagactgggaggtgagccatgccaattgccacggttcttgatagtaagtgctctctctctatctctaatacaaaactatagtatgacacaaacttttatttagatttacagtattagttttgtttttatgagacggacggagcgtacatcttctatcaaatatatacttccgtcattttagccttttttttcaaaatgtatgtcgttttcatatttcaaaagtacgtattttagacatgaattttcctttatgaaaatattttcgaatgtaaaaacagcatacattttaatcgttactttgacaaagacaatcaatagcgtgtggtttttgtttcgactttcagagcagtcagccagtcacaactcagaaaaccgaaaaccagagtcctgataatgggactgcatgatgacgctttttgggccatcgacaccctctcgcctcgctgcctcctggtgggtttgaaatctagagttgctttctcagattgggccgagagttgtgcatatgacaatttggcctcaatagatctaagcaaccgtttaatagtctaaaaacattctgcatcttcttataaacggatacaaatggtttataagtcagacatactaatgcatataagtatgtactactactagaattatagcacgacagtactaccatgaaaataaaaagaaaaagagaagcacaaattcatgccttctcaaacacgctgccattaattaggaaaaaatattagcatacgaagaatttctcaatactccactgtatggtactctccaaaggttacttctgctacaggtttctttcatttaccgatttcctggcaaactcaaacagaaatctcgttcacaaatttccgcgcctctgattaattacacatgaatgaagtgctgcagattcctgcgacaaaacatttaaaacccttttgttccaaatgagtactatattttgatgacttattttcttcagagttcagacattccatgatcctttgaaatgcaagattgtaaaatcaaaaaaacataaatgcgcatggataaaatgtcatacgcccattgaattcggatatagaaataaaagacaagtgaaagttttcatatgaaatatcctattacatagaaattccaaatgaatctatattcctttgttccaaaggagcatattggaatcaaactcttcaaaaactcttcaaaaaacaatttaattttctctcgttacaaaggtgcacttttacgagtttctcttaacccaaatctaacagtgacaaagtgagcgtagctcgactagttagatccttgttgtggcactagcctatatggattaaaattctagacttgacagttgacgttagtacccgtatttatgactaattattctttcagtattaggcgaggtacctgtcaataacaatatgcccgtcatgtctgtgggtttataatgtgtttttttaaaaaaattaacagtggtttttatactactagtatgctggtacacggtcggtgcacttgtttagccgcgcataccacgtgacgcgatcggcgcacggttccctccccggtccgtaggccgcagccacccccacccctccaggtcaaagccgccggggcagccagccagagcccggccggtccaatggcgccttgccacgtgccccctccctccccaccggtccactgcgcccatcccacgcagcccccctcttctcctcgcgcggactccccggtttgaccgcgcatcgccacgcgtcggctcaccattggccggggccgcgccaaggagaggccaggcgagcttcccgaggagccgcacccgtcgctttctaattttttcttttctcccaccctctctctctctccggtctccactccctccgctcctccgctcctcgcctcttttacccgctcttccccccgatctccccggactcccacagccgcagcgaacaaatcccgcgcgggttgggaagagcgagctcgtgaggagagcagagggaaagcgcgagggggaaggaggaggaaaggtgatctcttctctcccccctttttcttttttttttttgcttgtctcgctttttatttttttgctacctttacggttgctgggatttgggggagttggtggttggttggttggttggtggttgcgtgaatccgaggggtgaggagaaggaggtggagtgttcgttcttgatctttcccgcagttgcacttcgatttgagattgctcggtacggatctgcagctgttgtttttgtttggaatcgtgttagatctagggttggagggtatggctgtgtggggttcgaggtcagatctgatgcgaaagtttagggttcttggtgactgtgagatgtggctgtgtttagttcacgccgaagttgtaagtttggttgaaaattggaacgatgtgattgaaagtttgtgtgtgtatgacaggttgatgtgatgggaaaagttagaagtttggaaaaaaactttggaactaaacacacctcgttttattttcttgccatgtttactggagatcgtgttggggactgtagtgaagactcgagatctgcgtggaggaagcctgtatttgattattcacacgaaatatgcacgcatagctgttcccctttcgagctaattcggttcatcgatctatcgtttttttacctattagatgcagtatgcctccgttgaactgcagatctagtcatttcgctgctgttcatgttgttttgaactgttagtctgtctgcttgctcttctgtggaagaagcagcagtggcgctgtcgttttcttagcttgaggtctggtggtattggactagatcactggtttggcagccactttcttgttgatttgtctgacggaatcactcgaaaagtaagaaaataaaatggagaaagtactctagtgaaagggggatggactagaatatttagttgcctgagaatgattcctttcgttcatggaaaaggcttgcgcttgttgtctaattgggaaaatgatgtgccatccacttggttggaatctggcaaagtcgtgtgatttgtatgatcttcttgggtttcatccattgttccttgggtggatggtgtctattatgcttatctccacttgggctagttttccgagaaccgtatatgttcttgtaaatggtccacaagtgatatagtaggttgtatctgtgtaagtgctgatatgcattatttgcaggtgcacaaggtcagactaagtttgcgttgaagaacaaaggagaggaaaaatgtcgcctgctgaggcatcgcgtgaggagaatgtgtacatggcaaagcttgccgagcaggctgagcgttacgaggaaatggtcgaattcatggagaaggtggcaaagaccactgatgttggtgagctcaccgttgaggagcggaacctgctttctgtggcttacaagaacgtgattggtgctcggagggcatcgtggaggatcatctcttctattgagcagaaggaggagagccgtgggaatgaggcatatgttgcatcaattaaggagtaccgtagcaggattgaaactgagctcagcaagatctgtgatggtatccttaagcttctggattcccaccttgtcccatctgccactgctgcagagtccaaggtgttctacctgaaaatgaagggtgactaccacaggtattgatttctggtgtttcaggaattagcagtagctaacagtttaccttttttgtgtttcctaaggtttattttctggttttgaatgtataggtaccttgctgagtttaagtcaggagctgagaggaaggaagcagctgagaacactcttgtggcatacaagtctgcccaggttggcctccgtgtacttttgccaatatatatggtgtatagcggtgatatttagtttgctatatcattatatttttcttggagtagctttataagttctgatatttttatgtcattcctaccagtgattttttatcctccatgctgtatcttcttcaccgtaggaaaatacttccagtcttgatttattttataagttcaattttcatttatgggatgcatatttgctcatgtttgagacatacgctgctatttatggcatgtatcatgtggcaacgttgagttatttattgcagcttcatggattttgatgcatatttatcagcagaaactgcacacgatgacacttgattgcttttttaggatattgcactcgctgacctgcctacaactcacccgataaggcttggacttgcactgaacttctcagtgttctactatgagatactgaactcaccagaccgtgcttgcaaccttgcaaagcaggttagtttttcatttttttcccttttgaagtttgtatcttcttggtatcttgtattacttaataacctgaatatttgaaactgaaggtgcttgattgctagtttttcatgaatagttatgcattttttttatgtagcaaaattcacgtgcaagcatagaatttaattttgtttggtaaattgagggaaaataactgatgattgcttatagtatgcctgttactaagtaaagtaaatcttctgtctttgtattctgttcaaccttaagaatgctgttcactgtgttttattatgcattcagatcagctgtgatgcgccctcttgatttgttttcagtatgtatttatctactccgctgcgtgtgttccatgtttcttctagtttgttgcatgctttttctagtttttagcacatcacattaaattagctactgctcaaattaacatactgaacgggctaatccttcagtttttcatctagttacctctgtgaaaaatgttgatcctgtcaataaatttctgttcatatctgaattgttttgtcccctagctttgatctggataatactgctttttttaaaaaaaatctgaaagatcaccaattaaagcttcgtgtcccttgaaactagagcttgttttctcacttggtaaagtctgatgccctcttgtctaggaatatactgaaagatgctaacttcatgtctttattttaggcgttcgacgatgctattgctgaactggacactcttggcgaggagtcttacaaggacagcaccttgatcatgcaacttcttcgtgacaatctgactctctggacctctgacaatgcggtatttgctctaatatgcttattatttttcctttcattcatttatactgtaattgttatcaaaacgattttctggcatctaatcttatgttcctctgttcttctcccttcaggaggatggtggtgacgagatcaaggaagcagcgaagcctgaaggagagggccactaatctgtcctgaagtctatttctgagtccatttactcagctacctgctgtattactggatcataagatgtactaggatcaattgctatgtggaatcataagattagggctgcgtatgtcaaaatgtgtcgagctgaagtacccagtggacacagtttatgtgcactacattgcttccgtgacttatttactagttaattagcaactttcaaccacttcctgtatttgcagcacattattagtatcgctgtattagcgttttccatgggctggttatgattgagaatacaggccaggcattgcatgtcctttatttgtaagctcgatgtggacacgttggaattcgtgcttttcttattgtcatgagagttgagatgatgtttggattggcggcatcctgtccgtccaagggtcaatgttattttgaaggctagttcatttgacccatgaactcttcagtttatctaaatacaaccataaacacagtttatctaaatatacccataaatacatttggccccctgacgcaggatgccaagcttacaaatctgtcatctcagcagcccggaggctttcggtgggaggagtcgatctttgaactttttttattttaaaaataaactcccctaaaacttatttttaaatagaactcttttggcatggcaaagtaatgctaccatgccagctagtaaatacgttatttgatcacacctgatttggctatcctgataacgttgtttcgtcgtgccactatggttgacgtgtcatcataaaattatcatattacatgtgacatgactattattttgttgtttcgtcgtgccactatggttggcgtggcatcataaaattatcatattatgggtgacatgactattattttgtcatgttaggtggattggcgttaaaaaagatttaaattttagaaataagtttttagacggattatttttaaaattgcaaagacaaataaataataaaatttcgagtctctacctttaggctaatcggatctatatatcagctaggaagcacttgaataaaatgcatataaaatcatgacgatggcgatggttgtttttgctcaattgctccaagcagaagcgtcgatcccatacccaatcctacacctcttccctgatagcctctcgtcttctcttacctccattgacatagctattgtatgagattgaatttttcttatgcttcttgcttcgtttcaggttgaatcacaaacatgatgagtcgtacgctgttaatgattatattgtagtactagttcataccccatgcgttgccgtgagactttatggttataaacatcttcataacttttagtttacagaaataaaaataccaaacatatatatctaaatataatcaggttgcgaatatcaagtgcataaaaatgcttagttgcttctcatgccaaatgcactatgggtgtatggctcatcaaacagctaggatggctcaaataagagaaatgatataatctaatagtctatatttataggtgatgtgacttcttgtatgataagtttacatgagttagggggtgtttagatggggctaaaactttttagcccatgtcacatcggatgtttggacgctaatttagagtattaaatatggagtaataaaaaaactaatttcatgaatgagagctaatccgcgagacggattttttaagcctaattaattcataattatcaaaagtttactgtagcatcacattgtcaaaatcatggcgtaattagactcaaaagattcgtctcgcgaattagtccaagcttatggaatgggttttgtaattagtgtatgtttaatactctaaattagtgtccaaacatccgatgtgacagggacttagaataagtccctggaaaccaaacagccccttaatgctctaatgggttaaactacgtaggaggaatagaggatttgctcttattgacaaccaatatttactatttattcattttatgtagacagagttccaccagagccctagttttagttaaaccaaatcattgaacttctatcaagccaaacattcaatttagtcacatgattattaagctcattgctcgcttaattctgtctcctctgataaactgatcccacaacctgatcgaacaagttagccaaagaaccgaacgagacatgtctcgtgccctcacccacaattggactcatcgtaacgctattgtcaagtcaccgccataaccatggctgcttcctttccttacgaaattggggagatggggattcaaagtatttacaccatcacatagctatggctgccggtggtggatgagtcttctggatcacttgaccttttggttgtgaggctcgtatgcatgtcagccactcaaagttagagaactgtatatcaaagaatttgttttcgccaacgtcttgaacctatacgagtgaagatccagccctcgaataggtggagagtagccaaataacattttatatattcaattttaggtgtggtatatactactcctctgtacttaacatagttataactacactactttatagtataattacatctgaaagtttttggagagcttttctgtcgaaagtcatatacatagtttttgaacaaatactacttcaattattaaaatgttggattttgcctaattgctctcatgccacgggtttaagtgttgttgtacaaatatcatgtccgtcagtgtattaaagacctactcccatatccaaaaggaaaccccgtatctctttttctcctcttctcctcagcattcgtgtttttatcttcttaccataggagtgtgaaggatatataggtaaaagagaagattgtttcttattttactataatattctatttagagagcattttactcttagttcatggtgagtgtcctactttccatgacggtgtaagctggttggagatatatcgactagatatgagaaatttcagttcatttttccaaaaaattccaatcatacaattcaaatgcccaatattccactaatgacctcaagtttcaattgaaattgcaaaaaaaaaaaaaatcctcttcaagatatgaaacaaactttcaacttagaaccatagaaagtatcggctcataatattgatatctcaactccaatcacaaaaactttgtatctcaaaatccaactcaagtttggcatcgttcttttctgaataagatgtatgttttatctctgttctcattaccatgattttcatatcgctaaacggtgtattttgtgcgaaaactttttatatataagttgctttaaaaatatcaaataaatcaaattttcaagcttttaaaaattataacttaattaaccatactaatgtctttcttattttctgcgtcgtgagtttatcttcaatcagtttcttattatttcccccataaaaaaggggacaactttcgtttagcttgagaagggagaagccacgcccagaacgtacgccactgacgcgttgcggtggaaccaccgaaccaacgggtttggcccggacgtacgcaccagaccaggctcgctgcaccaactgcgccaaaaccacttcggacttcgcgcagcaagcagatcgcgatatcgcatcgcttcgccgtcgccgcccgccccaccggatcccgcgcagatccggacgcccagatcccacgagccccatggaggcctcgccggccgcggcggagcgcgaccgctcgccgccgccgccgccgcctcccccgcccccttcctcgtcggccgccgccgcagcggcgatgtcgtcgccgctcgccgtcgtctccagcttctggaaaggtccgccctggtcttactcgccccctcgtgatgatgatggtttgagttggtgagaccggtggactgggttggattgggtcgtctcccgttcaagctttcggggatagtgattgccacgactctagaagaatttgtctgggtttgttactgatcgcaagtggagggatcttaatctcggtgaaatgttggcctacattggcacttccgttccaatctattgctagcatttgcgctctctacttcctcaattagagtaagacttgcgatatgcttaacaataagtgtgggaagcaatttcagtagcataggctttgaggatgcagttatcatcctaaactagttctgtatagccattcgatctagcaacagcctttgtacaatgagttagttatgaatgtaaactttcaccatttgcttaatgttaagaggttagtaggtatgatttgtgagggtagcatgctgctttcctgctaactgtagtttctgttagggacttataatgtgaaataactaccgagtatgaatggccgtgcactataggagaaaatcacggcgagtttgttaagttctcttgcatgtcgatgaaggttgatacaatgtaaacgttatgctatctattgcggattatctgactcttgcttactttgcactttagactttgatctggagaaggaaagaggtggtttggatgagcagggtttaaagattgcagagaatcaagagaccagccagaaaaacagacgccggcttgctgagagcactagggatttcaagaaggcgtcttcagatgataagcttagtttattcaattctttgctgaagagttatcaagaggaagttgataatctcacaaagagagcaaaatttggagaaaatgcatttctcaacatctaccagaagctctatgaagcccctgatccatacccagctcttgcttctatggctgtatgttctatctatcatctactgtagcttatttctaatccccccttccgccttagtatttttgccaaaaccacaaatttccaccaatgcttaacattttgccttgtttgttttagccagtttccatcttgttatttcctattgacgcctaagtacatgcctgaagaattgtacttgtagttgtatgtgacataaatggttatagtaactcttattgttctgtaactatgtacaaccgagcaagttgttgcaataatatgtccagttacttatttgaaactataatagtaattttgtcagattgcaaaatatagataacagttagtttgctccagcatagtagaagtagtaaattgttgaaattacaaagccggatactgcaattttgtataacaaagccagatgtctcaactttaagtgcttccagaggagagctttcaacttcattgttttgtactgcaatttcgtgtaacaaagcaagatatttctaactttaggtgctttcagtataatagataggcttcaattattttatggcactgacatttctccccaacctgtcctgtttatcatccaatccattcaggagcaagatcagaaactatctgaactggagactgaaaatcggaagatgaaacttgagcttgaagagtaccgggcagaagccgcccacctaaagaaccaacaagcaacaattaggcgacttgaggagcgaaaccgccaactagaacaacaggtctgttctgattctactcagttgcttgctctcttttcttagctagaattaagtctatttcttgttctttccatgaaggaagtaaaaaaagataagttcggtcggatactattgttttttcactcgtaaatagtgacttattatatccacatactgtatacctttgaatggcagtccatttttctgacaatttggaacctttatctgtagaaattattttaaatctagtttcagaaactcacaatgagcaatattttagctattcttttgcatagattctacattctagagacagaaatgaatattttacctaatagcaatataagtatgtttttgttctgctgatattctgacctattaataatgtacttctgagcataacacagtcaatcaaaattatgcgataaacatgtctctattttacataagtatgtttttgttctgctgacattctgacctactaataatgtatttctgagcataacacaatcgatcgaaaataataaaaatgtttctatgttatttaatttgtatgaaaagtgaaatatttttttttcaaatatgtgtgttgcggataattattattggcccaataacttttcttcattaaattcctgctgatttcttccaatttatttcaaacgccaaacttccattgttctcaagttcttcttttctttttgcaatattctttcttccatttaataattttagatggaggaaaaagtcagagagatggttgaaatgaagcagaggagtttggcagaagatagccagaaaactcttgaagccctgaaagacaggtactgtgaattaatggtaactagaaatataactgctctatgatcatcatgtttccaatgcttttttttttgtctgaagcatattttttttaccttttagtttttcatggttgtagggagcgggcattgcaggaccagctaagacaagccacagaaagtgtaaagaatatgcagaagctacatgaatcagcacaaagtcaattgtttgagcttcgtactcaatcaggttacttttattacaactgtgtaaccttgaaggtctttgtgactttatgggagaaacatgttcaaaggtttcgctgttgtgatgaagtatcatgtttctttcagaggaggaccgggctgcaaaggaaactgaagtcaatcttctgttggatgaagttgaacgggcccaagcacgtttagttagtcttgagagagaaaaggtagccttttgttttgaaatgcgagcttaatgtgtttgactagacaaatatttgaacataacattgataacagtgctatctgttttctacaaatcatgcaatgaccattattaccaataaccaaatacatggatgctactaagttctatcatcactgaacctttgcaattgaaccatatacaggttcttgattcatgcaattcctgcattaagaaatcttttaagacatttggtatacataacattattgaaattactgtctaattttatatcagaaaatcaatcgcataaaactagtagagttactaagtaaaccaaattagggaattggacaatgaaatatctagaatatctacatcagaaagaagttgcgggacttacatgagactgtagctgtagtttgcacagctattgcttgccagcgtctgatctggaataccatgttttatgcctttattgttttcctgcagggtgatttacgatctcagttgcaaacaacaaatgaagatgcaaccaatagtaggttagtttatttgcattttccatatatatgatgtattaagccttattgatttcgaaagtgtagatttgtcagcatccataattcatatattagtaacacgtggctcgcgcctttcaccagtattgctgtttattagcattttatttgtttttttctgtgcttacccaaaagtaaatgctgaacttattgtctgaatcatgttattctacagtgactacgtggactcaagtgatatacttgagagttccttgaatgccaaggagaagatcatctcagagctgaatgcagaactgcgtagtattgaaaatactttatcttctgagagagaaacacatgttaatgaactgaaaaagttgactgctttgctcagtgagaaggtactcgtcatcaaaagaccttactgtgtaaagtcgataactgtttcttgaaataactcatggcaggactgtagtagaaaacaactttaaagcgatcatttacctgtctattactcatttatcacaatccgttgtcgaaattttgttgaatataggttaatttctttgcttctatcactatcgatttctattatgctagcctcaattgttatgtgtgggttttatagaatgtaccattatatgtattagtcacatttttggtgtggattgaagcatcaaaaccatgcatatattatttggaatgatttctttctttgcaactgtttgttacccactattttactttgctaattaacttccaatctgtaggaaaatgctctgacagagttgaagaaagaacttcaagaaagaccaacaagaagactagtagatgatctcaagaaaaaggttcagattttgcaggtatttagagaaaatactcatgtcatgaaattctttatgatattttctgtagtacctgtattacatccaccagttggttctgcactcattgcatgcccatttaatgtaattgcaaatctgaactgtacatgatttctgctttcctatgttgcttcctgtagctgtgtaagtagtaccctcatcatgttgtacaggtggtgatcctaaaataatatcttcgtggtagcattatgttcttttccatcatttctctacgaagacctctctcccccttgttatgcttattcctgatgacataccaggctgtagggtacaactccattgaagctgaagattgggagctagcaacaaatggtgaagaaatgagcaagttggaagctttgcttcttgataagaaccgtaaaatggagcatgaactaacacagctgaaggttggttggcctttagtttggatactaaaatgcatctaggcgattcctcgtgcatacagaaatgcaaggtgaacttgtttctctgttctgactagccatgttcttataccttgaaggtcaaaatatcagagaagtcaaatcttcttgaggaggctgaaaaaaagattgctgagctaactgcaaaggctgaagagcagcagaagttgattttgaaactcgaggatgacatactaaaggtttaatcagtagcaattgatccttatggatatagtactttaccattttagtataatatgtcaatttgaatcatgattcatactgttacaattatgtaatctcacaattcagaaaatgaaaaaccaaatgatttattattttagtttcatcttctgaaggacatgcaactaatatatattagctttattgcagggctatagttcaactgataggaggacttcacttctgaatgattgggatcttcaagaaattggctcaaatgaagtagcagaggtaatttccaggttgttcagtatcttatttgtttaaagcttgtgctggttgaagtttgttttggaatacaaactaccaaatcccatcctcaaagcaccatatttgtttattatatgatgtataatgcctgctttaactcagcagtggacaaaacatgcaagagaaactcaattgaaaagttcaattttaaattcttatatacatcttgaagctgtcataaagatctggatttaccatgaatgttgtcagtgtacagagatgctgtactaaacctctttatctgacgtatggattaatcactggtcttttgtatacactattttcgtaactattggtttgtaaacttatgctttaatctaaaaatcctgtcttgcctttccaagtcaataatcaagctaacaaactatagtagccttgttttgccatacttagacaaaatgcgctaaaaatttccttctctattcattcccaattcgtagcaaacatgtgttattttcagttagttgctataatagaatagccttcactcccttgttaatacatattttcagggtactgatccaaggcatgcaccacaagaccaagaccaaagttccatgcttaaggtcatttgcaatcagagggatcgtttccgtacacgtctacgtgaaactgaggaggtatatttcatgaaattttgaaaagggactgtaccagtttacaatttagagcaacgatgatagtgtagttctcatgtgaattagatgtgaaatgacatgatgtgctaatttcttttagtcttttcgatctgttgtcctttttactatattaatggatagcgagatgagagggtcatgcccttgatttttctttgaagtggggatctgtatatgtttatttatgatttcatttttatctatgtgcctctttgttttgttttgttttgacttattgccattttgtgtctcctaggaactaagaagactaaaagagaagtatgaaatgctagttgtagaattggaaaaaactaaagcagataatgttcaactgtatgggaagattcgttacgtgcaggactacagccatgagaagattgtttccagaggaccaaagaaggtttatacacatcctttcaagggaaaatagcaaaatccacagcattctagcttttgacctttgttacattgtgttttgcagtatgcagaagatgttgaaagtggttcttcagatgttgagacgaagtacaagaaaatgtatgaggatgacataaatccttttgctgctttttcaaagaaggtaacaaaatgtttacgttttatgataacgtgttatatacgttactctatagcttatacatacatttaattccatatccaggaaaaggatcaacggtacaaggaacttggtttaagagacaaaatcactcttagcagtggacgttttctccttggtaacaagtatgacaccatcgttttctccctttttttctttgggttcaatttcaggctttgcctcttccttttcatggcacatactgatctttgatgataactggtaaacactagttagagctattcatggcaaacttctatgtttcgaccataccaaatattatgatcttgtgtttaatgatgttaggacttatgagtctagttaatgtgccttgcggccatgcaaacgacactctccctggtagcatgtttaaaccagccgcttcttattaatgttagccgtttaatgggagagtaattcttttctggaggaccaggaaacacctatcaatctgtcataatgcataacagatctgctggttgagttttcgttcacttttcctttttttttaaaacttatccatgtagcggaatgacaagtagcttatgtaacatcttttctatttgtattcacagatatgcccggacatttatattcttctacactattggattacatctccttgtatttacattgctgtacagaatgtcagctttgagctatctcaggtatgcatgcatcgccttttcaaaattttaaactctgttcctgagcatgggctaacatggaatatttgcacagcacaacacctgcaaatgatgaaatcatcttggacgctggcaatcagacgctaccacatgcgctctaaatggaagttccatgtgtctggtattatcacttcatcacgctgaaaaccaaaatctggggtttgatctcaggaaatctttgcataggaccatatgactgaagccatagttgacatgtattctttatgtccattagacgtctgaatacgttttctgtagataaaaattttccagatatggagacggggtggatgggaaatgacaggatgaggcgtggtcgtgcgtttgagccgttattatgtaaactgttgtatcactaattgtcaattctgtgggtaaaatgaatgcacgcctgataatgatggttgtacaaatgccaaaaggataaagtcaaacaacttgagtaatgaaatcaaagttgtcactaccattttcaaatgaaaaattttaatgcttagaacatccactacaattctagtggtctaattctttttagaggaattagtggttcagctctaatgctccttactccgaaaactacaaaccagacctgatgagctttgcctgaacaggattcaccaaacacagtactacacaacttgtccaaagtcacattatcgacagtatatttgcttgtcttcgccacaccaatcattaattctgttctctcgagctgctggctctctcgaactaacccaaaaaaaagaagagaaaaacaagcaaaaaaacatgtaaaaactaacttttccttttttctcatttcggtggggtttggatcaggatttaactaagtctttgtatttagacactaatttagagtactcccttcgttttttaacagatgacgccgttgactttttctcacatatttgactattcgtcttattcaaaaaatttatgcaaatgtataagatataaatcacacttaaagtaccatgagtgataaaacaactcataacaaaataaattataattacgtaaatttttttaataagacgaatggtcaaacatgtgagaaaaagtcaacggcgtcatctattaaaaaacgaagggtgtattaaatatagactacttacaaaactgattacataaatgaaaactaatt

SEQ ID NO: 4856 - DNA, 62917 bp, Oryza sativa
gtgagactcggaggcggggtaggtggggtgggggaggagctcgtccttgtccaccatgagcgggtactcgaggtagtccacatcctcgagggagcagctcgccgtggcctcgatgaaccacacaccctcgccggtacagtcgacgacgagctccccaccatccccgcgctccgccagccggccggcgatggggtagtagctcacgagcgccgccgcgagcgcgcgctcgatcgccgcggcgggcgccacggcggcgtcggcgcggcccttgaagacatggagggactcgatgagcgcgcgctgcgtcgggtagcggtcgagccaggacagcgggagcgcgcccccaggcgtcgccgccgatggggccaccacccgctgagccacccgcgtcacggtcgccgccgccgccgccgcggagccccgcatggtggtggtggcggcgaggtggggatctgggtggtggtggtggtgggcttcgctggctgggctcggcttggaagcaagcggtgaccgttctcttggattttataaggtctttcctgtaaattgtagtgtggccgctacgactagttctttagtttttttcttcttttttttttctttttctctgcgtgtgcgtgtgtgtgagggtgtgtgtggtgttgttgatgactggatgtgaaagggattgcccaccgcacgatgcagagatggacgaatcggatccggccatttaggggctctaatcacctccagaatttagggtcagaataatgctacagtgcttgctttacaagaaaaatgctactctcggtttgtcacatggtattgtcaggtcctccctccgtattaggatgtcgttttggacagtgacacggttttcaaaacacaactttaacttattatttcttaaaaacatttattgaaaaatgatatatgtataattttatgaaagtatttttcaagataaatctattcatttaattttcacatttttaaactcaacaacttgagagttattcatgatttatattctcaaggtttgacttaaacattatcctaaacgactttctttacgagtacggagggagtactaatcagtatggaaaatctattaatttattaaaggaatagaaaaaaagagcttccacgttcgctttcacggcttagaaattctcatattaatcggagaaaaagaaacagagtctacatagaaatacaatttagaaatagttgaaattcggaattaaaaaataaggaatattgtaagagaagactagagtccatatagaaatacaatttagaaataactgaaatttagaattaaaaaataaaaaaatattagaagaatagtataaagtatatatagaaatacaattaagaaataatagaaatttagaattaaaaataaagaatattagaagtagagtatagagttcatataggaatctaaaacaaactaaaattcggaataaacataataaaattaaaagtagagtttagagtccatataaaaatacagtttacaaataactaaaatttgaaataaaaaaacatgggaagaagagtctaaagtcaatataggaatacaatttagaacttagaagtaattgaaattcgaaattaaaaattaaataatattgaaagatgagtttagagtacatataaatacaattagaaaaaatataaaatttcagaattaaaaataaataatattggaagaagagccgatagtctatatagaaatacaatttcaatttacagataacgaaaattcggaattaaaaaataagaaatattgaaagactaagtgtagagtccatataggaatatattttagaaataactaaaatttgatataaaaataattaataagtaacacgtatataaaatacaatatgaatattacacattagtagtttcataaagttagtacaaaatttaaaattatgttgtcattttaatatattttaataataaattgagaaaacatatatgctattatataagagaaaatataatgatactatctgcgcaatctgcggaccaccatgctagttagtactaaacagacagtatgaaaaatttggtgtactagctttttaaggcactgttcttttttttcaaccccaaacttcaattttctcgtttttcgttatcacgcttttcaaaccattaaataatattttttaaaaaaattgtataaaagttcttttaaaaaaataaatttattttaagtttataataattaatatttaattaatcatgtgctaatgagttttctcattttgcgtttacaaaaatttttcctccaaactaaggcaaagaatgtaaccaagagtgaatgtttgttgccttgataaaatttggtattaataagaggttggtttcgtcaacgaaacaaacagtcttttactttgtactagcagagtacatcgtacttgtgcagtgtatttactgtaaaacaaattgaaataaaattgtactgagtttgataataatgcataaacttactgtccatgatgccaactcttaaccgtatgagctctgctcaggaagcagtaagcggggtaaagcgcgtggcacgaatttttcttcagtttgaatcagtacaaaccgtgtaattaaccttttctctgagttcaatttgctgctattttttcaggccagtgtacgtacggcaagttgctgtcgacgaccgtgtgtatatattcagtgttctgaacgcgaagttgtcgttggacagcaaccagtgtcttcttctcaccctgattaagcaatcgtttctctgcctgcgaaatggacttcatcaaagattacaagctttaagtgtaaaaaaagaagatcattggtcagtagacctaatcaagcgtgacaattgggctgcaacttcgctctccttttattttcttttttgcttttgttattcatactcactttgcttctttattcagcttggaagcattaggtatttgtcacagcaaaggtgtgcaggtgatacttgaagtgaactaatataatccctttcctaaaccagaaatcgctaaatccccagacggctggtgatcaccagggggtggctggctacactacacgtacacgggaagcaactcgaccccactgtgatcaggatgatcggtctcaattgctttaggccttgttcggttgcttgggaattaatccccaagggatcctatccagggagggattgagagaatccctcctatctcactcaaatcatgtggggttcgaatccctgcccgtttctaatccctgtcatataaaccctgccttcgtttagcacagggaaatataaagcagcagctgtacgttcccaagcaagcaatgaaacaatatgcattctcccagatcaaatccataggacgcagtaaaaaaaaacattgttttagcacagggaaaacacacatgcatgctgtacgttcacaaatgcatacatgaaagtgtcacaaagtaataaaaatggttacagttcagttgtttttttagaataaatagaagtagccagctaagagctaaactacaaattgaatgcaagtgtttaagcttagcactaatgccaccatgagcttcagtcacccagctgcagtgttcccatctctgaaaaaaaatggagcaaaattggatcaattccaaaaagaaatacaccatatatgttctttcctgtcaaccaaatatcaaattgaacaaatgtagagtacagattacataagagcaaacaagtaaagcaaagagccacactaatatccaaactaacgctgatgcactacatggaatgctaacagtctgatagaaccaaagatgaaaagagacctaaaagttcaggaactaggaagctaacaaaaaaaaaagctaacaattcagccttgacaacatagtaataatgaagtacataactagagccacacggtaccttaaaaaacattcttttatcaggagcaaagcagatgcttcaaagtaaataaaattgcactgctatactgcttaagtttagctttttcagatgctaaaagtagtatcagttcagacttgagtgagctcatcagctcaagaaaataaaagaaaggtgagtagcccataatgtaaatcctggtttacagccctaaacaacatgcatgtaactaacaacagagagtcacacaggacagagtgaagcccatcttactcgcctagcagaccaaaaaagatttatatggaagagaagcggtacctttcaagccatctcacttcttaaccaactcaaggcagattctggatcctcatcacaagcactcacaaaaatctctctgttctctgaattcttgaagacggtatatgctttgaccttttctgcctttgtcacatccatcgaattcagaacagatatgcacctcttgattgaaaaatcattactttccttttctcttgctaaatgagcctccttttctcttgctaactgagcctccttttctcttgctaaatgagcctccttttctcttgctaattgtgcagcctcatcttcagtttgtttggtcctcatatcaaggtacctttccataagtccttctacgccaacactcttcttttgcctcttgggttctttttcttctttgtttcttggtacagcaacaacccttctatgcggcatctctttaagcctttcagcatttgcattatcatcttcagttgcatctacatcatcttgtacttgataagccaaggtgtcctcataatctagaaatataatctcagtgttaccaagatcatcttgatcactctcaacttgagtaatgattggatgttgcaatggctcagttgaggtgaaattgtaggttccttctgcagtatatcctacacaagaaaattgagtacaagaaagggtaagcaagaaagcatgattataacttgtgatattgaaaacaaggattacagcttgtgatagaactaaccatcgtaaagttctcccaaggcctcaaatagagggaaagatttggtgcgaaacttcttggctttaggaaatgactacacaataaaaggaaaacactaaaaagatgcataatgtaattaactacaaaattaagtaatggtcagaaataatcttacgatgattatattgttccatatagcaggctcagcctcaatgatgcatctctggttattccatgaagctccactttgttttctagcctctttcagcatcctatattctctttttagctctttctccttttcttggatttgggactttgttaagcagacatatctgtccttctcatggaattccttcacgattttgttccgagcttctgaagtccatccattctgacccctatactcaggagtgttgtgctcatgcaataactcaacaagaatcttctctagggctgggttccaagaggttcttgttttttctacacaagataagaattgatgtataatctacatttaataatttcaaacatgaatttcacatgttctataattgcatacctattggagaacctccatgcttttttgtaggacgacctttcggagagttcttcttttgtgcagctttcgctaaaagcatggtcaaccttggagaacctcttccaagcatattaactgagaaaggatgcataacacaatattcataacaaaagcattgtagcaaatgtatgtcacatgcaaccaccatagttcatttataacataatatttgtaatatgtcgtagttattacagctcacaaaacatcaaaaaaaaatcaaatatactacttattacaacccactaattcctatgctgtcgatagtcattccacatttgatgtgctatcgtgtccctcaaaagattcccttgattagtgctttgatcattgccttcatcaccatctggcaggtcaacataattgcttggatggatattatgtggttggttatttaaccattgctcatccccattcagtgatcgaataatattatggaacactgcagcaaccactggtatcttcacttggttattgattttgtggaaagttgcaactttgaggatagggaagcgcttctttacaacccccaaagtcctttcaacatgattcctcaataccgcatggcgatggttaaataactctttgtagttttgaggtctacgccgacctaccccatactcctttagatgatacctgactttacgatatggtgcaaggaaagaattggtgttggcatatccaccatcaaccaaatagaactttccagggggtacttggaagcctttgtttactgcagaggtaagaaccctggcatctgtagccgacccctcccacccagtagacatgaaagtgatcttcagatcaaaatcacaagctatcatcacattttggctaagagtatttttcctatttctaaatggagctgctttgtcagatgatatagatatgggtatatgggtgccgtcaattgcaccaaggcaattctgcagcaaaaaaaaaaccacatatgattttctaaaaatgtaaaacagcatattaataaggatataagtgtttaggtaagaaccttgaaatagggataaaatctaggatctttttctattttccaatgaacttcattaggatttggaggcttcagaaaccgcttcgagagcgaagggacaactgagttgaagaaatgctttacgtgacgatgaaagctatccccactgtgcccaaatttctcttgcaaatcctcaaatgaagcattgtgactaagcatgtataagaagaacgccaacttctcttcaactttaatcctagtatcatcgaccaacttttcagttctaaggtaattggccaaagatataaatatttccggctccatcctgaatgctacccggcaattttttacatgcccttcaagcaactcccgaacacgctcctcgcatgttatctttgatgtatggcatcgcttcttttcccttgctccactagaactcaacaaatgtagtgcagggaaaataaacaacatcatatcatcgtcctcctcttccctcctctttctagcgcggtctcttgctctcatatccatagtagtactatagatagcacacaaattatttacaattttgcacttagcacagcaacaaaagatctagaaagataatcacaaaagaatcactaaactatgggaattaatcttaagaagatccaagttatgaagcatatttaaaaattgatgggaaaaatgaaaagaacaataagaatctttttttcttaaagagtgcacagtgcaacaataattgatggcagtagcacttacagaatgtatgaaaaagcagattacatggcagtagcacttaccaaatttagttgtcaaatttagttacagatgatcttttattagttagcgccgagcatgttcagaattcagaaatctgaaaaatctgagaacttgtatattctctatgcttttttatacaaatttaaccgtatgttgaaaggaaaagaaattttggtctacattacaccacttcttttattttttatatttacatcacaaaatatagataaacaacttaaagcaaagggaataaatagatctagtacctcttggagagggtacaaggtcccaggaaggagagggtacaaggtcccaggaaggaggaggttggtcttctccaactctaatgggtgcacgtgcaatctacaaaacaagcacaacttatacacatcactgacaactcaaattcagaactagaactagagttacataaaacccagaactagagctagctagcatcaaagtaggagctgctgtttttcaatcaaatagaaggatctcatcatcaaatacattataacatgggtacagaattaatcacccaatcagctcatttaacactagacatattagtgcttgaatagctatgataaacatgttttatacaagtatcatgttgaggaaaacaaatctgttagtctaatgagactaaaagctactgttgttagtttaaaataaatcagtttaagtatacattactgtatatactactgcaatttgttgctagtttgtttgtgaaacaatgacgatagaattagtttacaattcagaaatgttaaactaattacagagtacctccatagctctacaatcctcaagattaggacacccaacccttgtaatttccaaacagaaatataaccaacaaccacaagttgggactccgaaagcaccaagaactgagtacttcactgtaaaaacttgtatagtcaattttacaagacatgctcaggcaagcatcacagcatcagtcacactaagcaaaactaatcaaggcaagcatgtttccatagccaccgtacagctctcgctctcaccatctgctgcctcaaagccaccgtgaatcaagaactcaaatcaagaaccagagttgggcggtgcggtggcggcggcaaatcaagaactcatccccacccaaccaagaaaaaaagctccacgcccaaatcaagaactcaccagatcgagcaggatacgaggaggaggacgacgaatcgctaagcgctcactcaccaaaaagctgcacggcgagaagagagatggcggcgacgacaggaaagggagaagagaagaaaaccctaaccctagctttgcaagaggagggaagaaggggaaaggcagcgtgctcaccggagagaaggtggcggccggaggagagagccgtgttgtcgccatcgccgtcgccgtcgcctccgggtcgcgccgcgcgccgccccctccgtcgcgtcttcgttgcgccgccgcctcctctcgaggaaattttccacgccccaggagtagatgattttttcccaggcctagagaagagggaaaccccatggtgggccgggctaaaattcacggtagggcttaaccaaacgcacaatttcgcatgggccgggattttttcctcgccggggtgatccacggggattgggccccgatcccggccgggaacagcccaaccgaacaaggccttaggaggttcgatagtcttgagtgttcgtgcgtggttcacacggttgtttttggtgggcggaagtcatagaggacatgtgtttgcccttggtaagttctgaacaatcgatcggaggcatggagtactagtgcaaggctttcttcttttttttttgtggggtggggtgagaggttggtgtctgttagatggatctctctccccttgagcccaacggctcaagggggccttgaaccacgctctgatcgggggcgcccaacccaatggctggtgggccccgtcaccctgcgccatataaagaggggtggatgacgggacggcacaagacacgaggttcgtcgccgccgccactccaccccacaaaccctaaccgatcgagggggcacagccagtgacgggaacacgccaccgccgcgccacgcctcgtcgtcgacaccgccgctgcatcaccgccatcggcactgagttcactgtcaccgccgtccacgtcaagcccgcgacgacaaagacgatggccggccgcacatcctcctcctcaacattgaccggtcacatccctaaaccctctcactccctcttttttaattcatctattgttgttcatccatccaaagtgttctacctgactagatctaaacctaggtgatccaatagacaaccctaacaatggtatcagagcaaccctagggcttagatcggttcggggatagacatccacatataagaaagaaaatccaaagatcaaaagaaaagaacagcacacgatccgtacgggtcgaaaagaaaagagactcacctaccgccggcgccggctgccgacgcgcgcgggagagaaaagagggggcggcgccgcgccgccggctcgccgggcgccgctgcacagccgcttgacggtggcgcactcactcttgggtgagtgcgcatgtcggcgaaggggggtgcgacagcaccgccgcgccgtgccgccgctgcaccgtgccgccatgccgccgcgccgtgccgccgtcccgctgtgccgtgccgccgcgctgtgccgccgtgccaccgcggctagggtttcggccggtgaacggctagggttttcggccggcggactgggtggtgtgggtgtttttgtttccccgaaagtggcgctcggccgtccgatcgaaaccctagcgatcggacggtcggtgatggctgggctgattttggcccaagagggcgcgcgccgggggctcctttcccggcccaggcccaggttgtggcctgggggggggggagggggcacccacgcgcgtgaaagcatgccgtgggccgaccggctgcgccgcaataagtttattttaggtccctcggccgaagaaaaaagaagtttaacaaatgtccctatttcagaagctttttcaatatgtttaatgattgtgtttatttctaagcattttgaaccaatgtgaaaattgtttagagaatagataaatgtgagaaatgcttccgaacatgtattttgtatattttcatgcaaattacaatagaatttgaattgtttttgcatgttttacctctgtttaaatttgaaccaacgggagaatttttacagagtaaataatagagtttttttattgtttatatgaattgtatatagatcttccgctgcaaatagatgaaattgatgaaaattagtgtttctaaaattaaatttcgaatcaacgggagattttaattttaggaacattaactatatgctatgatgttgtaattttcggaccaacattgataattgcaatgttatagttatggctctatgtgttatgtctattttctgcccaatggtgatgtagacttaatacataatattttttattgttaattttgttctcacaatacatgattatctcaggtggctactccttgatgggttacataaaagatattccgaccctaacaggagataactacagagaatggaaaagagaactcgaccttgcttttatcttgggagaggtggactgggtgttgactaccccatgtcctatagaacctgctggtggctactccttgatgggttacataaaagatattccgaccctaacaggagataactacgagaatggaaaagagaactcgaccttgcttttatcttgggagaggtggactgggtgttgactaccccatgtcctatagaacctgctgaacttttcagaggtgaaaatgagtcaaatgcggaacggcaaaagagagagagggacaatgcttccctcatcatgtcgtatgaaattgaacatgcgaaatggtccttagccaacaagaactgtttggctgcggtaaagaacacgattgagccaagcatattgggctcattcctagagtatgacactgtctctatgtacctcaaaagtataaagagcaagtttactggttcttcaaagttttatgcgacacagctcataaagcagcttgtaacagagtggtaccatggaggtggtgtaaaagaccacattcttaggatgagcaacatggcttccaagttaaagtaaaaagatttgggcatctcagatgactttctggtccatctggttatgtcctcattgccagagaactttgacaactttgttgtcaactacaaagtaagtctagaaaaatggaatcttgaagagctcatctctaattgtgtgcaagaggaggaaagactcaaagagaccaatggtggctccattaaccttgttaaagataacaaggaaaagagccacgggtcaccctcctcaaaagcaaaacagcctcagcatctgcctcagcaacaacagttcacagttgagacaggatcagtgtctccactgcaagaagacaagacattccaagaaagatcgtcctgacttcctgacagtgatcatggcaaagaaaggtgagaacattattacatttataaatgaatctcattatgattggttattctagatctacatggtggatttattctagagcaactattcatatatgtaattgtttaaagggattctgttcgatgaggactacgcaaagaagcgaaagatccattagagttgcaaatggagttgaagcaaaagttgaagctattggagatcttctcctagagctcgcgaatggcttcacacttttacttcgagatgttttatgtccgttctttgcaaagaaacttaataagtgtatccaaattggattttgatagatatgattgccattttggaaatggcaaatgtgaactatggtataataatgcatgtattggtcttgttgtgttgcaagatcagctttatttgttatctctttctgagaatgtgaatgttgtgtccttgttgacaaaagaaaaagaaagcgaattcctgatgtctcatcaaaattatggcactgtcgtttaggccatatttcgagggggaggattgagagactggttaagaatgtaattcttcctccattggagttctcagttttggaaccatgcatacaatgcatagaatgcatcggtgcccaaaacactgtatgagctatggatcctccttgtgtgggggagtcctgcagaggctaaagtatttaacccaaatattgggaaattggatcccaaaaagtaagctgccattttattggctatcctgaaagatcaaagggttatcatttctactgtccaaacagttaaacaaagtttgtagaaacgagatggaaatgattaggggggagctcggtagtacgagaaattgatcttgaggagaggcgggtgtctgtacccgctcccttgactcaggaacctttcttctctctacctgctgatgttgtgcctgcaatgcatgatgttgcggtaccaacacctattgttatctctcctgtggcaacaatgaatgaaagtgaggaacctgttttacaggattcaacagaaattattgccacaccagaggaggagctgcaacagcctcaaacagataatgtgccaaatgaggaggcccctagaaggtctgaaagagtcagaagatcggcaatccgtgatgactatgaagttataatatagaagagtcgcatatggaggatgatcccacctcatatgaagaggccatgagaagcgctcgctcatctgaatggttggaagccatgaaagatgaaatgaaatcaatgaaattaaatggtgtctgggattttagaagaaattcctaaaggtgtcaaaatagttggctgtaaatgggtctacgaaaccaaatatgactgcagagggaatatagaaaagtttaaagcgcgacttgtggcaaaaggcttcacgcaaagagaagggattgattacaatgagacattttctccagtctcttgtaaagattccttcaggattataatggcactggtggcacattatgatttggaattacatcagaaggatgtaaaaagggaatttctaaatagagatttggaggaaaagtatacatggtgcaaccgaaaggttttgtcatgaaaagaaacgaaaatacgggatgccgtctaaagagatccatttatggattagaacatgcttcgagacaatggtacttgaagtttgatgggacaataaagaaattttgggttttcaagagaatgtcgaggacaactgtatttattcaaagtttaaaaatagtagatttattttcctaattctgtatgtagatgacgttctactaactagtagtgatgtcagtctattgcaggaaacaaagaaattcttgtcctcaaactttgacatgaaagacctctgtgaggcttcatatgttttgagcatagagattcaccgagatagaacaaagtatgcattgggactttctcaaaaggcatatatagaaaatgtgttgaagaaattcaatatgtacagatgcagtgctacacctgctcctatagtcaaaggcaaaaagtatggggcatcgcaatgtcccaaaaatcagtatgagctcaatgaaatgaaaataaagccatatgcgtcagctgtaggaatcctacagtacgcgcaagtgtgcacacgacctgacttggcatttgttaccgggatacttggcagatttcaaagtaatccaggcctagagcactggaattagtaaagaaagtcttgcgttatttgcaaggaacaaaaggcctcatgctgtcttacagaaaatcagaatcgctccagatagtggggtattcagattctaactttgcaaaagataatacaaagtcaacatcgggatatgtgttcaccctggcagtaggagctatttcatggaaaagctcaaaacagatcaccacttgtaacatcctcaaattttaaactaaaatttgactgcatcatgctggcttttgattaaattagtgtgttttaaaaaaaatctatttgatccttaattggttcaagtgttacttccttagaaccttgccaatttaccctaattatttcctttattccaaaccttagtgaatttgagcaaattctctcaaatttcaaactatagattatttctttagtttaccctaatattagtgaggattttctttactccaaaccctagtgaaacccttccaaattcatagtttaaattcaaatcttttctagggaaattttcaaaaattcctgaaaacactgttcattgcacacaaggtgcttgatgaaatgcccagcccacctagagcagcccaatctacccaatcttttacaaagtttagaattgatcctagggggccacaccccactcaaaaaccgtggatttctttgcttcttcctccccttcacgcgcgccccccggtcatccgacttagccgcgcgccgtgtcgccgcgcgtaagcctcggggccgcttgcgcgtgcccgatcgccttggcgtgccgctagccgtccgacgccctcagactgccattgccgcaccaatattgatgacgacaaagccgggatgacgaccgccgcaagaaatcgccgctcgacaccgtgcgctcccatccaaagccgccgccgagtccgattttgattctacccagggtgaatcgcaccaattcttggattaaagttagatggtggtttcccctctcacaattcaaatcattcacccccgagccggccgttttcaccctcgccgccgccgcgcgtcgcgcccggattggcgccaacacgtcgctagccgtttctacttgcggtcaagccaatctttcaccggtaagtattcaaacgtggcctcccgccactcaaatttatcttggccgccctctcacagcccttgccgccccagccatatctaaagttcgagctcatccatggcgatgacggtgcccgagctcatctactccttctagccctacaaataggacctcaatcccttccttgttcatcatcgatcatcaacaaccatagtcccacaaccccgaagctctgcttcaccaatccatctcatcaatcactttcgcccgtcggtcgaacaccttgtgcgcgatcgacaccacacccctccatccatcctccgccctaaatatcccttagaacaccttatatcaaccatgttctagtatagtagaccctaaccgaagccctgcgtcgagttttacctcgccgcaccaaaccgagcaccgcctctcccgcgttgctctgttcttcaccgccacgaagtttttccggccgcaatccgtcgtttcaaccgatctcggtgagttctttcgtttcaaccatctacatactacctagagtccatttttgcaatcggtttgcactagcatgccaccctctgggctgccgacgtgagcacggccgccgccaatggaggcgctcgtcggcaagtattctccgtgccttgccaaaggtcggcaagctgttggaatccatctaggcactccgtagatgctctagaacccctcccctagccatatctaactcacataatcccaatcgccttcacggcctaaccatgtcaccgccgccctagccgctaggccgctcgccgtcgccggagaaccctagctccctcccctcctcggccgcaacccctttccccctctagcaccgccgcaatcccaaaccctagcgccgccggctgcatttggggatcggccggaggttgaagaagagaagagagagagactgacaggtgggacccgcacatagtaacatttcacatttaattgattttcaaactttagaagcccatatcttttaaaatataaatccaattccagtgaaacttggaccaatattcttctaaaatcattctctatcttttgagcccctttttgttatttttctattttattttattttctctatttttcttatttttggattttatttgaattccttttgaatttgaattttatatgcttaaccctaggtcttgaggattcttctgacacattagataatatcaatcaatctcaggacatcgagcaaggcaagttaccatataccttttgatcatttaagcctattttttacaaattatttatttatagccttctattcaatattctattttatatgcataaatcaaccatagaaacccagataatttagtgttgcttactttgcttacaatctggtttaaataccttatacttagattggggtagtacgtaagatttggttgatttccgtgtggctagtactgtctcgatcaatatagtttttaccaggtacttatgtcgaacgaacgagtacgaccgcagtttctagaatggggacagacctagttattatgttaattagcaatatggcacctctgtatagtggttcttatttttaagtcctcgcgtaggaggcaactatagccgcgaagggcaactttaaccattaccatgtacaagtaaatggtttgtgatactcgagtataaactatatggtatatttctaaaccctgatcgagatgacgtggtgtcatacgatcagttccccttaaatacctcgggaacgccagaactcctcttgctgctgttaacaatacgttcagggcatatgaggatataagtttatggaataggtgccacaattgttaataacttaatactgagctatgactaaagccgatgattatcagcaagtcgtggactgtgggtaaagcgtacatctgctgcagtagaatatccttgaaactattcgaatagccgtactcatggagttgagtaccgggattcatatggtaccctggttagaaatctaaagtctatatgtttataaattcttgctataactcttccagattgtttatttctactttttgcaaagaaccctactatatgccaatgcataacatattttcatgataacttgctgagtattgtgaatactcgttcttgctctcataacccctttttcagatctgggttaagaggacccttatgactattactacgatgaccccgataatttagagaatccttaaaggttatacctccctagtcagaatgtataaaaacttccgctgtgtattaattctagttgatcaattagatgagtacctattattgtaaaacccttagtattgtaaaactttatcgtatgcaatgaagaaccggttatattgtatgtatcgatatctactgatccagggattgatacattaatttatgtcggatccaagttgttagttccgagacccgacaccactgcagggtctactatgtataccgagtttatagcatgctatgaggcaacggggcaggtgaactggctaaagaaattcacacccggtttaaaggtggttgacagtattgagaaacaactaaagttatactgcgatagcgaacccacagtaatgtactctcacaacaatcagtcaagtggtgctgccaaacacattgacataaagtactatgttgtgaaagacaaagtccgggatcaaacaatcagtctcgagcacattagaacagaaaggatgctcgcggatccgctcatgaaaggcctacctcccaacatgttcaaggaacatgtagcatgcatgggtttaagggaagcctaatgaatcctggactatagggcccaaaagttaaagtatctgtttctgaatagagatgtgtatagtgaatagagatgtgtatagtggctgtcgaatccatcagtaattaaccgtgacgatgaatcatgctctatatataaatctgtgatggaatagaaaaagctaaaagaaatagtgagatcaagggggagaatgttagatggatctccctccccttgagcccaacggctcaaaggggccttgacccgcgccctgatcgggggcgcccagcccaatggctggtgggccccatcaccctgcgccatataaagaggggtggatgacgggacaacacaagacacgaggttcgtcgccgccgccacttcaccccataaaccctaaccgatcgagggggcgcagctagtgataggaacatgccaccgccgcgccacgcctcgtcgtcgacaccgccgctgcaatcaccgccatcggcaccgagttcaccgtcaccgccgtccacgtcaagcctgcgacgacaacgacgatggccggccgcacttcctcctcctcaacatcgaccgatcacatccctaaaccctctcactccctctttgttaattcatctattgttgttcatccatccaaagtgttctacctgactagatctaaacctaggtgatccaatagacaaccctaacagcgtcatccaacgtcatcgattgtttgttatttccttgttaaagttcgcgaaaagaaattttttgggtgtcacatcggatgtttgaccggatgtcggaaggggtttccggacacgaatgaaaaagctaatttcataactcgcctggaaaccgtgagacgaatcttttaagcaattaatctgtcattagcatatgtgggttactgtagcacttatggctaattatggactaattaggctcataagatgggtctcgcgatttccccccctaactgtgcaattagtttttttaatctatatataatgcttcatgtatatgtccaaagatttgatgtgatgtttttgggaaaaaaatttgggaactaaaccaggcctttaggtgaaaatctcgatctatttttggatgataatgttggacaaacaccgtgtccttcttaaaaggtgttgttccagagcacgtgtctagctcttttgttgattgttcatgagttagttattagtctctctgttgtaaaatataattatttttgcacactgtatatctggacggagatatatccaggtatatttcaggaaatatgtaaaaaaattgcttatattttagaaaagagataatacaagacaacatgatgtgttcgtgtgtgtgtcttaggtttttttcattttatttatctttgtttttttttcttggctatgtattgtagatgtagagaccgtgtgtaattttagcgtacaataaaattcttccattatctaaaataaccaatcctgaaagtaccctcaccccctcatcataaaaaatgattatcaagaaaagttccaaaaaaaacccttcatcctctgttttcctcctgattttttccttcctcattttcaaaaacaagatcttgtctgtgatggctcaaccaagggaccgacagaatatgggaaatgaactggtaaacctgcagcatcaagctcgcacccattttcaccccacaccattgtcttgagtagggctgtaaaaaaaaaacctcgaggctcgtgagctgctcgagctcgacttgttctaggcttgattcgagctctagacgagccgaatctgagcctctccctaagctcgtaagctttgtcgagtcgagctcaagcttacaacgagtctaataatatatgatttttttgttgttatttaataaattagaagatcaaatatgttatttgtatgtcttgtattgatatcatatactccatccattccaaaatataaggcataaccacccttaatccaaagaccaagaaaataattattatcatcttgtagtttggatcatcctaataaatacaatgcatgcatccaatagaattagagaacatgagagtggaggattttaaaaagtaataatataatgaagaaggggtcatagttaattgcctacatgcgcatgtcttatattatgaaacatctagaaaagtggttgtgccttatattatggaatagagggagtatttattttattcttttttcctattctattaatacgataaaatataaattaattattatttttaaatattatccttgaaatatatatcgttttaattaaaaatcatgctcggtagtcgagctcgagcttttgatcgagctcgagccgagcctgctagacagctcgaacattttataggcttggcttgagcttatatcgagctcgctcaagcttgacttgttgacagccctagtcttgaggctaattttcaacaccattctcaccctagtcttcgtccttggtgtcactatcgtttctcatgttatcaccaaccttcctatttcaaatgacaaagggaatgatgactattaattagaggggcattgtttttttcttgtgcttatgccaactaacttttatagattctttttctgtctctaccattgccatgatgatatggcaatttgcctcaacagatcaaaactcctcttaatgtattcttttaggaagggcaacacaacaatattgtaatggacaacatatcgacccaccacaccttttcgataccaccataatacttggtcctttccattaacaaaatatactccctccatccacaacaattaggcatatttcatagtttaattttttaaaataagttgtttctatttgtaatctttatatattctaaacttgaatgtagagctaaattaaatatttgatcagaactcgaggaatcatcttaatactcattagttacatgtgtacatacactacttatctttgttacatataatataagttaattttttattagttttggtgataaaaataatatgtgtaacttttatgaaaggaggaagtaaattacaagactattaatagcaaagacatctccctttatttgtagcactttaatgaaagcatcatgtatcatgaatatattggttggttgaaaggagcttttcaccttaccctttccctaactcaagtttcatgctgatatggacatgcgaaaaaaagtaaattacatctgtggtacacacaactcgagattgcaaaaaaaaaaaactagaaatttaaggtagtgcatgcttgtgaggtagttgcacgattaaagccctgccttttgttttagaaaaatatatggcacaaataatggttatagcttataaatttataattcagaagagatctgaatcgtcggataatggacgcaaacaatatttattgtttccaagtttgttagtagtaaactacagttggcacgtaggagtagcaggtacgagccaactatgaagtagttgtttccaagttggcaggtatgagagccttgcttcgttgcatttcaaagcaatcctatttgtagtctagtcatcactcatcagtgcaatatatccatggatttgtttttctttttctctggaaatctggtgtttctagaattctagtttattgtctcaataatattaggggcatttgcaaatttgccaccgttttttcaataatattaatatgcctgctatgacgctatgatattcaaggtggaaagcaatgggccaaggccatttatttgggagtagggatggtgctttacactcttgagtggtgcttctgtgaatccctcatcaaatattatgatgcaatggagtggtcatgaaaaattcgtagaaatatattttggttttttgcaggggtaaaaaagcaagcatcctaagaaaaccagccgaaaccttgaccaatcctattgtttcgcctattcgtggaataaatcaaatggtatatttgcaaacgaaaagtaatttatgaataaaatttttatgtacgtgtttttggcgatttaaaagcaaaagctgaaaaataaaaactttgatgaaaaaaccctaaaatcagctccaaatttaaggttgaaaattcaaattttggttgataagcataagcataagcaaacagatgaggcccactaatttattttccgatttcatcatgtacttctccatgtgtgcatataatatatataaatgaatactttatactagtgtgaatgtatgattggttgattgactcgattctgcgtcaaagattgcaaatttatcaacagtttcttattagcgattgtatcatattttgatgaagtaaaacttaaagcatgcaccttcagagtgggacacacgaggtattctaatagtgatagatgggagctctccaactacttagggttagctcacattttggcgaaaaagatagaagatgacattgactttctcaagacaatggtttgtcatctgtaatttcgtcagcagaaggtactaggagcgatatgaaattcagacacatcttctgaatctttcttcgcatgcgctgccgtggcaaatttgctgatgctctccatgcctggatctttctcaagtgctgcatcaacaacgaacagacaatgtcagcaacaagatcccagtctgatactactgatccctttaattaacaaattggaggtgtcgaaattgtttttatcagagtaattttgcgtggcagattacctaactgaaaatgctctctcggaactcaactaaagtagtcggaactcaactctcacccagctttttctgtgttggctaatggttgccatgaactttcgcatcacacagagagattaagtgctcttgtattgatcgtcaacgatgccaacagcttggctaataaaaagaagacagcaatacatttttctcagagctgcttcaagaaactgtcgtgttgtccacaatcatgaggaggaccacattagagcattatctcttttattttcttttttaaaaaagaggccaaagctttgctattaacagagaattatcaacaggacagactttgattgtgctcagttgccgaaatgttgatacggactacggaggttttataaattgctgatctctaatttgatttctgagccaaatctgcatatttcggtgatttacatatacgtatttatatcggacgcggaattggggtctgatggtgcccgggcttcagaatttgaaatatccaaattcagctcgaattgaaaatgttcttttttggaaatttttttcatcttctgcgtataccacagcttgtaaaaaaaaacagctcaagttcaatgatatttcacaagctcatattacattgttcggtaactatgtttacatggcaacacgcctggaataaaaaaatagccaaaaaaggtatatgtcggttcaaatttagttcaaacatgtttaaactagtatagttagtaaacaaattattcttcataccttttttttcataaccgtttaaattaagcctaaagttttttttcataaattagctatagcattaagtttttctttacgatacaatgctattaattatgggccaaattttaattctttcgcgagtccataaatttctttgttcccgacgtcactatgaataagtccccattgactccctcaagtattggttcaatctgattcaaatccctcaaccgcaatacctaatatcttaatccctcaactgttgaaacctgtgtaatttaactcccagggcagtataaatagtggtatttgctgatgtgatgtccatgtggcatcccagtcatcaaataaattttaaaaagtgggacgacgacggggagcgacaacgagacgatggcggggctctcctctctctcccactccgaccccttcctccggctcccagcgctgctagcggagtggccgccaagtagggatgcggggtggtggtggagtacctcaggttctcaatagtggtgggctcggggaatgatgctagccgacgtcggcgacaagaccgagccaagtgaccgacttgagcttcccgtcaccccaaatggcgacaatcccgacaccctccttcccacggtgctgtagcttctgcagcccgaggttgcacagcgacattgcgtcggggtcccccatgacctcgaccagcccacactcctcgcacgggtggtcgtcgaagccgtcatcctcctcattgcctctcccatagaatggagtgacccggttgggcaacagtggcccgaccaacaacaaaaggcgagaaccactagagccgctaccgtgatgcagcagcaatagagggagagaagatggcttggaggaatacctaagctgttgttgcttttggtggtgctcgcgttcgatttggcggtggtggcgtggtggtggtggaggaggcgtgatgttgatgcgatacggccattagtgagtgaggaaaggagcggcacaagggattgggtcaagcggtggatgggttccctttcaagggtgaggtcaaggggcatgatttaaagagggttttgctggtcattgtgtgtccatcgtcccgccaccaccgccgtcgctccccgttgtcgtcctagtgatctgctgctatcaggccgagaagaagaaaaggggagagagatgtgataacatgtgggctccacttattatttttaatttatttgatgactgggctaccacattgttgccatgtcagtgaaaaccgctcttaaaaacaatcgagagagacattttagacagttttaatagttgggggagtcatcatatctagttttgcagtttagagatacgagtcagatccgaccactaggtaagggagtcagtgtggactctttccacatcactatgtgtcggatctgccaacttcccatagtgaacgagtaggctaataaaattgggaataagtctagttgccgtctacacgtcaagtgttcaaaatcatgcaaacgatgcatcctagtcagcaaggagggaataaaaaaaatatgtggggtccacatgtaattcacatgaaaaatataaaataaaaacttctcccccacctctcccccaagcacacggccgtgacgggcaccttcctctccatcctgagcttcagtcgcgaggagaagggaagcagaggttgaggatgctacagccagcgaggtcgagacggggtgcagggagaccgaggccgaggccgagtccaaggcctcccttcgaggccacgcacatgcattaaatcccttgatcaagatggcctctgttgatggttgttatcgatcagtttcgaccgtcaatattaccaaaatagaggagaactagtgatacttgcaatgcataaatatgttagaataataatattccactagtagtaggtatactaatcttttgtagagaacgacaataaagtggaggagaatcgacatcaatacaaacgataaatcaatcggacgatgtcgagaaccagacttatgtatgaatgggccaagaactcagaattgacacgacaaactaggccaaaattcaaaagtctggagaagaataacagaggaggccgccagccaaaccatgggctggttgggccggccccaggttcggcccaaccagggggttcgaccgaacctccctcatcgccgctggatgcagggtttcttctggacgatgtggattagctcccaatgatggttggagggtatttccgaccattccaaccatcacaatcgtcattgggaggctatataaaccccttaccttctcacttcactcacacacctcaagcaatagctctctcatttctctcaatttagtttggtagtatctagctggtggaataggaatagagtagaaatcaggagtccggaagccttcggaagagttcgggtatggctctagtagcttttctcttctcttttgtaagctttgtacttttattagaatactcttctatatacatttatggtattgaaatattttccgagtatatgagtacctattttacattatgttcatgttatagtgaatatacggctagcctatctgggagatgctttggtacgggtataatatttgcttatgcaattactctatgtcatgacgatgatattatagtagtatctagtagtttagacgtgatgtctagattatggaatatcattatttggggttatatattgcggatgagaggtgggccgctaatggtgacagctcagtacgggtattcctccacgctggtatataatcctaagttaattccctggggagggtattcctctgtatttagctccggttgtatgatcatgacaggctgtcgtaagaaactcggcagtcaggggtggcttctcgaagtaccaggagggcatcagatagagggtactccctccattccataatgatcagcatattttgttgtggcatcaagaccaaggagagacccactacccattttctatttaatccttgtaattaatctccatattaatcggcttggagaaacgaaacgacgttactgccgctgcatgattgcacatgcaagggatgttccgtgctgcatgcagctcaaaaatcgcatggccaactcgatctctgtgataactagttaatccatccgacatgcacatgctaccagtgttaatacgctgatcaaatcggaatatctctactttcgttatgcgctgatcattatggaatggagggagtattagctagtatatcggttaactagaatatatgtataatatgtatattagaagtatagaaatagattttctttctctttctttccacttagcttagataatatattatgagaatgagtagttaatgcttgtgtgtcactctacccttggattatcttaacccctgcttagaatatgattatcacaagtaatatataaattattagttgagttctctctacatgatcttttcacgggataaaataaatatgatacccttggaatactctcgggtgaaatgctacaatggtatatccgtgcgcttgcggatgaactctctaaccataatataccagaagtatttctgcggcattgctggaaattatatttctagtaatgtcgttaagaaataccaacagcctccactaccaccgccgctaccaccgcccgcaatgacagcatcctccccacccacaccatcatcgccatggtcccacccttcataacccacaaagacgtcgaactggaggcctccaggaggacgcgccagcaatgctgcctatgctgctgttgatggtcattagcgatcagtttcttccgtcaatattaccgaaatagaggagaactagttttgcttgtaatgcatatccatgttagaataataatattccactagtattaggttcactaaccttttgtagagaataatcattaaatggaggagaatcgacatcaattcagacgatcgatcaatcggacgatgtcgagaattagacttatcaatgaacgggctaagaactcagaaatgacacggctaattgggccaaagttcagaagtctgtggagtggagaagtccaggaggctactagccaaattatgggctggttgggccggcccttgtttcggccgaacccccctcatcgtcgttggatgcagagcttcttctagacgatgtagattggctcccaatgacggttggaggatatttccgaccattccaaccgtcacaaccatcattgggaggctatataaacccctcttactctctccatttcaatacacaccttaagcaaaagctctctcatattctctcaatttagtttagtgttttcaagctagtggaataggaatagagtagaaatcagagtccgtaagctttcggaagagttcgggtatggctctagtagctcttctcttctcttttgtaagctttgtactctatttagaatactcttctatatacatttatggtattgaaatactttccgagtatatgaatgccaactttacattatgttcaagttatactgattatactgctagcttatctgggagatgcatcggtacgggtataatgtttgcttatgcaattactctatgtcatgacgatgatattagagtagtatctggtagtttaggcatggtgtctagattacgtgatatcattatttggggttaaatgccgctgatggtgacaactcagtacgggtattcctccgtgcgtgtatatagccctaagttaatttgtcggttgtatggttatgacgggctgtcgttaggaactcggcagtcagaggtggcttctcgaagtatcaggagggcatcggatagagggtattagctagtatgtcagataactaggatgtatgtatactatgtatactagaagtataggaatagattctctttctcttttctttccacttagcttagatatttagtatgagaattagtagctccctgcttgtgtgtcactctagattatcttaacccctgcttagactatgattattacatgtaatatataaattattagtcaagttctctctattatgatctttccacgggattaaataaatacgatacccttggaatactctcgggtgaaatgctacaatggtatatccgtgcgtttgcggatgaactctataaccataatatagcaggagtatttatgcgccattgctgggaattatatttatagtaatgttgttaagaaatactaacaactcctacatgctcatcatccttgtggtgctcctcatcctggtcctctttctcactatgttccacatctacgaccccaccacccacctcgtctccacccgcctcgtcggactgtccccgcacactctccttcctagccatgttgctcgaacccaacatcacactactcatcaccatggcaatctacaaccccaacccgaccttcttcacctaagccataggggacacaccgatctcacctacatgggcacccacatcagcggcataaagatcgaccaggggaaaagctcgagctagaggagatggcaacatgacgacggtgctcaccatccataccggccgcttcgccggttacatcatgcagcttgtccgctatgtgatggccgtcggtggcgctcaacgcgagcaagaggatcaccggcatcaagtccccgaattcctcgcctccgcagccgttggtagatgcctcttgctgcttcgtcatcgtcaatcgaatttgttgctgccggagtgcagccaacagaggtcgatggaggaatggctgccatagtgcggcatcgacgaggcgcgatagctcccatctcccgggcgcgacatagactatagaggggattagcggcggttggccgcctcaactcttccctcccaagcgacgcgcgggaggtgggagagaggacacgaggcgaaggcggtgaccagtggtgcgaaccagtcgtcgtctgcctcaacctcgctaatcgtgccaccctcgtccttagcttccccgtgcccacccgctcccatgccccctcttctccttgcccttgtctttgatgtcatgggccacactgtcctcggcctcggcctccccatgccgaacctcgacctcgctggccacatcgtcctcagcctcagcctattgccaaagcttggacggatagaaaggtgtgcgtcgccgccatgcgcttgggggagaggtgcaagagaagttttgcttttatatttttttgtgtgacttacatgtgggcctcacatattttttttattctctcgttactgactaggatgacacgtcagtgaaaccactcatgcatactgccatgggaccttctttgcacggttttgaacacataaagggtagaaatttctgatatcggggattagggatgtcatacagattcgacgtaaaattgagggacagcaagtggacttattccgtaaactagtagaagcccttggccgaacgagaatatcacagtttgggccattaaagaagcccactactgctggaatacaaagccagccatcaatataactacttgggccaaacccagttaattatgtaagaaaatgtgaactccctatgggctcagatgggccatatttcctgcaccaaagctgattcataccccatgtttgactcctttggaaagtaagtccactttgacttcttcagtttcaggtgcaatctgattcataccccctaaccaaattaccaaatattttgacccatcaactattaaaccagatattttgacccatcatctattaaaaccagtgcaacataactcctttggtggttttaaaggcggttttcattgacgtgtcgaattgacttagtctctgagtctgacttgtcattacaataacaaaaataataaaaatagcatgtggacccatgggtcaggactgtttcctctctatatactccttgtttctcctctttctctatggtcgggacgacgacgatgccaacaagctagagtgggcaaggacggtcggcagtttcgacgagcacagagctaggtgccagcgtggcccgaggcggagtccgagcagctgtgatggctgatgagagggatccgcgacggggcttcacccaagacagagcgacggcctcgaggcacaacgatggtgcgccctcaagacggagcggcggcttacactgatctacagctcattgcccttgaggcgcaatggcagcacgacttgagatggagcggtggcggcacgacctcgagggaagggagctcgtcaatggcatgacctgcagggtggtgagaggttgaggagatggcgtgccggcatcactgacagcgcaatgaagtagctggagaagatgaagaaggaccccatcacccactggatcatagcattcccctccacgaagtccagcgccaccgatgccgctgcaaagcacaccaccaccgacccccttctctccctcgaccatctccgttcgtcgctacaatcccctaagtccgcccatcgctagtcattgccgcaatccactccgcctccatatcgcctcgattccctcagtccgcccatcggccatcgccgctcgctgcctgactggctgttgtgtcgcgtgtttgctagcggtccggcaccggagcgtgtccatggagtcgatggagaacttgtggaggcgagcaaacagtagagggtgtcgatggtgctgctgccccaggggcgtcgtgtggggaaaggagaaaaaggagagaataaagaggacatgacactgacacgtgggatccgcatgctgactcagccattttgactttaggtcaacatgccacgacggcaaaaaccgatctcaaaacagccgagggagtcgaattacactagtttcaatagttggagggttaggatatctggttttgcggttgggtgatacgaattagactggagctataattgagggagttaaagtggacttattcctttctaaacgaggctagaacagtattttcccgagtaaattgactttggttgaggcatgcttggattcggcctgttttggggtgtatcaggtattcgggccaaaccagcgtaaaaatttgtggtttacagcccatccaagcgtgattttgagcccatgtaagaaaagtaataggaataagtccactttgattcccttaaaaagtaacctgaatctaatccgtgaccctcaaccgcaaaaccggatagaacgactccccaaactattgaaactggtgcaatttgactcccttaacggttttggatagtggtttcgctgacgtggtgcttacgtggtagtgttgatctagcctggtcttgatgtggcgcttaggtggcatttaattaaaaacatatatgtgggacccatttgtcataaaaaaagtggggcccactgacatgtcatcctctctctttcttcttcctccccctctttctcccttctctctttctctccccttccaccgtccacggggagcacggctggagcggcggcggggcaggggccgaagtgctggcggccggcgggagctgaagcggcggtgggttggagctaacgcgggtggaggcggaggagaaggaggcggcgacggaggggcttgagtggcggcggcggtggaaaccgccccaagccacatacctctaacgaggcggctgcggctgcggctgcctctgactagcgcgctggattattcctagcctccgtcagctccagcccacttccaccaccgctccagctagctcccgtgtcagctcccaccggccgtcaccactccggctcccgacggcggggaggagcctcgacgacaggaacaggtcagcaacgccgaacctagtcgccttcttctgcgcctctcccagcgtctccaggaactcctcacgccaccggaagccgcactcccacatgatggcgcgcagtgtcaagtcggtcagcgtcccggtgatctgcctgctcacgtttagtgccgacagcggcggcgatggtgccaacgagcacacccgccaaagagtatccccaccgtggtgccgatggagtccctcactgtacgctcagccatagaggtcgaagcccctgggccaggcgccagaaggaggccgagctccatcctcgcctttggccatgatggtatgcatgtagcgatgcctgccttgggacgaaggcgaggcatatcatcaccttctcgacatgatttttgatgagcaggaagtaatcgagctatacagctatacacatcctcttgcttgctcgccttctcctatgctgctacattggtgtgtttgttgtactgctgctcgactctgccgaggctgacccgtggagcattgtgggggttggccggattgccgggctgggttcgtggactgcatcctcgaagaccgccgccatcacgcatgcggatacgccgaggtcgaggtcgatggcgatggggaagctggcgcccgcccgctgctgccgcgtcagccatcgccgccgccaccactccggctcccgcttgccgtcgccgcccttgcctgcaaattacactacgagagagaaggtgaagagaaaggggggagagaacggggagagagggaaggggaaggagagagtgaatgacatgtaggcccacatgtcagtggggcccacaatattttttatgtgtgaatcacatgtgggtccatagattttttttttaattctaatgccacgtaagcgccacgtgggacgaaaactaggtcaacattgccacgtcagcgcaacatcagcaaaaccacccatcgaaaccaccaagggagtcaaattgcactggtttcaatagtttagggagtcgttctatccggttttacggttgaggatcacatattagattcgagttacttttaatggagtcaaagtggacttattccaaagtaatattacattcatgtaatttgttctaagaaaaaaaatagggttttgaaccaggcccttattctcgacttttcactaatgtatatacccctcacgtgatggaacaagtggcaaggaagataacatcaatccaaactacaactttttctcgtttttcgttaacacgtttcctaaactattaagcagtacattttgtaataaatctattttctagttttgtaatagaataaactaaacgtactgctatatgttactccaatatagagtttcaacccctcttgggttgcaggcttgcagctgcatagcaccgctgttcggttgcaattgttttgaacaatgtttgcttgtaaaaaaaatgctgctgtagaaggcaagtgtttctgattttctggctacctgcagcctcagttgacgcttcagagtacagtacagttacagcactgctacagaacgtgcttccaaacaaacccatttctgctaatgcttttccaacaagcattgcctacatgcatatccacctactaggtacgtagcagctctcatgtcctccatttctttacttcccgaagtagcatatgtagcatccaatgcgacaaacaacactctccaattcaacgggcaagttagcgctgcatgttctagagcatatcatatgctttatactagctcgaactaaaaatgggaagaataaaatcgattttcgagaagccaccttaaaggcttaaacgatgtggtggtaaagttacagttacttcctccgtttcacaatgtaaattattctagcatttttcatattcatagattcattaacatcaatatgaatgtggaaaatgctagaataacttacattgtggaacgaagggagtacatgatttacgattatttagagtctgagtttagatcagctgtacgttggacagaaactttaggtggtacttaaaacgagataagttattagcgtatattcaatcaagtattaaaattagatttatttgatttctaggaaacttttatatataatttttttgtgctaaacatcccatttttcagctcagaaacgtgcccaaggagaatgagtaagtagtcgccgaattaccgactattccctccgcccaaaaaaaaaccaacctactattgaatgggatgtttccagtataacgaatcttgtcaatactagattggtttttttagacgaagggagtagaacttaaccgaaatgggtggtaaacaggatgcactcgttggtgtgtgcctatataagaagtacgcgcgaagtggtggcattatcctcataatcacaaaagaagaagaagaagaaaaaggttcgaagtggagctcgatcagctgctccatgcctttggtcaacccttgtcccatgcatatgctccgttttcgagcgaaatatcaccaactctaccaaaaacgatgaaatccaccagccaaacgtccaaaaaccaagcagtaccattttgcagtactgcacatcacatgctccgatctgcgtcctgaatcaccaaccaccactacaaccggctggcctttttgcctgcttgatgcagaactaaactgccttttttcatcgatctcaatcagccaaccgaactctgcaagccattcaagcgaccaggctaagtacaagaaccgtttccattatatagagagatgattaattaacaaccaagtaatgcttattttgctcggtcggtacgggaagtaacaaccgcttagccgtgttaacctcttttgcgcctgcttgcaaattaaaccaaactaatctctccatttcagattgattatcattcgatttaacattggcagtgtcttataccggttcgttggattttcttttgacaatgtttgctaccatacactcaaattttatgtaatttgctagtagaaatgacaaaaccgtgttacggctgaaaaacacctagtaatttgctgaaggatactttcaattcaattggagagggaaattcttcacaaaaacgagaatgccctagggccaaaagctttcaagctaaggcttagagtgaagatggaatatgatacatactaacgatgtatttaggatgatgataaatttagagttgtataattcccaaattttcactctaacgccatatttgaaggggaccctatttgaagtatgggttctaggggtgttcttatccttcttaagaatttatctctccaattgagttcaaagtgtcctccagcaaattactagttttataatatgtctttctgctgtgacacgtttttcgatgtctactagcaaattacacaaattttaggtatcctatagcaaaatttgtatttttttatgagttcataaaatttaacaacgtgcacattatgtatcatgaaagcatttctcaagatagatataaaaacataggggcaattgtgttcttgcccttgctttgtgatccaattgtgattttgccccctacttttagggttgtttttgcccctactttttataagtgaagcaaccattttgccactggttttgaccgtggttatgtgggactagaatttttgagataaacaaagggaaaggaaaattaaaaaatgattttgcaatttgtcaatgactgttatacccctggtgagtaaatcattaagcagtgtgtgaatcagattgaagccgtgtattcccggaaatgcttaccattggccgtccagccagaaataaaaaatcagatgtctcaatttaaaagaacaacagtgtaggtgcatggtgaaacagttggttaggtgtactgataagccaacggagcatgcatgcaaacatgtttcaaaatttaaatgattttttctcttaaactattagtccgaatttcaatctaattatatcattggattcgttacaattaaatctttataacaagatatcacatgactacattccgatgagttttaattttactttttaaatattgcacacattgttactgaaatgttccaaaaagcatttgttgatgtttcactaatgcattagcaatgtttcatgctgtctttttttatatgtttcagcaaatacattttttatgtttcaacaataattataattcgatgtttcaatctaaatataaaaaatgtttcactggtcgggacttaatgtttcatgtaataatgattattattgccatcaatactttttatatgttgtacctctttggaacaatttgtgaagagggttgaaacatctccacaagtgatgaaagaattatttttaaatagttcaacataagtttgttttttttctagaacacatatatatttttatcaaaatatattcatgtgagatcttgttataaattatagattgggtatatattttagaataaaatttcgtttaaagtttgattaagagagagagagaaagtaatactgcctcaggccaccttggcaaccagctctactcttgcatgcatgcatgcgacaacctcgctcctccaacgcgtccctgcatacatacagacgaggagcagcattcgatatttgaaaaaaaaaaatattgaatgttcgatttgtagcgtcctatttaaaaatatttcaacataattaagtatttgtgcaaaaatctaatggtataattgaaatttagatcagatatataattttggagaaaaatatttacaatttgaggaaaaaattaggcacgtgtaatgggagggagagggagagggagagagagtatgcaagcagcagcgcaagcaacgcatgtagggcaggcaagcaacgcagcacggaagcaacgcgggcatgcggcagtgtgggggcgagcgttgaccaacaagtaaaacattaagttatatatggtgaaacaaagaaaacaacaaccgaaacatttaaatatgtttatgaaacatggtgaatatacacgttgaaacatgttgttgtcacatatgaaataacaagtattgacggattgaaacatatgtttttcttttatcaaaatataatcatgcgatatcttgttgtaaagagttaattacaacgaatacaacggcgtgatcggatcatagattgaataagtaatttaaaagaaaaatcattttgaagcttgctaaaatacatgcatgtatgcatgcatgaggtggagagagagtagtagcagttaatttcaggaattttgtgaaacacaccgaagacacatattgaaacctatctctatcacgtatgaaacatgttattctaacggtttgaaacacatgtttttcttttgacataatataatcatgtgatattttattgtaaagatttaattgcaacgaatataacgatgtgatcggatcgtagatcggataagtaatttaggagaaaaaatatttaaagagaggagaaaagaatgaaaagaaacagctaggcacatacgttataggacagggttcattctcacatgcgcttgtttagacatccgatttttggtgtgatgccggatgtccgagccgtagcgctctccgtgtattccccatctccagtacggcctagcgagtggcggcagcggtgcaacagcagcagcaagaccaggcagccagcagggtgggcgcggcggcggcggcgacgactgcgggtcgacgcggctcaacagcgggccagcacgacggcggcgaccgttggccagcacgcaggaggcgcggcggcaaccgtgggtcggcgcggctctgctgcgggccagcgcggtggcgacaaccgttggccggtgcgcaaggaggtgcggtggcagcgtgaaggagaggcgtggccttggtcaggtggcctgttggcaaccgcgggctagcacggtccggcgcgatggggtgctcaggactgggtgagtacggttggggaagggaaggtgcaaaggggaaggttggcgcaggggctgctgggggccgacggtgcttgaggaggcacagatgcagcagggcgacggtgctagaggagatgcaagggtggctggctggcgctactggactttatggtgtttgctatagctgaaattgtgttgaaattcagtgaaatctccttgaaagtatgttgaaattttgtgaaatgaaatcttgtatatttattgctgaaatcatgttggaatcctgttgaaattttgtgatatttgtcaagctattgctgaaatctagtcattttttttataaatttcaagtatagcaaagttcacttcgaaacatttgtaaagttcagttcaaagctgaactcaaaaaagggcaaatacacaagtgggcacatatttgcataagggtatactcggcgttgtatctccgatctaacaccattagctagttttaacagaacagggggcactctgctccttcatttcaaaaaagcatgggcaaaattacaaaccctaaaaagtaatggcaaaatcacaattgaatcataaagtaagggcaagaacataattaccccaaaaacataagtcttgagatgttaaactacataaacttttaaaaattgatgataaaaaaataagtgcacaactgaaatgacaaatactgtctattccctcgatccccatcaccctaccaaacttcagttcagaaaccattcgagcgatatgatttccgtctcaaacagatcgtgcaactacgacgcatcggtaactaacaagttaaccatttccatcatcgaaaattaattaagtaacgatcaagcaatgctgatttaatttttctctgtactccatgatagaaaaggttgcatttcttttcaccgtgcaattaacatggtgagtgttgctcagtagtcagtattcagtatgaaaggacaagtaggcacgcggcataggctgggcgatgacaaaatgatcgttcatctgccacattgaatagtttgatcgatgattcgacgcaaaatgttgcagattttccgggctgattcagcatttgctaggtgattcgttgttgtcacatagacctcaagaaatttaaactttaatttgtgcatattgttgggggtaaattaattagccaagagtccacacctgcatgtgcacactgagctatattattggaccgagctaacgtgtttcggttcgtacaaattaactagctaggctgcaccactagcttacacagtaaccttctcttttccggaatcgacgggataagataacacggcaaacgccattgtttaagtacggttgttactacccttcagcactatttcactactctgaatatatatttaatttcatctcgtgattaattactgagctaatccgggctggtgattgatgagagggttggtgggaaattaaccaatcaagctagctcgaggggacgttttacctccatctttacttgtaaacatactgtatcgaggttgtagctgcggtttacggccaaaatggaagcatgtactccattttaatctctctctctctctctctaatttattgggtcacttaacccttaaacttgactcattttatcgctaaattattaaaaatgtttcattttggccgtaataacatttctttttttactcttcatataagttgcattttaagctaaaaattgttagagttatagatggtaaaatatgaattatgtagagagaaaaaaagggggaagaaatagtgtaaggggagtaaaagtgaaccattttcaatatttcaagctgtaaaatgagtaaaaatagtttaggggatcaagtgcttcgctgaaatatggattttttactttttaaaaccagaacaaataatccatgtcaacccagtagataagcttaaaaaaaatagggcaaatctagcttttgaatatgccatgccactctgaaaaagctgatccggccattcccacagaaattgcagttgtaacatcccattcccacagaaattgcagttgtaacatccataggaaccgtagtcgtaacatccttagttggatgctaaacagaaaaaataaaaagatactccctccgtactaataaagaaagttatttaggataatatttaagtgaaacattgggaatataaatcatgaataactcttaagttgttgagtttgaaaatgtaaaaattatatgaatagatttaccttgaaaaatactttcataaaaatatacatatatcattttttaataaatatttttatagaaacaagaagtcaaaattgtattaccgtgttactgtccaaaacgattttctttacgagtacggagggagtagtcagttagccatgtgttttaccaagaagtcaaagtgaatacaacacaacgatttgatgagcaattatggcatatccaagtttaaatatctccttcattcatgaatagtaaattttaagtgcaattggcctatcaaagtttaaatgctcctttatactcccttcatctaattttgatagtcatattttatcttagcacacagaccaatgataagtaattatacttatcatccatttaaatatgctactagtcattcctagtaaacaagcgattcattaacatttacatttctcaatacccatgtagccaatcatatgtggaaaaatggagagtcatgcattaaatccgagaaagtcattaagatgataggttgttggattgaaatatgcgtatcaaaaataaaattttcagatttagaaatatgactatcaaaagtagatggagagagtagtatttagaatttattggtttgtattctctccgttgacgttaaaattatttggcacagccaacgaggtccacgacatggtggcagccagccagttggagtagtatgcgattaatcaataaggttagtctgctctcatatgttttaaagaaacattattatctgtgcaatgaaattattcaagtcactgttgatagttctggaattatatatattggtgaaagagaatattagaatggcataaagagctaacccatttcatccttgatgtcccatcgatcaacaaattaaagcaaataaatttcaggccctgtttattcatatatatttttgttttatgtattgatttataccacgtttaatgcactacatatatgcatttttaatcgcagctcggatttgttatggtaatatatatttcttcgaggattaggaagacactattaatttataatgatgtatgtttccactattttccttcttcgaattgctttggtgaataggcatataaaacatctcacacatttataaatataagtttggtatacatgtcttgatatcttagcgcagatcaaaattagcgtacacacaccctctacaaatttatatcttagcgcagatcaaaattagcgtacacacaccctctacaaatttattctaacatgttaatttcaaagaagaagaacctgaccaaccacatcagtttatcaacatttcctttttaatttatggttatgtgcattcctagtaggtgcagagtttagatgtatttattaattattatactcctttatgatctttaaaaaataagtttgtcaataagaagcaaatgcgctctaaggaattcatgctccagacatgctagaaaggcatttgatattttttttagcgttgttttggtacttgctatttcttggatttgtagtttctcttaaaagaaaccttcacttggtaccatttctttcatattaattgactttgacgtctaaaaaatcttacgctttttgaaatacaagtttgagaaaattcaataatagaaaaaaataagatttaaatatgaataaaacccaaaaaatatattttaatagaccgtggaaaaaaattaaaaggagagataaaaactcaaatgaagttttatgaggttaaacctcatgctaaaattcctttaaaatcttcttgtcttaagccattcaataggaataatataagattgttatattagggtgctaatcctatgtttcaaaggatcaaagaggatatttttctacatgatttaaatcatataaatctcctatgtttttccaataaataaatgtgttttgtttgttcctttttttcggtgtgcacaacaccgcacaaggtatataatcttgttaaaaaaaacacctacatgcaaatataaattaaccaaacaacatttactatacatataaaaagtagctgaattatttaccgatcatctggtgatagatcaataatgccaccacgcctaatgaaagctacatgcacctagctgacttcgtacatatatatgctctatcgctagcgatgaacagatgatgtacgtaccaaaaaaggacaacaaagttagctactttttgatcgatgttgatgccctaaccaaaataactacaaatatatactatcaatatcagacacagtgaatagcagctttataataccaacctgcgcccctcttaggctgtgtttagttcaacacaaaatttgaattttggttgaaattgaagatgatgtgactgaaaaattatgtgtgtatgacatgttgatgtgatggaaaaggactgaagtttgtatctaaacagacccttacttgaacttaaattagctttgtctgaattagttacagtactgttcaagctacctagttcattcaatttgttggactacgctgtaacgttagctagctagctagctttgctttcttcacaagccgtcatggatcgaccgatcgagttcgttattaagagaattattggtagtcgtggtcctaatcatgcttatattgtcactcgattaattatatatgtaagatatatacgcattgttattagcgtgtcagctttgcatttctactaactttttgtttgtacgtactttgcttttgtataatttctttgtcctttctcgtaactgtgctttgcttttgctgtttctctcaaaaaaaaaaactgtgttttgctgcctgtacggcacctacctcttgctagtttaatccggctggttgcaaatctatgggtgtgtggttgatgagaccatgcatatgtatttgctgatcaattattctaggtgcagatgtaattaattaatattggaagcggttcctgattaattaatgaagtattataagccaccgaggaaaaaataagctagtgagggagagtattgcagttactatagcaggtgttgcatctgaaaacggatgagatcatacattattttatcagttttcagatgcaacgttctccggtgactaagacatttacctaggaacagtgacttaggcaatacaacaactctgttgtatttggtcaaatattgttaaaaattggtgttggttaatttctgctaactgcacttaattattagcacataaatccagatacatttagctatatctcgaatccgacgttttgtacagcactacaactccggagtcttaattttcactaagtcaaagagaatctattttcatattctttttctttttgttagaactatattactccctccattccaaatagatctatatatttcatatgtacaccaagaccaagaaaaactaataactctctcatactatatttactctagcaacaaactcgatgcatgcaccatccccaatattttctagccaatagcaaatcaagatattgcatgtgggttataaatacttatgtgcatggatgcatgcatcaatgtccatttactccaatgcacaaataacgaatagacttaataaatgaatacaaatatgcagatcatttaggaataatctcaaaataactactccctccatctacttttgatagtaatatttcatcttggcacacagaccaaggataagtaattctacatatcatctatttaaatatgctactagtcattcctcgtaaacaagcgattcattaatatttacatttctcaatgcccatgtagccaatcatgtgttgaagaatagagagtcatgcattaaatccaagaaagtcattaagatgataggttgttagattgaaatatgcctatcaaaaataaaattttcggatttagaaatatgactatcagaaatagatagatggagggagtatatttttcttcctcaacattggtcataaactagttacaccggtaatggtctgctatatgatttctctgcacacaaagtgacagagaagttgattatcatatatattttcatgtacaatttgtaggcagaatgcattacccgtacagctaaaatagacgttgcaacctatacatagattccagcggcgccgcagcagttggatgcaatcacaaacggggtgacagctagggtcaacaactcaagagaaaacaagggctagatagcctatagaatgcatggatccaaatccatccaattcgcatcccacaaattgaaatccatcaaattaatctcgatactacaaaatagtacaaacgaacccaaatattttttttataaacaaaagctacgtgaacacacagctaataaaggaattgttatttgttcctatcacaagtacttttacaataatctctacggtaatattctagctgctaccacaaagtaatattaattaattgttgatttacaaattatactcctccattccttcaaaagaataagcgtaactagtaaaacttattctactaccagtagttttgatgttctaatataaatgaatatgatttattgatgggaaagataaactgtctatatatatataaattgtcaagtaactgtagtttgtgtctctaagttttcgctcgatctcttttatgtcccacaagttttttttccttgaaaatgattatgttgccactctcatacatgcttgctagcttaataattaagaaaaacacaattatcaaatgaaaaaaagattcatttgtaaaaaaaggggcataggattatttaaccacaaatttaactgaaaactgatatttaaaatttaaactaatatcaaattaattttgattcagtttctacaacattttcaccaaaatttaaatccaaacaaaaataatcttggttctcaatttctcaatgaaactcttgtatggatttaataagaacttaaattttgtttaaaaatatatatttaatttttaacatttggcatcaaatgattcagtctcatttgaattttcataatttgatatgtttttcacattatgatttatgttattaaagtagttatcacataacacgtacgagaggtaggtaatatagcccttttagaaaaaaaaacattcaactcatgcatggtgttagttaacggaagggattagctattgagctgtcgacagtttttaagggtcaaaactttcaatttttttcaccttaagatctgtaatcaacggaccataggaaacgggtctgaaccaactgaaagcacgaaaccaatccgtttagagcgtgtgggcacattaagaaaccctgaataactaggcacactgtaactaaatgtaactgtaactgagctgtaactactctataactagattataactggactgtaactagtgtgtaactagggtgtaactggactataactagtgtgtaattaggttgtaactggactgtaactagtctataactaacttataagctctatttaactggaatataattaaacatttttatgtaactaaatggaaaaacatcaacgatggaatttatataactgaatagaaaaacattgacgcctccatcctcaagatgaacaacaatacatgcgtgcgaaaatcaacgaatcgtttcccctagaaatctaggagaagaacaccaaccaaacatacaaaggatttatagggcaaacatgatgcaggatctgaacacaaaatatcacatgaacgcaccaaaaagtgaaaaaatcacatgaaattttgagtagagagcgtgaggcagagaagatcgctgcgacagcgaggaacacgagcagctgaaggggaaaaatcggcgaggaagtgggcagcgagaaacccaccggccggcagcaaaaaaaatcgccgagagctgcatctggcggggtctccgcctccgcctaggccacctcgcctccaagaaatttctggaaaaaggcaacatgcagctatacacgccaacgggtagcacatctattggtcatcaggtttggatccaatagaaaaaaatctcacacgaatcatggcgccagatcgaacggccataaaatcgaatgtttctggctccaaaactgtcgacagctagctagcaaaaccgtaacggaatggacatagaacaaaaacttaaaaaacatgtagagaattgagacaaaatttagcggtacataaggatgaagaaaaactcaggagcaagtaattaaagaattttctcaaaaacacaaacgaacgagccttctattaactgtttgattgtatatcttggttcatatatatatactgtccttgatctgtggcctttcccaaactcgatcgttttcgagcttttaagtatatatatacctactaagccttgtaaatgtccggccacgtccgaggttaatttacgtacgtgtggttgatccatcccgtcaggacgtcacctaccactggacactatactcgtccaaattggttaatttgggtgggttcggcagcacacgtacggttggtgatggctatccaagtatgttaggtaggattcatctatatttgcatggtgtatcacgttcagaatgtcagaaatgtgaatcctgtacgtctttgtatacgcgtacgcgtagtagctagcaatatggcatgctaattattctcacaagtagtatacgatgtatatatataatcctaatgtcaggggaacgtacttaattatgcaaatttgtgagtttacctgagagattcctcactcataattttattatggaggccggatgagatagaagctgatgcccgtgagaaaggtcttgtagttggatacttaattatgcaaatttgtgagtttacctgagagattcctcactcataatccagctccgaaacgcggcggcgaacacacataaaaaaaattatcgaggatataatacatacttattatttaatatattaattaatatagttaataattgaatagcctatatgggtttaattttcgcgttcaccccaagaaattaaatgtaggaaggccactgtcaatactacaaaatatcaaataggtgtcagcactatatgcgctgtaagtgctaaaaagacacctgtaggcttttttccactttcgcatgttgaaatcctaaaaaattggcccctttaagcaattataggtgctagttctaaataataaccgatacctattttataggtgccattttttaaaaaaaaaaacataacctttaatgttaaaaaccgacacctataacatattataggtgttttttttaaaaaaaaatacacttctgacttaagccgagccagtgggccccaccacgaatgacgaaataaggcatcacgaggagataaggttcaatccatccacagacttccagagccatcttgcatctctctctccctcatctctcaactctctgcctcccttctctctcgttgtcctctctctctcgctgcccatggccggcgaaggcggcagcggcggcgcgtcctcccctccgccagatccggggaggggcggcctagcggcggcaacggcgggaggtggcatgcggcggtggaagggagggggatgcggcgggaggtggtggcggcccagcaacggcgccttccctctgttagatctagagggagggcaggcggcgggaggggaggcagtggagacctgctggcgagaggcagtggtggcccggcggcgggatgaaaggcagtggctgtccgacggtggcgccctccctccgtcggatttggatggagggcaagcggcgggaggggaggtggtggcggcctggcagcggaacgagtggcagtggcggcgcacttcctgttagtgaatgatttctgtgaatgttagtgaatgattttttgatgttcttcaatgttagtgaaagatttctgtgatgttcttcaatgtttcttgttctgtgatgttgtttgattggggattgggggttgtgattgatttgggagttctgtgatgtgggatgaatgagctcgatactcgagtctttttttggctcgcgagtaatctcaaaggtgccggttcttaaaacgggattagtgccggagcactcatcagtgctatcttcatggtgccggttggaaaaaccaacacctatggggtttcccaaccgccacttttcacgtgttctgtggtagtgtgtgatccatccagcaattttctagctctcatgtgcatgcaaccgttccatgcatgcatgtatattactcgctccgtactaaaatataaaagattttaagtgtatgtgacacatcataatactacgtatacgaatttatatgaaagtctgtctaaatttatagttttgttacattcacctaatattttttatattttggcataaagggcatatatgcatatcgcctcacacaagcgtatgcaccagcgaaccagcctgacacctgttcctctatgaatccatgccaatccgtgctggtcagagcagcatggccatgcacgttcacgtgtgcatcggtagatcgaccaccagcgtatatgcatatgcccatgcacacgtacaatctttcaagtaccagctgggtgatcgtacggcccgcacgtttccatgcctgtgtatactttggctggtcgatcgcctcgcgtgtatcgccagtgttcagtgcgtgtataacacgtcttttatatatacgtgcttgtatgactaattgaatgttaattatttaaaggaaaaggtatgttttactcccccaactattgcgacagtacaaattacccctcgaaccacagaaccggatatattacacctcaaactattgataccggatgaattaccccccccccacacacacacactcaatactaagcggttttgctcctacgtggtatacacgtggcgtcgacatggaaatccaatcaacaaaacaaacaaaagaaaatatagggcccacctgtcattacctctcttcagtcttccccctccccccttctctctctcaggcacgtgtcgaagggcagtgggcggcggcagcggcgcgtggacgggcggtgagcacggcggcagggagtggtggacctgggacaggcggcgggcgcggcgggtggcacggcggggagtggtgggcccgggacaggcggcgggcgtggcgggcgtggtggagaggcggccggtggccggcgggcatgacggcgcccgtgcccccctgtcactgcggagggcagcaaagcgcggcagcgaggcggttggcggggggacaacgtcgcggggattcgccgtgaacgcctacctcctcccgctgctgccaccgccgacgaccggcccgttgacccgcgtccgcgaatgggaggacgcgctcgcctccttcgccgcaccccgccgccgctcgcctcctccgcggcccctgcctcaccgccgccgcctagcgtccttcgcccctgcctctcgcctcgccaccacgctcgccactctgctgcctcgcctcctccgccacccccaccacgcccgccctgcctcgccttctccgccccagccacgctcgcctctccgccgcctcgcctccttcgcccccgccgcgctcgcctctccgccgtccccgtcgcgctcgcctctcctctgcccccgctgctctccaccgccgccgccgccttgcctcgcctcgccgctgctgactccaccgcgcttgctgcctcggccgtcgccgtccgaaggagaagagggagagagagtgagacagtgagagatgagataggagagagagatagaaactgacaggtggggcccacctatttttttaataaataaattgctgactctactgccacgtaaaccaaaaccaccgcggattaggtcgaggggggtaattcgtccggtttgcatagttgggggtgaagaaagtccggttttgtggttaggggggtaattcggacgaccgtgatagttagggggggtaattcatactttttccttatttaaatctaaataactttcctatagatattttttgtaaataacacaacacttagcagttatgaaagtgtacacgtggagaacgagatatttcttttcctaatcaggtgcaaacgaatgcagcctctcaagagtctatataccgagcatgtagttggtaatttcaaaatttcacaactactaaattctaaattaaaattatttgcctaagcagtctgcaaagggttgttgtgagggtgttccgggtttagcggttaggcgtttgtgaggcgatcgcggtggatccctccgtgacgctgacaacgggtgcaagcccgatcgtcggctcgacgcaagctgtaaccggcacacctactggcaaagcgcgaggcggcggcgtttgcggccgattctgggctatctctgacgttgcctccatcgacgacgatgagtctgaggatgagatgcttcatttacaaccatccgtccctaaccacaagatgagttttcctatgggtgcaggtcttgaagaagggtggacgacggtgaccagacgttcaagacaagggcggcagcaacatttggatgcgttgtcgtccggcgttcaccatcatgcatcaactagcccaagtaagacggaaaatggaaagactccgtggacgggtgcccttcctccgcgtcgacgttcgccgccggtgacaatcggcgacctgatttccaaggcgtcgcaccgtcctttgcgccggccgcggcggccgagcggatcagagcagccgagatcagcgcttcctcttcaaacgaggggtcaaacgaagtctccaagaccggcacaacattagcaaaagaatgggccatgcatcacaccaaacatgcgggcccagccgcctaatgggctccagtctaagggccctggcgatggcctctacaagcgacaaccaaaggcgctgcttgccctagctcgtaaacagcgtcgaccaatcaaccccaagcgatcttttgcggaagtggtgcgagcgggtgagatggctggtggtggaggacgatatggcggcggccgtggtaccggcagcggcggcgatggccaggatggtgacggccgtggcggcgtgttcaatccaggcaggggagaaggtggcgctgggcggccgcgggggagaggaccgtggcggcctcgcggcagaggttgacatcccgggaacacggctttgtctggagcggctaccgggaatggcagtggtggtgcttccggccgtggtcatcaaggccgtggcggagacagtaacagaggtccggatggtcagttcgctgtgaatctgaatgcagcaacagcatcaggtactgatgttccaagaggagagtctagggttgacatagtgactgcagaggctggcacttcttcaaaggcgtcaaaagggcgttgtttcagatgcaaggagaagagccatgctgtttcagagtgcacaaagattttgtgtgatatttgtgaagcacctgaacatactgcactttcatgcccgcttttactcgctcccaaacccacagcaagcatgtgtggatggggagttgatggtggaggctttttcatgatccccacgccaacaacaggggcagtgaaacccagggaacacaacaaaacagcaattatccgggtggagaatggccacatttctgtggacaacttgatcattgaattgcgaaggttggtgccggttaggttccaatgggatgttaaggagactgctccagacacttatatggttcaatttccctctgtgatcgaattagacaggttgcgtagggttggcagtgttcctagttttgactttaatgtgaacctagtcattgacaagtgggagcaagagattgaagcgaagtttgttctaaagaaaacttggtttaaagtttatggagtgtcatatgagattagagactttctcagtctacatgctgttggttctgtcattggtcaaacaacaactgtggacatgatttatctcaggaaaaatggtgtggttaggatgcaggtggcagttgatgagttagcagatttaccacctagtgtttacgttgttgtccgaaaccatggctatgaaatcttctttgaaccggaattgcctgaggtggatgggaaaggaaagaagaagattgatgatattgaccaggacggagaaagaaaaaatggtggtgatcatgatgttcacatggaagatagggacccaaaacgccaaaagaatggttctgatgggtcgctaaggatggaaataggaggcttagcgccagctaagctgccctcaacgcgcaccaataatatggttctagataatgaagcattttcaccgtctcctagctcagatacgcctgctacaacaacggagttggaagcgtttgcctcatactcctccgtggtgttggaaacgcccatgagtcaattgggagcccaagggacaggaaactccgagtcaaccaaggaggctgtcggtgaggtggtgtactccgacgaggtttcgacacagctagcgaagttggcaacgactaaggtactttctactgaggttgctgtgcagctagcaggaacagatgaggtggttacgaatggcaaagagcaacaacaagaacctgtcagcatggcacaagaattacagcatgtttcagctagcttcttgtctcccgtggagcatgtattggactgcaacgtgcagtctgaattgctccccaagaatagccagcttgcaggcgatggaagagtaacatcgactaagaacttgatggcagtactagcaaccaatgaagaccaacttagtgcctccagtgctgccacatctaaagcccaggatgcagcacaggcagttggagctcgatccccgacaagaaggcgacctcgtcgcccagtggaccctattccaactaggcaaagtgaaagacagaaggcgatggcaaatgcagatgcgccggtggcaaaccgggcagagctgcttaaaaaggttcataacctcgagacgctaacaggtaacaagtttaataccacaaattctgttgcttcaattccagataagactcttgctgcaaatttttctaaattaggggtttctctaggaaagaatgatttagaaataaaggagtccattaaccagattaaaatttcagaagtggatagatttgctactctttatagtagtgctgtagcgtctactagtaatgtagataaaagcaatgatgaattgttaaaattgtcttctctccagcacttatgtagtgactggctagaagaggctgagagtaatgacgatgagtctatggattctcaggccatacctcaaatgaggaagatttcgaccaaagtcaaacataaagtggtatgtcctcttttgactggtccaaaaaagaaagctaataagtttaagaaatgaaaggaatattttggaatagttgtggctttggtgatgcatctaaatttagatttatatctgaatatgttaaggagcaaaatttggattttattgccattcttgagactagaaaaccatcattcacccctttaaatcttaaaaacctttgtggtggaaaagattttctttggcatgagaaacctcctatcgggcgatcaggaggaatacttttaggagtaaatttaaatgtttttgatataggtgaaatttcagaaggggacttctatgtgaagtttcttcgaagaaataaagaggatggtttcaaatgggttttaatggcagtatatggtgctgctcaacccgagttaaaagaataatttttgacggaactagctcagacttgtggtaaggagtcataccctctattggtagggggggactttaatatcattagatcacccgaagaaaagaataataattcttttgaccctcgttggccttttctttttaatgcggtcatcaatagtctcaatttgagagagattatctttcggggagacaattcacctgggccaagaacctcgaaaatacaacttatgagaagttggatagagtgttaatgaacactgactgggagcaaaaatatcctttagttacgtgtcaagccttacctcgagccatttcagaccactctccaattatactgagatccggatcgcatgcacattttggcaatcagccgccatttcgttttgaattaggctggctagagcgggatggattctttgagatggtagccaaagagtggcaaagcataaacaagggaaggaatcctatggaacgttggaaacacaagattgtccaccttaggcaacatttaagagggtgggcgcgaagtttaagtggcacatataaaaaacaaaaaataaagcttttagttttaattaacacactagacaaaaaagccaaacacataactcttcgttgaagcaggtcaaaaatgatttggcaaaactgttaagggacgaagagttgtattggtaccagcgatctaagacaaatcatttactccaaggggatagtaatactaaatattatcacttgatagacaatggtaaacatcgtaagcagatgattttccagttggaacaagaggacactataataacgggtgaggggaatctcaaagaatacatcaccaattattataaaggattatttggtcctccagatcataatcatgtatccatgatagagggatggactgatgatattcctcaagtgtccgacttggaaaatgacatccttactgctgaattttcagaaaaggaagtcaaagaggcaatttttcaaatggatcataactcctccctaggtccagatggctttcctgcagagttttatcaggtcttttgggagattgttaagaatgatctcatggctctatttagagaatttcataaagggacattatccctttataacctaaactttgggatcatcgcgctattgccaaaaaaggctgatgcaaatcaaattcaacaatataggcctatttgcctactgaatgtcagctttaaaatttttacaaaagtggacaccaataggattacaacggttgctcacaaagtcattcgcccaacccaaacagcgtttttgccagatagaaatatcatggaaggggtggtgattttgcatgagactgtccatgagttacacacaaagaaaatggatggtatcatattcaaaattgactttgaaaaggcttatgacaaagttaaatggcagttccttcagcagacattacgaatgaaagggttttcacaatcgtggtgcaattggatttccaactgggtggaaggaggaactgtaagtgtcaaagtcaatgataatgtaggaaaaaatttccggacacgcaaaggcttgagacaaggggatccaatgtccccaattctttttaacatagtggctgatatgttagccattcttattgaaaaagtcaaagtcgatggccaaattagaggggtaattccacacttagtggatgatggtttgtccattctccaatatgccgacgatacaataatatttcttgaacatgattttgaacaagcaaaaaacatgaaggccattctttgtgtgtttgaacatctctcggggctgaaaataaactttcataaaagtgaaattttctgctttgggggagccaaggaaatggaggaccaatatagacaactgtttggttgtaattctggttcctttccattcaaatacttaggaatccccatacactatcgaaaactcagaaattttgattggaaatgtgtggaggataggtttcaaagaaaacttagcgcatggaagggcaaaaacagctcctatggtgggagattggttcttcttaacttggttctttcgagtcttcccatgttcatgttatccttttttgaaatacctcgaggtgtacttcaaagactagattactaccgatcgagctttttctggagcagtgatagccagaaaaagaaatataagttaacaaaatgggattatatatgccggccaaaagatcaaggtggactgggtgtcctaaatcttgatatcatgaatagatgtttgttgagcaaatggctattcaagcttcttaatggtgatggcctatggcaaaaccttttgcgcaacaagtacttaaagggtaaacccctctcccacatgtcacacaaaccaggaacatcccaattttgggctggcctaatgaaagtaaaagatcaattttttcagtatggatcttttaaacctggtaatgggatggaaataagattttgggaagatacatggttgggcttacaacctctcaaatatcaatatccttctctgtacaatgtggtccgaaaaagacattctactttggcagaggttatgagcacaacaccgttgaatgtttcattccgacgatcaattgtaggaccaaagttagttgagtggaacgatctgatctctcaactagctaacataaccctgtcaaatgaaaaggattgctttatttggtcgctacataaaaatggccatttttcggtcaaatccatgtataatgcgatcatcaattccaatgtaagaatccacaagaggatcttatgggaggtaaaggtaccactaaaaatcaaagtatttatgtggtttcttcacaaaaaagtaatcttgacaaaagataatctcataaagagaaattggaggggaaacaagcaatgttgtttttgtaatacacaagagaccatccaacatcttttctttgactgtcatgttgtacgttttgcttggcgatgtgtcttctttgccttcaacatcccccctccccacaatgcaaaagatatatttggtgactagctaaggggagtgcctagacccacaaaaaaaatgattttatttggagctagtgctttatgttggtcaatttggcgttgccgtaatgatatagtttttaaccataaaaaaatgcctaacatcatgcaggttatcttcatgtgttccaattggctccactcttggtgtatgatgctttcacaggaacaacaggatactatgcgcaatggtgctacacgcttggaaatagtagccaaggaacttttatttcattttggatggcgtagtacctacagaatttcgtgatagaatctacgtgattttgaaaaaaattattattttagtagatcatatcatcggcagaagttgagggtttgtcccatctcgccttttttaacttttctgttcacgtctgaatttttttggctgtgtgcttacgggcagaggccggagatgtaacacatttccattatttaaaaaaaaattattaaattaagaacagtacactgaaagtactccaagaagtataacaatagtccatgcaaaatatgatttggtggggtgactagcagagctaatatagcatcatgcatgatttaagcaagattatatggagatatatcacttctacacgactacaccggcaaaatgtacaagttagtgcgttctcggtctaaccgcacgacgacgcccatgtaaaccgaatttaacagtgtgaaccgggctgcaaaattaaattaaactgtcgcaagttttgtagcaattccgattaataaatgacgttatgacgcaacgatagaattaaaacaaatcaaatgacgttattacgcaacgatagaattaaaacaaatcaaattaagtcagcctggtcagtgatcagtgcaccatagcgcagctaaacaaagcaggttaaacgtgcttaattaagtcaacacaaccacactacctccctgccttatttttcttttcaaacctctgaagaaaaagttcagaaaagacatggagaacaaaaaaaaaagtgtactcctagctaagtagcgaagctaatctgcttctataaatacccagcaaggcatgccgtgtcacccaccacacgcacacagttagctctagctttgcttgatttgcagcagcagcagcagcagcagcagctagcttgcatccatgggcgtcttcgccgtcaccaaggtgtccgagggccccgtccggccgtccgcagcgacgccgtcggagacgctgccgctcgcctgggtcgaccgctacccgacgcaccgcggcctcgtcgagtccgtgcacatctacctccgccgcgacgacgccgccgtcgaggcgccgtgcgccgacggcggcgtcatcgtcgagggaaagaagaagaataataagccggcggcggcggtggtgcgcggcgcgctggcggacgcgctggtgcactactacccgttcgcggggcggatcgtggaggacgagcggtcgccggggcggcctgccgtgctgtgctccggcgagggcgtctacttcgtggaggccgccgccaactgcaccctcgccgacgtcaaccacctggagcggccgctgctgctgtccaaggaggacctcgtgccgtgcccgacgccggagcagtggcccgtcgagccgcacaacagcctcgccatgatccaggtacatacgtgaattaatactgcattattcctgcttgctttttttttcttttttctttttggctttctagattttgctttgcactgttggatctcgttatgtttttcatgtgtccttgaaattgatatggcaacaagcatgcggcagtttgaatctatcaatcaaacatgcacgtcaaacttaatttcgtgaaaagaaaattaaattaatactactgctagctcctgttgtgcattgtgagtgtactgcacttgattagtacaggagttaactgcatctacgactctagtaccaacgtgattgcaacacctagctagattaaaaatacctttttcgtctcctttgccacgaatttgaattgatgttttattctcatacctatactatgtactggagtactcctgaaaaccagtgtagcttgcagaaaaaatgtcgaggtcaaaacctgggtacagaaccaaaaacaaagcaaaaaaatgacgcggactcatcagtcagttgattaattagttggaggtcacgtgatttgcaggtgacgacgttcacctgcggcggcttcgtgatcgggctgcgcaccaaccacgcggtggcggacggcaccggcgccgcccagttcatgaacgccgtcggcgacctcgcccgcggcctcccggagccgcgggtgaagccgatctgggcgcgcgaccgcttcccggacccggacatcaagcccggcccgctgccggagctccccgtgctgccgctccagtacatcgccttcgacttccccgccgcctacctcggcaagctcaaggcgcagtacgccgccaccgccggcgccagcaagatctgctccgccttcgacatcgtcatcgccaagctctggcagtgccggacgcgcgccatcgccgccgaccccgccgcggccgtcaagctctgcttcttcgccagcgcccgccaggtgctcggcctggagaccggctactggggcaacgccatcttcccggtgaaggtgtccgcggcggcgggggaggtggcggcgtcgtcggtgatcgagctcgtcggcgtggtccgggaggcgaagcggcggatggccggcgagtgcctgcgctgggcggaggggcgcaccggcggcgccgacccgttccagatgacgttcgactacgagtccgtgtacgtgtcggactggagcaagctcgggttcaacgacgtcgactacgggtacggcgcgccgtcggcggcggggccgctggtgaactgcgacctcatctcgtcggtgatcgtcatgcgggcgccggcgccgctcgccggcacgcggctgctggcgagctgcgtcaccaaggagcacgccgacgacttcgccgccaggatgagggaggatctcgtctaatataccatggccgcccccaataacattattagtcacgtacaatattgtcactgaatattaatttgttcgtgtatatctattgtggtatgtattttttttttcataggaaaaaagtagtagtacgacaataggtagctgggagctacctaatatcgacctctggtttgagagtaagtgagcgagcgagagatgtaaaccacctcagtttttaccgtgctttgtgacatgcgtggtacagtactggtactattaatcattggccgtgaaaaattatctacccatatgccactgtatttatggttgtttgtggaggattacgtatactaatttatctatgtcttacatttttcttttcatggacgcactcttaaggccccctttgaattggaggataaatggaggaaaaacaaaggaatggaaattctatactattcatgcctttgattcgtagaaatgagaaaaggaaaaacgtaggaaactttcctattcctatgattttagaggaaaaaagtagaaaatttaacatccactctaacctcttggaaaaattcccttgagtgtatctctctcatctggttcctacgtttttcatgcggtccaatcaaacggtcattcctatgtttttcctgtgcttttgcaatcctttattttacacttgtattcttatcagtcctacgatttaaatgggtcctaaatatgtgtctgtgtgagatgcccgttaggtttcttcaattcacgccactatttcaagtggctagctacatccactacatgagttttcccttggagacaaacctcctatcataagaccaaccgtcgacaccagacaccagtgacgtcctctattactgtggctcacctcccacgccacctttcttctaataaaaagggggcaattggagttcctcgttaccgctctggctctcactcactacgcctcctcacctccactccaactctcccgtcatgatgcatggactcaccgcgaccgccttagaatatcaccaccagtgaggaggaggaaaacaacgatggtaagcgacaaaatgcatcttgttcgaggccaaggacaagatacaataaaacgaaaagaattgtgaatgcctagcccaatatgcgatttaagtaataaaaactgatccaaagtacaattcacttcgaaataaattttgtgctcgaccaattcgatcatcttcctttttgtgatgattcggttaaagtgtgaaaggtgacaatcaacctgcaagtacacgtacgagagagtgacactcctcatatctgatatctgtgttgaaatactcccttcgtcctaaaataagtgtagttttacactatttacgttcaacgtttgatcgttcgtcttatttgaaaaaaattttatgattagtatttttattgctattagatgataaaacatgaatagtactttatgtgtgactaaatatttttaattttttcacaatttttttaaataggacggacggtcaaacgttgggtatggatatccacagctacatattttgggatggaggtagtatattactactgtcaagtcatatacttaagataatttctaactctgccactgacactgggtctagtcacatacacagccatgcatgatgcacgtacgtagatacttggattgtgtacggctcgatccatgatgcggacccagcatatagtaccaaaatagtggcagtagtttggcattgcacaggcagtacgcatacactaactcatcgttgaataggagtaataattatactaatccatatagataacccttacaccgttttatattataaatcattaattttaacctttttctggttaatttttttaaatgtttgactaggtttatagaaaactttagcagcatctaaaaaactaaatttgtttcattaaatctcacattaaatatattttaatagtttacttattttgtgttaaaaatactactatgtttttctataaatttggttaaagaaaaaagttaaaatgatttataatatgaaatgaatggagtagtgtactacacggatacacctgcttttgcaattttcatgcagctttcgttcatttatttatacatacttcacttacttctctctacgtaccatatatataaatatatggaaggtcttcctacaacaactattatttggaagttagtagttcacatcagcttcataattgtatgagtgtctggagtaaaatctctctcggcaatcagcttatcagcataaacatactatatatctatcactggacttttattacaacgttctgctcactttcttgcaacaaacgccaagccgtccgtacaatcttctataattgcagggaggcaggtgaccggcaaaactgaagatctcaaacaccaaccgacactggtgtactcatgcaatattaagaaaaaaataataattcaagctccagttaagctagctatagcctacaggctatatattgctaacgcacattatttttcgttgacctccttccttttgctgatcgcgagaaattaagctagagcaagtataagagaggctgatgaaacatcgcatcctactgcttatttccaagcgtcttaaggaccttgtttttgttttttttttcctcctcgccgacctaatattcacctagctagcataagatatttacgtacggcaactgcagaatcatcctctcgaattagcctgacgcaacatgtttgccaatcgcgctgagtacttttgttacttgcaaattgcacctaattcatcaacgacttcagatttaagaatgcaacatatgcatgcatgtagtattgatcaaggctcaccactcccatggcaatgcgaaatggcaagctttttagttactactattttcttcggtcgtaaatatttgacgcatttaatttaagaaaaaattggttatatagcattaaaatatcactttttggttttatagcaccgaaatataccggttcactttaatagcacctaaagtttaccccgttcccatttttaacaattccgttaattctcaatcgttttccgtccgccttgatcgctattgacccagccacgcatccgatatgggctgcaggaat

SEQ ID NO: 4857 - DNA, 66130 bp, Oryza sativa
tcttattattggagcaagctgaacttccttctgtgtggtgaattcaaaaaaacgaagaaaacggtccttcacatagaaaacagtatctccactcacagagaaagctggacgttccctctccaatttaaacacaatcataccactgtcatgaccagcggcaagaagattcatctcagggtgagcagaaagaatccagaaacgatcatgttcccgcctgaacgtttgaataccggttcgctttgtggcatcccagatgcgaatgcttttgtcctctgagttggacacaatgatgtcttgcttagcatggaacatcacgcatgacacattattcatgtgtccccgcaaagtatcaacttcccaagccttcgtgtctgtccaaaaaaatagcacatttagattacattaattcaaatacctcaatagcggtttgctgcatatgcatatagttttgtgtttggccagtctagcaatatgcagaagaatgaagtgctatgcaacaagaatgaccacctttcattccaaccaaagtgacaaactagaggtcaggagctagttactaattgagtaattgtgaagcatgtttcttgcattcagcttgttcggtaattactacttctgtgaaagtatgataaattgaagaaaacaaaaggaattcataataaaatcaaatccatagtttgtagtaataatatatggaaggacaaatgaataaaaacacaaatatgcaagcgtttatccatggaaaatggtaatagaaaagtttaaggccttgtagcagtattaccattcattctccatagcttcacttgtcggtcatctgccccggaaacaatgagtggcaatgtggggtgaaatgatgcccagttcaccccacggtcatgcccttccaacacatattttacaactgcatcaacacctccaaacagatctgtgttcatctgggtgagacgcaggatgtcatctgcaggtgacaccgtcttcttcctcaaagcaccaatatcccaaacacggacagtctgatccagtgatgctgacacaaccaggtcctccttgggatggaatgatgcgcacatgacatagtggttatgtccagtcagcacagctacacatgtgcgtgactgccagttccagatccggattgtctggtcatcactagcacttactatccatgggtattcgtggtggaattgcacggtgcgaatatagtcaaggtgcccgtgaagtgtgaagaggcagcggtgtgtcttgtaattccacaccttaatcttgtaatcatcacctgcaatgcatcacagaaatcttagaatagttcagaagttcaaccattccgcatcccaatcatattagtccaccgagcaatacgaccggacaccagtatgacttcgtttcaagtttcaacagatcccaaagtccaggtttcaacaaattccaaaggtccatgatggcaccttgccatcgctaacttgctacttgtatcagattcacactacaaaagctgattctctctggttgagggctacacatcgactcattctacttcctatcatatctcttctacggaaggattgcaaaatcgatggagatcccggtcataaatagaaacaaaatgtcacatgaaggtttcaaactaacaattcaccaaacagttcatcttaagctaagagaatagaaccagcaccagatccaaccaacgaggatcacttgcacaaccaccactgtacacgaaacgcgatctaatcgcaaaccacgtacgcgtggtatctacctcgagtgtcctcattgcaccatgaaatggatcacgcggaaatctaacggccacgcgagacgtcctccaaatccgaggaggaggatccgaccaaacacgcgtcgacgccacacccgaccccgcgagcggcgaaccaccacagcgaaaaaaaaaatgctcgaggcgggcgagatctaggcagggaggaatcgatgtttacctccggagacgaagagcggctgcgtggcgtggaagtggacgccgcggacggggccgtcgtgctcgtcgaagcggtcgaggagggtgcccatgcggtagtcccacatctggatcaccccgctgtggaggctggccaggatccatggccgccgcgggtggaagctcagccccttcacccggttgctcttcgtctcgaacttggtcagcatcttctctagccgtccccccggcgcgacggcggcggcggcggcgaaacccctcgccgctgaggcgcgcggaggagagagaggggggagggggggtggtatggcgttgggtggagaggacgaaggtgtttttgagatctcggggtgggaggaggaagaagtggggggagagatctgggtttcggacgcggtggtgaggtggtgggaggcttggccaccgttggattctggagacggggagatctgggccgttggttccggtgtggccgtgttgtcagattggggtagacttgtttaggggtgagtcagcttggtccgtaaggtacctgatgaatactgtagcttcagtacgaaggcagcgtttttgacttgtcagtagcagtagagaaaaaaaaaagtttagggccatttgaatcgcatggttgaaagaaatgtaggaatataaaaaagacaggattctgataagaattgaagtgtaaaacagaggattgcaatatacatgaatggtcgtttgattagagcgcagaaaaaaaacgcatgaatcgaatgagagagatagactcaaaggacattttctaagaggttggagctcttgctaaaattttcctctaaaatccacatgcaatgtgtcattccataggaatttcataggttttggaaagcttcaatcatttgaatcaaagtaccaaatagaaaaatttcctataggatttgaatcctatgaaatttctacataaatcctttgtttcaagaggccttaccttttgtagttatgtcatttatatttaaaaaacaggatatatcatataaaaaattataaccatgctagtagaaaaaaggaatttataaggctggttataaccatggtttatacttatgctagtagaacaaagagtttccatgtcttaaaatgtcacaacagatgcaagcaaacaagcacaaccataatacttgccgattttggcaggtacagtagtataggaatgagcgttggttactgcaattgtttctccgatgaatcaataagtgcattatcgattggaataagataacttaatggacgatccttcccgagtcttcatcaacaaccaagagaaaacgatagacatcagaaaaggttaaaggtggtaaacaacataattccataaatggaaggggacaaaagacctagacagtatatcactatattagatctaatcttgtaaatactttatttgaaaaacaaatctaaaatattcctaaaataaaatagaagggcctcctcaccatcgacaagggtgctaaagacagtagggaagggaagggggactagatgggttgtgaggacgaaagccttcatgaattaaattggtgattcatggtacgctctcgctatgacatattccagtttaccatccaaatctatataatactttatctatagatatatccacctagtttatttgctataaaaaatctagcacatgaagtttaaagtgcatctaggctctaattcaatttcagtaatcaatgactagcgattagagatgactaacacctttgcatataactctttgggcctacatgtcatgtcagtggctagatattatggaacttggtccctaagctttctaaaaatcttgaataggtccttatcttcaaccacaaataagaggagtgtaataagtggcgcgctcagccaagagccaaggcatgcccaggggacctccgtggtcccttcgggtgcagtaggcacatcatagagtggctagaggacgacgggcgacgagctcctgaaaagccgtggccatgatgcttatggtggtgggtaggcagtgctcgggtggtagaacggcaatagctctagcaactacatgcatagggaatagggaaaccgtaagcaggctagggattttctcacttagaagggcttttcccgcacttagtgatggcgggaggtagcagtggtgcttcggcaagatatgaacaatgttggtaggcgcggctattcgggaaggggaaaacgagatcagtgcaacatggggaaaaaggtgatgcacatggttgaaaggtgatctcaccgaggacgttgcgataggctcttgtgcttaccagcaccaatgatggctcctttattcctgacaagagagagagccatgagctccctcaagttggaatagaatggggcgagttgaggaaaaggagtgcaacaggaaggtttatgcgagggttgcaagctcatttcatggcattactctaatatggcgacctcaagccgtgtggtgatggaacgggattgtcgggggtaccgtggtatcagggaggagccaggaggattgatagcttgaaatctttggtcagcattgaaagatttggtcggtttgacttagtcggcacaagagggaccgtatacgttcaacgattagcgagaaagaaatagagtaaattccctgtgtacccctgaaaactcactcaatccctttcatactcctaaaatttacccgatcccttctgtacccctgaaatttcaatttgatcccttccatgcccctaccgttacattttccatcattttactgttacgtttggttgcaaatgtcttttttgcccttgatgctttaggtttaaatataagcttcaaaaataattgaaaattttgtttgagtgcacatcgtgtgcattttataaaactaatgagactaaataattagtgcagaaaattttgacataaattttgaaaataaaataaatgtaaaaaaaataaaatttttatttgaaattttaataggacaatggatttttttatcaggagcattcataaaaaaaaatgttgtgaacattggtatacctatctttatatgaatgctcctcatttttatgacctttttttaaaaaaattaatacgtatttttttatttcattatctaaaaatatttttttgggataaataatgcatcgcacaacaaactcataactataatagtctcatgcgagaagcttttatatttttaataatgtaattcatgaatttctttgttcatccaagggtaaaatggtcatttttatagaaaatacacggtcaactaacggtcaactgacgggaggggtatgcaagggatcaaaatcaaattttgggggtatataaggaagtaagcaaaattcaggggtatagaagggattaggaaaaatttcaggggtatataagggattttctcaaagaaatatggtgagagatgagtgttcaaaggcgagtaaaaaaaattctacaaccacattgcataataaaaaaaatcaaataataatttcatataactagactagaacaaagcttaagaggtgaaaggagttttatgctatgatttagtagtcgttgagacctatgttactcaaaattttagactcaatctacggggttttttttttgcccacgggttggtgggtacgggcgtgtaaagaacggaccatacccatgtacctaacggctaagagttttcgcccgtcaatagactcatgggtataagagttagaacatgattagctcctaatagagtaaaaatccgtcgggtgtcgggtcacgggtccccattgacatctttacttccaagtcatcatgcatggaaaaaaaaaaccaaaaataatttagcgcatatgaatttatgtacatcattttgaagttttcactacttcattttcttcttggatgttgcgtcgatgatgaacaaattgaatgaagttaaatttctatttcaatggtagaatttaataagtttctaatccatgttaagctaatcttattgaagtataatattttctataaggtcatcgggctatgtgatgtattttgccaaaagtcttcacagtttatttatgggtgatttaactacaataagtgggaaaagattatttgtttagatcttggtttaaaattctaatttgactgagttgctggggcatcacaataatggtaaagattataaaatgtttttgtgaagtctgtttgttttacttcggatcgagttgtcttagccccaggccccagcatgctttgtacctttcctccatgtatgaaaaatagtcatgagtgttaacatttttatgtattgttcgtatattataataacatctaaaatttactaaaatgtacttagtatttatttgtgattaggaaaatcaattttgctttgataaaagtatttttccttgcatttcatttgcataaaatgttgttacgtgggtgcatggtttgggattaaagacgtttgatttattatatttgcgtatgctatgttttgattttcatttatatgtaaaataaactattaaaatgagttttaacattttaaggcagctaaatgcgtcccctccccggtccagtccccggcattctcagcggtgacgagggaaagggtacccatcttaggatttattccaattacatcctcctattatcaatctaggatatttctcccatggtgtttcttgaatcaggtttggttaaattcttttgctctttttacatctcttgttggaggttatttcgtttgcaagattcccagttcgccaatgaagcaatcaatggcaccacctttaaggttagggtcaccgatttgctgatttatcaaaggagtgaagatagtggcctgtgttccttgatttctttgtgtgcatgttggagttggttagagttgtctcactatccattgttaataagagattaagcagcaaacaagagactaaaatgtggtaaatttccagtagcatggaaggaatttatccgttcactaatgaatgattaccgcgtctaagagcataggggtttgacgccgaacaaagctaggcctatatttttcagttaggacaatctatatatatttttaacttttctggcatgaacttaatgtgtctaattgtactttgcccccaaaaggcctatgcccaataccttggatgtaaagtgttttttttagtcatttactccctccatctcagaatatagagagttttaacccttgacatggctattaaggagaagggtagaaagacttatttgccatcttaggatagatgatgtgcatgtactgactataattaaaacaaggaatagttaggtaatatgggtagcttagtagaaaaaatacaacctattactaatactattttgctatatttgagacaaatcttgaattctataagttgttatatgctacatttgagataacttttgaattttatatttgagataacttttgaattctatatgaggttatattttagtacgaagggagtatgggaaaatatgtaatgtagtagaaacctaaaaactacagttggattcaaaaaatagcacccgagtgtaaattttttactcttaatgacgtgaaaaaatctcatacatttattttttttatttttagatcaatgataattataagtttctattacatatgtgcatttttaggtgcaacggtagtttgctgggggagaattgctgttttttttttccagtacccaagtttacactgcgccaacaatacaagggaaatcttttcccagcatttgggtaaagttctctctcctacttgggagcaccggatttttttttctcacctatataactttttctcagaagttaacacatgacatgctatggaattgcatagtttactgcccaaaacactgtccaggctacgacattgttctgttgtgccgcagcagaagcaacgaaaaatagaactgaagcagtacgttctaaggactaaggacttgtttagatgggactaaaacttttaaatccatattatatcggatgtttggacactaattataaatattaaacgtagactattaataaaacccatccataatcttggactaattcgcgagacgaatctattgagcctaattaatccatgattaacctatgtgatgctacagtaaacattctctaattatagattaattaggcttaaaaattttgtctcgcaaattagctttcatttatataattagttttgtaagtagtctatatttaatactctaaattagtgtctaaatacatggactaaagttaagtccctatattcaaacaccacctaacaaactataatcctgcaggtcctagtttaggccaaagttggcaatgaacaaccaatttggaactgaacagcccgcttgaagatttacaacacacagatcatttgctactcctaaaaggagcataaacaagtatcacaattctttgttaaccaaacaatcttaaggtgatcaacattgtgaacatacagtgtaacaaaagcaagcgtggacggtgacaatcacaagcaacagaatgaacaaaataatgcgagaaagtagctcaataggatgacaatgaaagtaacaccacgacaaaaaatttccaagagtgaaagtaatattggtacatcaattgtccaggggtaggcgcataggccaccatgagatgatcaaaagtccatatatgacaagtgtaacagctgcctcaaggcaaacaaaaatcgagggaaatgagggggagaagatacaaaaacacgaccatgtatacactcctcaatcagtaaacatgcagctaaaatgtgagatagagaatccctagaattttaagagactaaaagaaaatgggggagctctaccttagcaccacttatctcaactgtgtgggcgagcagacgaggcctgaagcatctgcaccaaccacggcaagctcacatatggtacaaagctgcccttcgatcgaaggaacaaaccgggatccacagtacgggcaggaaacatccttctggccacggtagattggaacatatgtggcgccacagacaacaaatggatttctgtagtcatagttcagctcagagctatccttcttgccactgcactgctgctgcacctgtcgagccctccttgcctgggcctcattagggttgttctccagaagcatccttgcaaagtgctctgcagtagcgaagttcttttgcttgtagcacagacccatagcgcttccaagcacaagcctcatatgaactctctgaagcttgcagttagtgaaataagcagccaattcttgttggcggttgacatcatctctcaactccttcctcttaagttccatcctcaggccaagaacatactccctcacaatctcgatcaactctttcacttcatccacttccctcctcgagtctaccacgataagagggatggtatgcaagatgctaaggaactgcctcagggcttctgggaacttaccatctgtggtggccttataggcagccttgagtctgtcttccatttgtgggaaggtgaaaacaagtgcaggagggcctctcacgttaggacttgcagactcgctccaacctttctcaacagcgattggtattatgggggcagttgcaagtgcacgaagatatgagtggctgcccatgtgcagatcaagaaacaggggcttgaggggagcaaagttttttatgcccaactggcgactaagcaacctcattgcagtgtcaaagttccctgctgctgcatgctccccagcaagagaagatttctgagtccaaatcaggctgacaggcatgcctggtggaggagcaacgaagaccgctgagcgtgcattgccagcattttttggggtctctgcttcaggcggaagttccagatcttctaggtcccaaccaccttcctcgccatcctcctcatttgcttcaccctcctcagcatcaaaaccgtcaccaccattcgccatcgcttcgcttgcatcaacaatatccaggccctcatcaccccagtcagcaccagcagcttcatcgtcttcctcaagttcagccttcccagtagcatccagtccaccctcaaagataccatgcatcacccgaagcaatggccaatcaccactggctgtaagaggagcaggggggatcaaaagagagcgagcttttccttcaggaagagaaggaatattttcacccagctcagcggcaagcctatcagcaatttctgtgagcccatgggtggtagcagtaatataagcaagaggtagctgtccagcattctctaggatctcaactctcttcaacgcatcaccaagatacagagcattgtggaattgacccatcaggttattgttctgtccagcaattttgcacatgaaacccaccttgtccatgtaaccagtaataagatataggaaagcaagcctctcaaaattcttcgtacgttggtatgcatattccacaataccaacatttccctgcctcagggcctcaattcccaacctgtaccagtgatccttgtcatcaatctcttttgcagaagcaactgcgatttggatgttaccactctcaagagcaaggttaaatcttgtcttctcatctttcacaaagtggagggcaacttctggaaagcctttctgttgtaaataagaaatcacagcttgcccacacagctgggaattcttgatcatactcatcacatgatcataccgtttgcgtagaagggccagcttgaaaatgtactcagatgcatcaactgtgaccagcttgttcttaccatcacgatctagacagaatatattgttcccaataacccttgttatgtatataggaacatcgagggttttaataatcccactatctccattgggaaggcaatacttgatatgattcagggtagtgtaaataaacacaccattctcatcccaggcaccacttttcacacgaatggtttcgtgcagtgtacagcgatggacgagcttcttgtttgctataaccactgcatgcttgctcagcagtgcgacagattccatatcactagaccaaacaacatatttaacagaaggtgcctggagctcaccaagaattaacctttgctgcagatcaaagatggtcactcggtcttcggctttgcacagcaagttaccagtcccagcataataaattgcatccgtggcaataggaagagggcttttctttacgatttcattcttaagattcttcaccaaaacttgattgctactcttctcaaggactgcaaacctgttgcgtgccacgaaaacagctgacccaccagcccccttctttgcatcctgcaaatagtcagccctgccagcagaatccttgggaacaatgtagagttcgtatgagcctccatccacatcagagcaaatcaggacagcattttcagttggactgtaagatagtgtcttgggtgactggttcaagctcactgatccaggtcttcttattggagcaagctgaacttccttctgtgtggtgaattcaaaaaaacgaagaaaacggtccttcacatagaaaacagtatctccactcacagagaaagctggacgttccctctccaatttaaacacaatcataccactgtcatgaccagcggcaagaagattcatctcagggtgagcagaaagaatccagaaacgatcatgctcccgcctgaacgtttgaataccggttcgctttgtggcatcccagatgcgaatgcttttgtcctctgagttggacactatgatgtcttgctttgcatggaacatcacacaggacacgttattcatgtgcccccgcaaagtatcaacttcccaagccttggtgtctgtcaaaaaacagcacatttagattgcatcacctattatccctttaaataatgcaatggtgatagtggaagtgaatgttccacaccccacaaagtttgcagcacatcttttttacttccttgaagttctttagtttgttaatatcttattctcatctctaaatcaagtttatcacagaaaggtctacggtggtaaaactgacacatatatatgtagagtaatgtaaaaatcattagtgctacttgtacctagaataacaaagatgaagggtgtgttgaatgaaaaagtcataattcatttgtttcaaacaatattagcacatgtacaattcatcttgcctgttgcaagtagcaatgcatggttatttagctagttcaaatattttgattgctggcatgcatatactttttattttttttaagtttgaacaatatacagaaaagtaaagtgctatacagcaacaataaccacctttagtcctactggcactagtttactaactggaaacatctcttgcattctgcttgtttgctgacaagttagttcagattaatgtagacatgggggaaacgctaattagttcttctgtcaaagaaagacaaatcaaggaacacaaaataattcataataaaagcagatgcataattctgtagctctgttctatgaaaaatgatggatgcaaacaaaaataatgaagttgtttatctaaggaaaaaaaaggatgtagtagcagtattaccattcattctccatatcttcacttgccgatcatctgccccagaaacaattagtggcaacgtgggatgaaatgaagcccagttgaccccacgatcatgcccttccaacacatattttacaaccgcgtcaacacctccaaacagatctgtgttcatctgggtgagacgcaggatgtcatccgcaggtgacactgacttcttcctcaaagcactaatatcccagacacggacagtctgatcaagagatgctgaaacaaccagatcctccttagggtggaaagatgcacacatgacataatggttatgcccagtgagcacagccacacatgtgcgtgactgccagttccagatccggattgtctggtcatcactggcacttacgatccacgggcactcgtggtggaattgcaccgtgcgaatgtagtcaaggtggccatgaagcgtgaagaggcaacggtgtgtcttgtaattccataccttaatcttgtaatcatcacctgcaatgcatcacggaaaacttagaagagttcaggagttgttcgatcttattttatgacagttccaaatcatatgggccactgttatgccaacaatacagatgaaactggtgtgtgacttagtttcaagttccaacaatccaaatgttccatgattgccaaccccaccattgctatggtatcagaaatacaaccatggaagctgctactcttcagttaaagctatagatcgactctcatgtttgaaaagattgtaaaatcgatggagatcctgccatcctgctggtcataaacatgaaccaaatggcccctgaaggttacaaaccaacaatccaccgaacagttcagcgtaagcagatatgataaagctcgcaagcactagatccgactaacccaacccaccaaccaggatccttgacaaccaaccaccactccaaatcaaacgcgatctaatcggatcacagagacaactagaggcctcgagacgtcctccgatccagggcaggatccgagcgaaacaagcaacacgccacgaagcccatgcccgccgccccgcgagggagagagatctagcgggtctactcacctccggagacgaagagcggctgcgtggcgtggaagtggacgccgcggacggggccgtcgtgctcgtcgaagcggtcgaggagggtgcccatgcggtagtcccacatctggatcaccccgctgtggaggctggccaggatccatggccgccgcgggtggaagctcagccccttcacccggttgctcttcgtctcgaacttggtcagcatcttcgcttggccctcccgcccctgatcgtcgtctccggcgacggcgggcgcggcggcggaggcgaacccctagccccggaggcggagacgagcggaggagaggggaggcgctggatctggggcggggtggagggaggagagagagagagaggatggcatggttgtgagattgccacttaagcagtcacttccgatcttagccgttcaaggtgcaatcaacggcggatgcatttccctgttttcctaaacaccagaaccgagagaacggacaatatgccactctatacgtggggattcgataaaatgccactcaatatgatgcaccggataaaatgtcactcagtatgttggtatcaggtgaaataccactttgaacctatgttgatttatttttggatgaaaagaatgcttgttgtatcaatcaaattggccagacgcccattttgatttgatatcagcgtagttggcccattttgatttgatattagtgtagttggcccattttgatttgatattattgtagttcaaccggctaaatttcttgtggtaaaaccaaccccctaagtttaagtcctagtcttgacgttagtgcttataattatggctagttattattttccagtgatagataatgaacccgccaacaatgaaatgctcgtggtgacttcgtcaatcttaccgacccaatctttcggaggtgctcatagaggtaaggtgagtgccgtgtgcacgttataaatgcttgtgtttgtactgtgtttcaaaaaaatatatgccttaccaaattattgataccttaaaagtactttagttcctattaaaaagcactttggttagtgtttggtttgctattaaagtgttccaataacacatgtctatattgcttttttaaaaaagttagtgctcgtagtgaacttgccacatcacctactctcattataaattttacaaaataccctttattaaatgtattaatattaagaaacaatcaaatctaaatgaatatctgtcaggattacggataagacatatctcgtatcctacaattaaccaagtatattagatcggtatacctcatatcccaagatatgtttctatatgcgataaggacatatataaaatattataggaaatatccttatgagctggagactactagagtcctactcgggaaggactaggactattctatatcgtgcagggttcattgtttccgagttcaacttggagactaaggcaatccacggtataaaaggcatacccctggaggggttctggattatcgaatcatagcgccaacacgccgaccatagttttcgaagccgaaggacccaagctgaagccgccgggagatctcatcgaacaatctcgactagggtctcgtcggtctcaacgagttcgtatgttctctctgtattctgtggtcttccatatcaatcccatataaactgaattagggttattattttacgaggggccttaaccaatataatcattgtattttgtctattttaatgtcgtatcgtatagatcatcgtaccaacataccctaataccctatttatctggtctacgggtatcccccgttgacaatatccatatataaaatcaaaataaggggaatatttcctatagaaaaggaatgagtaacacatttcatgaaaaatttattttagaaaatattgtaatgtattttcttttatccgtagcaaaacatatatattcaattagtagataaaaacaaattggcagtactgaaatttgcatgtgttgacattgctaatattttgtcatggtagcaaactaaataagcccaccatcttgccaaaattttgtttaaagagtggccacgtcttaggcaagatagtaaatattaaaccatggcatgattgaatagctgcttttaaaaagttaggaaagtatagtagaaattaagcaaacaccctatgcttctgttgtgtcaatgatttcttaagacagatttttgatggtacaccaaagcttcagtgtagaggattaggattagtgactttaattagacatgttgttttgcgtcgtgacggaggttcaaacgtcccaacgtcaagaaaactaacttcccaactttagcaattgattgcatgctgctctctttgaagtttggaccatacatacatacatacatacatacatacatacatacatatatatatatatatatatatatatatatatatatatatatatataataagctaaaattggaacgatgtgatgaaaaagttgaaagtttatgtgtagaaagttttgatgtgatgtaaaagttggaagtttgaagaaaaaagttgggaactaaactaggccttaggtttaaaaaaattgcaagtcaagatttaaaacttttaacttagttttaaaaactttcaagtgaagattttaaaccttaactcaaatttaaaaacttttaactaaaattttgaaagctttttggatttgaaacaaaatcagatcaatatttgaaaaatatcaactcaggtatgaaaacttttaaatcaaaattaaaaactttcatcttaaaattcagaacgttcaaataaaatttgaaaactttcataccaaaattcaaaatattcaactcaaatttaaaaaaactatcaactgaaattggagatgagaatatttaatttctaaactaaaaaaatagtgaaaaaagtcaaaaaccgcgtctggtcaattagctttggaaagagtacgaattaccccctcacccaccccgtactatcgtggttgaccgaattaccccctaaactcaaaaaccagatatctctcaccatgaacttttaataccggataagttacccccctcgatccaatccattgtaagcaaagaagtcatctaaactcgaatattggatttcaaatcccgtctggttttcgcgcctcgatcaatgaaatctcactctaatactgaaactttcaggctctcgaaacactcacttcatagcacataatatgctatggtccttcaacccttcacaaccaagactatcgacgactcaacaagaaaagaaattgacaacattaaatattttttacataataacaaattttattgaagttaatcaattacataaaaacgataaccatcaatacccttttacagtatcatatgtcatacactacccgaattcccgaaaccatgttcaacgttcctttccattcagacagatccagcaggctcagcctcctctcggttgcacagcacaacactaggcataaaatctcatcatcttcttctcgttttccacacgcatgcttttcaaactgctaaacggtgttttttttaaaaaaagcttcaatacgaaagttgcttaaaaaatcatattgattcgttttttaaaaaattaacaaatacttaattaaccacacgctaatggacggttcgatgaacgcatcaggttgggaagccaggcttccgaacgcagcctaatccagcggcggagtactgcccaggagaagcgttctgaacacatgccccctcctgaaacggcaggaacatggacgtgggcacgtaacagcctgtgaatgcagccaaacaccgctgaaaattcccaacaaacttcgcccgtttccaaaggctgctacgacttcaccataaacaaaagtcacctacccacagcaagaagcactcactgatgactaatccctgagagaacttatcagctaaacacaatcaagtagtgtaatcaacagctggaacagattttgcccagcactccatccatccgttccgaaataaactacactaaaataaataatgtgttatttatatgacagtaccttgtcgcaaaataaagatatttctccacatatctcctcctatcaaccagtcacaaccattttctttcacccatttttatcttcttaaccaattacacccttcctctaatcattcttacatattttcttaatatctatattaaccctataaatacttattttttgaaatagagaaagtataacaaatattgatatatccttagtttaatttattttaaaacggagatatatcttagtttttttttttgcgtgacagcctgacaggcaagcgtgagacagaccccgtgaatgtgtgatgccccccgagtgcccagggaccctacctacctccacctgcgacagctgctgctgctgcgtgaaggcacgcccatgacgaacctaggacctcgtcttcagtgtcgccatcacccggcagcacatgagcacacaacaactttgatcatcatcatcaccattgttatgcatcttatccggtggagattggagaaactgattgagatcctcctcgttgtcgtcgtggatggaaggaggccttctttctttctccgcgtcagcaggctgatcgctcagtttcggtccaaaagcaaaagagagagagacatcgcattctcagattctccgcatcgtctgtggtacaggaaatttgcgtggaaaaattggtcgccgagcaggtgagcgagcgagtgaccgcgatttcggtcgtgttcttgtccgtaagtctgtccgaatttatcagattgatgctgcagattgcgttcaggtctttcgacagtccaactgtaacatccgcggttcatcacactgtaacttcacacgccaacagctcagacatttctaccaggagacgaaacgaatagattgacagctcaagacacgctaagcaacgatattggaacacttcatcaacaaaactcgggtcacctttggaagctagtaactgtacaggattttcaccggaactagttcaattcccgtgagaaaatcctccgaaaatccttattccataggagggatcaagctgaagacgatgggcattgatcatccttatggatcaagctgaagacaatgagcattgaccatcatcaattttgcagcaggaacaacagcaaacaacagggaagcagtgagtcctttgcagttcttgcttgaaatcaaccactacaatgtcaaaagatctaggcagaagctaaaatgatcaatgatcaatacagtcatacactgaaacaagaagcacaaacccggacagtatctcccccgaatcaaaacgatcaactaaaaattgcattgcaatttctgggcgtgcgtgacaacagatacaggatacaccaccgggaagcaaaggctgctccggcgacaaaagggtagcagcaacaccacgaactgaaaacacaccacctccggcggcaaccggcaatcgccgtcgtcgtcgccgtcatcgtcatcgtccagcacctacacacgctcctccctgaattagaacaacacgaacggagaaagaactccacatgaaacaacagcagcagcagcaggaaacttgagtgaaatgttagcgattcctctttcggccttgggcttgggcgtcgtcgtctcacacgaagccgacctcggcgaactgcgggcgcggcttggccgtcgcgccggggcgcgtcggcggcggcggcaccatcccttccgggagagggttcttgcgcgggcgccctcgcgggcgtgggatcttgggcggcgcgtgcgggtcccgcggcttgggcgggcggccacgccggcgcggcacggcgggggcggcggcggcgacggagccgtcgaccggcgcaccgacggggacggggacgggtgcggcggcggcgggtacggccgggtagcccggggggcgcaccttcgggggacggccgcggcctcgcttgggcggaggaggcggcggtaagtcgtcggccgagtcatcatcggcgaggaactcctcctcctcctcctcctcctccgccaccgccgccgccgccgccggatccgccggcggcggcggcggaggagtcgggcggagcgcgtacttcccacccgcgacggcgacgagctccccggcggctgacatccgggagaggtgcgccgcgacgagcgcggggtgcgacggcgggaggaggccgccgccgccgcgggccgcctcgatgcggcgcgcgatggcggcctggctagacccgttctcctccgccagcgacgcgatcgcctccacgatcatctgcagcaaagagaaggagaagacaacccaagaaacccggtcaattccgccacagatctgggcatctggccaggaacagctagggtttagaaagagagcgtgcctcggggtaggaggggaggacgaggtcggcggcgcggtggccagtggaagtggaggtggccatgcctggctggctggctggctggctccctccctctcgtagggttggggtggcgggggcgaggggcgctgtctccttccggcgttggtgctgcgctgtgcgcgtgtgggatttggggccgccgcgacgcggatctgagaggagaaggggggttgtggttgtggtcttgtggatgtgggggggaatggaatgcaagtacagtttagacaaggaatctgtcgggtggtaccgggccggacgaccggtcgcggctgcacgctctactcctcctgtgactccggtccggtttagggggtgtttgggataggaacttcttttttttttagagagagagagagagagtttagcccctctctcccaaacagccccttagtctattcgcaagcttaaattctactccctatgtactaaaaaaaactcaatttaaaagagagaaaaaaacagctaatgagaagctcctttgtcgtgcagtcttgtacctagctttgatcgcttgtcttatttattttttaaaaaaattaaaaacataagtcatgcataaagtactattcatattttattatcttataataataaaaatactaattataaaaagttaggtacggaaacttatggttgcatttaaaatatgacggatgtagtagttggtaataatttggataagctaggaaactcagcttcttctagtttctaattcattttatgaattctacaactataatttcttaaaatctaaataagaacctaaattgtttaagagagcctctagcagctgaggattttagaagaaactgcagctacgaaaacttctgcaaacataccctctcagtccggtcttagtctccggtcttactccggtctgatcgggctggttcggccggctcggttcagtgagctggtgattagtatactagtaggattaatatatacagtgataagcattgtttgagtggtaaagtggtttggctaattggctcgtatggtcgcatctggtttgtggtttgtgaaagtgtcaactgggcaaaggatagtctcatcagatgctggcgagtttggcggtcgttttcacgtgacttgtgacggtggtggtgttgcgtggtagcaacagctggttgatcctttttttgttactagtttggctaatagtggattttatttaatctctggtttctttattaaaaaaacttttaagctctgaaggggtcaatatcgtttgagtgcctatttactttgatcagcggaggctcataatttgcggtaactggtgctctctttgtacagctttaaattcaaaaaaattttgagttagattttcctaagagcaagtactagaagcctctaaacacaagcccaatatatcatgtaaacttagataataacgtggaggagagaaaaagaatagagagatgactagagtatccacttcttatgcaaggaacaacctccatagaaactctaaaaataatagagaaagagataaattgattggtgaaaaatatattgggactagtgtcctacaggcaatatactgtatatgttagtttttaaatttaagagtatataatatcgataaataagagctgatcactgcctctactataaaacttgatctaacttaataaatccatagatctagaactatgattacgttgataacatttgaataaaacattctgctttcatttcaaatgaaatttaaaattttaaatatctataacatgcaaacttatttttttctgtggatctgagatatgaatctataccaaacatgatataggtagccgaatgtccatgatatttactataactaaaaccttgaatgttcatgccaagtgtaagaacatctttagaccttttcaactctgttcataccgttttatatatagatactcgcacacaatttgcgtttttaatagtattttactcacattagggattagggatttatggttagtctttgtctattatgcaaagaatgtgttagagaacgcatatccatgttacatgtgcgtattattataaaaaaaactttagtcatttcattttttttaaatccccgtttgctctttccaaataaatgcttctactcatttattggaaacaaatgctaattctgtcacaaattagaataactcattttcccgatgcagtataaaaatgatgcgcttatttactggggttattttcttcatttttttaaacaactatgcgcatgtaaaaagataaaaagagatttatttaacgtgcagtccattacttcagtgggccgcgttctgcgcgagaaaaggattggaaaaagtacaccgaaggtccctcaacttggcaatgggatacaaaacatccttgaaccgtaaaaccaaatatgctgggtccgttaactatacaaaactagtcatcagaggcccttccgcggtttttatccgtgttttagtctacttgacggctgagtcagcgtgggacctacgtggaccccacatatcagctgggcacgtcatcaccctctccctttctcctctctctctctctctcactcttctcttatcttctggcgactgggcaagccggccggaggcgacggcgcagggcggcccaaggggcacctcttcaaccgggcgccgtcgccgcaccagaatggcggccagagcaggcgaagcggcgacggtggcgggcgagcacggttgcggagaggcggcgtcggcgggcgagagcggtgcggcatcggcgggctggaacgatgcgacgtcggcaggcgagagcggtggcggcggagggagcgtgcctgctcattggcgacgtcacgggcgcgcagctcccggatctcgtcctcccacctctccaccctctcctctccttgtggatcctgcacacgccaaattcacaaacaaaccagattgcatcgattgattatgctgctcgtcatcaagcaaccaaccaaaccaattattttattagcgggtgtgtgtgtccatggccatggctatggatggtggtcttacgagcagaggcgatcctcgaagtcggcggcgaggttcttgaacagctcatgccccgcctccagcatctccgacacctgcattggcattgcaatctcatcgatcgatgaaaaattcagaatgacaaatagcgaaatcaatgaatggagagaggtggacctggcgagtgaaggcgtcaatggcgaggaggatgcgctgcacgtgctcctccgtctccgccgacgccgccaccacctcctcctcctcggcgacggccatgtcgtcctccgtctccgtcatgggcccggtggtgatgttgacggcgaccccggaggaggccgccactccccctcccgcgctcccctggctcaaccatctcctcctctccctgtcctccgttgccctgcacgcatccatccatccatccatcccaaaactcagatcagattgagccatcaaattttcgacccaaatcaaaaatcaaatgcgcctcaacaactgaactgattgagacagtagatgaaatggaacaagtcgatcggaacggaatcgcgtggccttggttcgatcaaagcaacgaacgcagctgacgaccgaatccaatcccccagaacgaacgcagctgcatggactcgcggaccacgaccgccgccgcctctgctccatcgattcccgggtgcactcgccgccaacacctcacccgccgccaaccacgaccgcgcggccagcccagccccgcgtgagcgccgcatccacgaccgcctgccgctggtctcccgcgcggtccgccgcctgcgccatcctttccccatgccggagagtgtgatcggggaggacgagcccgccaccgcgttcacccgccgccgccgcctcgcccttccgccaccctccccttctcccgtgctgcatcgtcggccgtcggagagaagagtgtgtgagagagagaaacagcagaaaagggagaggagggaaaagatatactgacatgtgggacccacgtgggtcccacgctaactcagccaccacgtaggccaaatccgggatcaaaaccgccgaagcacctctggttctgtacagttaagagaccctgtatatctggttttgcggttaagatgtttttttatcccgttgacaagttgagggaccttcggtgtacttttcccaaaaggattcggcgagaaaaacaagagttcgtaggcccatcagcccatcccatgagcccacctagaaaaaaaaaaccctaaaacacgcctgccgttttgatcggcccaagccaccatcgccagccaaccacagactagaggagaaggaacacttcgccggcgacggcggcggcggcggcatggccttctggcaggcgcgggacttcctcttctgcggcgtgtgcggcaccctcctcaaattcgactccgtccgctccgcctcctgccccctctgcggcttcaagcgcaaggccaaaggtcgtcgtcttccccatctctctccctgcaaagccctgggctgtgttcttcttgcggctgatgccttcgttctctttttttacggcgcagatatcgaagggaaggagacgcggtacacggtcacggctgaggtgcggccgattgctctaccctctagctcgcgcgaaaccctgggctcgtctgtttcagtcgcgaccgattttgtttcccctcaagtatctaaaatccataatgcgattcattcagtgtagtaatcctaggagatatagtttagtttgatttacgcgaggagtatatatggttgtgcggtggagcaatccagtcttgtggtttaggtaaaaggacggtttcactgtgtcgtgcttcagtatcgtatttcatatagaggaatggcttggtgattattgaatctacatggcagtgcactttagtagatttttagttttacaaatatccatgctgccttccttgggataatgcaatgcatctcttgggagctactccctctgttccaaaatataaggatttctaggttgtttagcaagtactctactaagattaggtcaaaagattttttttttctttattcattgcagttgtcaatttttgaactttgattttcttagattcccttctgaagcatctgattggctctgcgatcattgaagtgatgggaatcagtgcagaaatgcttatattgtggtacaacatttgaatcctagaaatccttatattttgaaacggagggagtattggtctgagattttattttatgtgctgagatgactcaaatggcaatatcctcatgctttcacatgcatgaatcaactgtggtaatggaatagtatgagttgtaggcaaacatcttatggagcagcaaggtaagatgtatagtgattttctggcttggcatttgtaggctactctgagtctctgattaagtcctatgctccatacttgtacacttctagtacttaacaaagacatagcacctaaaaggtgccaaatgaacattttaattttatggaccacaggtcctgcctttttaatgaactgtgcggtttcttgaatcttgtcccaaccatttatatcagatatgaaagaagatttccatggctatttatatgtagttgacattttgcatgctgttgacaggatattagaagagagctaaaacttgatccatatgtgattcttgaaacaacactgaaggaggaagacgtaattgtcgaaagagctacagtaagttaagctttttcatcaatatatagtctgatagtattttgtagttctgcacatattcataaatccttttctgcattaggtaaataaagagtgtgaaaaatgcaaaaatcctgaacttcagtattacaccaagcaggtcagctatcgatccttgaacatttgatgttcaataagcttaattttcctttttctagctttgatgcttaactactttatgaaaaatgtgtaattgcagttacggtcagcagatgaggggcaaactgttttctataagtgcgcaaactgcaggcatgagttcaatgagaaccagtagtcaccttagaatgagctttttgatcacttctacgattgtggtctaaaaaatggccatgctttgacatgacaagtgattttgaaatattttttttatgcctttgcttgaattatgacaagtaatggtgtgttcgggagaagggtttaggaacctcttccccgtgcatggaaaacggggtggcttattagtgcattattaattaagtactttaacgcatggtttagcagtttgccaaaaacattgtatgtgcttggaaaacgagggagaagaagttggtaaagtgtagtatagaacataccctaaagaatcacattactttgggccacatgtccaatcctcaatcatgctgtttttcgcgggtgctaattgcacataaccgaagtgtttctgttttctaaagattattaacctgaaactgcattttggaccttacggtgctcatatgagctctcttacttccctcaaatcctttatgccctcaacctatgccatttcaacctgttccataaatcatacatgttcagcttctaggagatatggcattgtttgctaactgcaaaaatgaaaaggtgtataagaaaggctcgtatggtttgaggggtgtactcttgtcagcaccaggattccaaattttgcgataaatgggtgcgtatcagtagcgctgtgactcccggtaagagctcatcttgagaggttttctgttgtcgtttcaaatcattttctgttgggactttcaggttatgaccaagttatcaaatccagtgattagtttttttaaggagaattttttcttaactagttcgagatgaagctgggacaaattcgcagtcccaattcctggtctaatggtctatatgaatttctggctatcttgttcttgagctcgagactgcagcttgtttggttcacgttctggttgctcatgccgtgccgagcactcgtgctacctccgtcccaaaataagtgcagccattgatattcgtgcccaatatttgaccgtccgtcttatttgaaaattttaaaaatatttagtcacaaagtactattcatgttttatcatctaatagcaataaaaatactaattataaaaaaaatttaaataaggcaaacggttaaacattaaacgtgaatagtataaaattgcacttattttggaacggagggagtagtattagctaaagctgattgtggtaaagagccaaagaggtcagatgagcagtcatgctcatgcgtgatcagaattcagaaggatttgaaatcctttgctcagtttgttccccttttcccaactcctatttctcgttttccgcgcgcacgcttttcaaactgctattttggtgcgttttttttaaaagtttctatatgaaagttgtttaaaaaaaatcatattattctatttttttaaaaaaactaataactaaataatcacgtgctaattgattgctatgtttttcgcgcggaggagtttggttcccaaccatccgaaacgaacacaaggtccgcaaaatgaacacttgtacactaaaattttggcgaggcatactcatttcagattgccgtagggatgcgaaatgcatcgcgagacccagcatttgtgtacgtgtatgagaatctcctacgtggatggtcactgtgaaaggccttagaggcaaggggttgtatgtcagttttttacttgcaacgtttaaccacttgttttatttaaattctttttgcaaatataaaaaacgaaaaattgtgcttaaagtactttagataatcaagtaagtcacaaataaaataattaataatttcaaaaaaatttaaataagacaagttgtcaaacgttgcaagcaaaaactcaaaatcccttatattattatatgacagagggagtagtagcaaacctacattatacatattacctcataatttattggttgttaacaggaatgaaattagacgtaatagccacctccactgcaaaacttaggcattcaccattctctacgagaaaagaactcaagaccgcgcagtctcccgagttccctcgattggtaaagatacagtgaatccattgactaaccaagcgaaccaaacagagcagtatacttgccccgagaaaatttgagcactgctatttaaccagatttatacccagtgaatggtattttgaagtgttgatagttccgagtacagggatacctccgagatgacaggaacttcattcggtcattcccaatcacatgccacaatgaaaaattgctcagaccatctacatcttcaagggttctatttgcatacagtaaccttgaccaaatcttggtggcacccaaggccgatgaagtgcggtaagagaagggaaaaaaacagcgctcctaggtgacgcattccaacttatggtcaaggatgtttcatcgatgatgacacgggaattgttcgaaaacaagcaacatcaaaactgtactcggctccgcgaaatgtaggaacaacctcaataggaacaagcccatgcctcacactttcatctgcaacatttgtagttactactggattaaaccatgaaacagcatcacaatatgacatttgactgctcatagaagaactggaaatacttacatgtacaagatctacaccacgcgagcaccttgtaaattgtttggttacttcaaatgaataaattccgatataacacgaactgctacgtctcagatttcgttggtggatcatccttcaatcctttggtgagcaaatcgtaattgatagagacaagttgtgatagattctgcagcaaaagaagttagaacggtgtgcagaatataggcacaaatgggctaacaataagttttctacccctacttttaaggattgatactgtcaatgaaacgtgacaatcacaaatttaatgagaataaaaaagaatatgtatttgttttgttggactgctagacactaagaactttggtttgtctttgtcgacactttgcccaattccttttttccactcattgtctcgctggcccacatgtcagtgagccatcagtgataaaatattcagtggatttttagattatgtatcacaaggatctaggtgctattttataatgaacattgtactatcgtttactgtgtggaacaattttgccacattcaagggaatcatcaaactacattttacaaagcacgtgcttgtgaagttgtgagcatataagttgactgacggattactagtatgattcataccaatagcattaaatatctagcgaagttattccaatggtttgagctatattacagtactgtgtctagcgaagtagagatgtgactactatgatttgaagcatattgtaactgaaaaaggtgttattactgcttggtaatgcaaatactgaggacctgttcgtgagtaaatacaagggaaatgtaaggagctgtgggtaaacttttctgcccgtaagtgaaggacatgcattacacattacacgttcattttaaaaaaggatccatcatggttactcatgcttcaatcaatcacattatgaacatgaaacaaaataggtggactgtgaagccgtaggcttactttgactgagaaattgtaaagaaaaaaaggaataggttatccaccgtgataacaccatcatgcttcaattattttaaggatataaatatgtgaaactgtaggattaccttgaatgagaaattgctgaaagaatagttgacatttgagctagattcaaactcagtgaagccactagactcatccccctatttgcacaatttgcacaattgtttagtaaaatgactgaagaataaaaaggcagacaaacaaattgtagttttcttttcctctacttatataaatgctgatgattcataccatatcatcttggtgattgctcacacagctactgctgccactaaggcttccattatcactggaatcctcaaattcgtatgcttcatagatgttttcgtccgatggattccaagaataacggctggtgaagtagctcgtgtcaaatgcactatctgaggaggggacaaaggcagcctgcatatgattccgtgttatcctcggtacacctttacaatggagatgcaactatgtttaaagaataaatagttaaccatatcccaccttttgcctagcaagggtatcccagctaatgtctttaaaaaattgatgctgcttaacctgaagggaataggattataagcatcaatcatttatgtatcataagaagttttgaataatccatacaacggatgaaggtttctaaaaccctcaaaagtcaaaatacctcagaggcgccatttgcacctagccgttggtgagggtcttctgtcaataatctgggtaaagcagtcataatatcacattagttacataaaaaacataaccacaataaacttcacaaaggattttgaaattgagcatgaagtagatagggagtattgtaataatatgcttaaattgcatgcgtaaagattccaaaaatacaaatcatattgaatagttctacctttgagcaaacagatgctataaaccatagaacacaactgaacacatataatatagcagtgtgctactgttaccctataagctgaaactggaaaaaagatagggactgacctatggcaatataaaatatagcgagtaccaagttatcaagcaagaaaatgtaatattttagagcagatgtgtccctgcctagtttgacccaaaatcctaattaaccccaacattcatttgtgttatttggaacctgaataatacagctaacaatctgacgtacattaattcacaatgctgatacgagcaacttttgggtggtgattttacagtacaaatgagggagctcacttcaattgttattgatggtgatgatcatggcaaaaaccctattgactttagtatagaaatttcatgcttgtcattgggataacacaaaggaaaatgcagtataaagacaacaatttattatataattggtccattgaccctaaaagtgacgtaaaagctgtgcaatctagcataatcatctatcacattaaaacttggaagcaagaaatagtaacatgcaatcctgtaagactgaaacatgagttactgtgtattcagaatactcgaaacatttcttacttgtcaattagatcctgagcttcagaactcatctcttctgggacatgtggccaaggtattttgcggttcagaatgttgtcgaaaattgtctacaccaaatacaacaagaatgtcaagttgccacagtttcaatacagcaaaaaacaacattgacttatatagcgacattttgcattaaatagatgaaaacccatgtgttttctagcagaccaaaacccatgtattttctagaagacctctttctctcatattctcaagagatctgaacgggagctttgcatgcttaatgaaagaactttactcaacgtcacataaatggcagagaaatattcagtacatgaaagtctgatacctgggggtgttctgcgttgaatggaggtattccaacaattaattcaaaaagtataacacccacagaccaccaatcagcactagtacctgcaaggacaatcagtactcaagagagtcaaaacgagaagacaatgcagaggttgaaagaaaactatgtcgggcattttaccatgtcctgtccccaaaaggatttccggtgctaaataatcaggagttccgacagcagagcgcttttgtctccgtgctcggtgatccatttcctcaaattcgctcatctgaggttcatcatctccatacaacgaagacccgctaacagcaggaccagatagatcatccgtgctgttgatcagaccaaccttggacaacccaaaatctgtcaactggagaattaagattgataagcaggacatatagaaggcattaaaaaggaacatattcgaaaaagaacgaaaacaatatttattgctgaattacaggttaaatgaaatgaaaactcagaaggaaatatgtgtagcattatcatcaattcattaagatatggattcacttaattagaaaagagctagctgaaatcagcatatatttgatttatgtggaaaccaacatgtcatgacatgaaagtttttatgcattgcctgattgtcatgtggggacgtcactactcactaagtccggcgccggcgacgacagcaagatacggaacagtagtttgttagcatcctttttcttagctaaattggtttgttagtttagccctatgatttgttatgatcttatctcttagatgggtatattaagctgtaaggaagttgattaatgcaagcagaatttgagatcaatctcatttcattgttcctgcctcaagggcgcgtcgcggatcacggcaccgccgcgccgtcgaggtccagggccacgtccgatcacctctttcaaatacaatcttcgccgagttcctccttccaatttgctaactcgtgacattgatacaacacagtttgaaacctcaaaaagtttcaaaactccaaaaactgattctcctcagaactctcataggatatgtgtttattttatctctcactagatgatgccattgtggcaattgctatgaactgctacatcactatctcatttggttgctggaaccaaaaataggaatatatcttctagtcatcagagaacagaaaagcgcttacctttgagaggcatgtgaatgattttttagtttatcatgtactccctccttccaaaagtctaagtcctatttcattctttggtttttccaaaagtctaagtcctatttgtagtcattatatgctatattaatttttttatcggaacccaagaagtcattttagtactttataggttgcatgttcattggttttgtcacatgatgaatgagttaactacatattggtcttggtgcaaaaagaaataggacttagacttttggaaggagggagtatctaacattgaacataaaacaagaaaaatggagagaaaacttaacgatcatgcgcacacataaatacctttatatgcccgtcatgagctatcaataagttgtcaggtttaagatctctatgaactatgtgcatagagtgcaaatattccaaagctagcacctgcagaataaaatgattatcagacaaaggaaaagtgaaaatggaagaaataaattgttagtaaaagaaacttacaacttctgcaaggtatatacgagcaacatcttcatccaagcaccctaaatttctcagtagagaatacaggtcccctccattcaggtactccatgactagatacaaattttcccgggaggtaaaagaatagaagaaacgaaccttaaaagaacataaccaattcagaaccacagtatagctttcaatgatgaagggtcgcatttgcaagttcactcaccacaaaaggattcctcactgtaatcaagatatcacgttcagccaatatactctcaacagcatttttccgaatcatatctgccttccttaatacctgtttcaaaagtaagcaactattgttagaccacatggatgccccatccatcccaaaccgaaaaacaaaagctaataataaagggagtttagcagtcaagcccccaaactattgctttacatcttagagctatcatgctgagcagaggcaaggtgttgtgtgctcagcaaaaccaaaattactataccaatttatcattacttccttttttgtgaggagtcaattcatcattcatgtgaactaaagtcacttcaatctaaaacctatgatggtcaagttgtcacaagtaaagcatgaacatgatgggccgctccactgtcattctgatcccatttttataagtaagctatgactatcaaggagactaatgcaggtaaaaataactacttagagtccaatatcatgtccagtctacaccatagtctagaaaacaaaaactaccaaaccaaacaggcaaacacaccatcaaaattttgccactaccaaaactttggcattgcccatatatttgtctcttgttggcacaaattggcaccaaaccaaacctaccaactctaccctaccaaaatgtgatagtgccaaaagttgccaaagatacggcattaccaaacttttggtagggtatcgaaccaaaatgtgatagtgccaaaacagcataatgatttaacgggagcaactaaatggatcccattggaaccgactccatattagttaactttttaaaagcaaacagtcatataattttaacatatcctgtaatcacataagttacttatctaacaagacgcagatttgattaaaaaacaagggatgcctaactaatgaaatcgagtgcagtttctttctcgaatgaattttagaacaagtgatataattcgtaacattgaccacatgtaccaaatgaaccagcggaacaagtggtacagccaggtttttgtagtatggatagtgtactacagtactataaatatgaagaggtgtactacaaatatgaagatgtgtactataaacatcaaggtgttaatcttttttgtggtcaactagtcaaactgggagcaaattaaaaaagcaaacgcgagaaataccatctctctaatcttccttctctgaacattgaaggtccacaggtatttcctttcttttgcaaaagttttcaatccaataatttgaccatgtcatgttgatcacaaggggtccttgataataaataatgaatgacttccagctggtggttctcatagaaatgtgttgtttagaaaggtatgcataaatgtacgaaaaacctcaaggccctttctaaagtatcattgcaataatatcacaatggcaggggttatcaactgaacaaaactaccgccgagtatcgacaagaacaaatattcttgagtgtgttttattgagttttggggaagaagactggcaagtcaacatatttacatcaaaagcaatttcctttccccttttttgcatgctaaaattctggtttgcgtctgaaagatagtcatatagcaatatttttggtttttggtcaagaatgcctacaacattacaggtacaaccaaggaaagcaagtctgggtacataagggaacaaatatatggcaacaaatacctttatagcaaagaggtctcctgtagttcttttcttggccaagaaaacacgtccaaatgctccacggctgataggtttaatgatttcgaagtcatcaatcgaagtacgatccttgactgggtgaacaggactagctcgtaagctacggacaacatcatcttcttcatccattacagtactcgctgaatcaactttgtccatatcaaccgaatcacaaagcagtaggtacttctccctaagaaattatataaatgtgaagggaaattacaaatggaaactaatataagtgctaaaagtgacctgcaagaattattttcatgtgcttatttagtataatgtcaactaagataagccacttgtgtagtgaactcagcagagactcaccggtggagtttttctatacgtgtgccaaatgtctgcaccgtgagagcctcatgcttcctacgattgacaatttcttgcagatcttctatgcaggtaaccaatagggagagtgccctttcttcatctagaggagtagttgcaatgcaccgcgcaatatcagcaagttcaacaatctgcacagattgaaggacactgttaatcagcacttcttgcattatattacattacaaaatcatttactactggtagatgatgcatagtgatcctaacctagattattatatggtaaataccacactgaggaccagtgtgaaggggggagtccgcttggaaagggaggtaaacatgacaggagtgaactttttaatctttcttcttgcttaattcttaaaagaaaacaaatccccttgagctcccaaaggtgcagctaagacattggagatagtagatgccatctaatcagcaccatctctaggtatacttggtaacaaagcaaactaaccaactaacagcatctctaatgaagggcttgattggtatagcttgctgcagctgcagctgtaactacagtaccaataacaggttttgtgatgaagctgctatagtgctgcggctgtgcagcagcagcaaagctgaaccaatccggcccgacatctaacgtgtggcagtggcagctaagcccacaatcatacatggcacattcgttccagccacccaaccatcatatatacgcatgacacagtggttgattggaaaaatagtggcattattaccattccttttcaacaaacgtattctgcacaagagaaactaaattttcataaacaaacaaaatattttaccatggccatagctttgctcactttgcacattgtaccttgtacaaaaataaacaccgactattttctatagtttagcctagcaaaataatcaactatctaatatatgtatgtgtgattgagagagcttacctgaggaagatcatcgctctcattaattgcacttcggccagctaaaagcatgtctatgtgattagatcttggagttgttagtggagatctaggggtcatacttcctgctgaagatgtagccattccatgatcagattttggcccaaaacgagtcttacatgtcatggaaggaaggttttttatgtcatccagtgaaatagtgctatcagcctcctggaggtagtcaagcatatcagctgagcctcttctagaccaatcagagagttttggagaggggccatcagattcttcattgatgcttgaatttgatacttttgcaacatctggactgccaacagcatttggaaggtctttttgtgtataagattctaccaacttttcaagtgcttcagcaactctaattagacgttcatcaacgcttacacctttttgatcacatctgtcagcacttgcacatattgctgagtgattttctacataatgagtagggacatattcttcacatatgcgacacattattgaaccttcttcagaaatatttggctggtcagaccagtgaccccatgaagttttgtgttgatgcttgggaggaagagattgatgtgatgtagattccactggactgttcaattcagcctggctactaactgcagggggtgtatctgttttcttattaggtgattcctctttaataggggtagggtctttagggggttttgggacaggtgatggaaaaggtttccaggaagatatacgctccctggttggagactcaacctcctttttaacatctgttgtatcaagcggtgaaagaaacttaacaggctttatctcctggcttctcttccattttaaattatgttgctcttgactgtacgattttcgtacatcacttttgctgcctctggttgtagtgtcatcacctggttgagccaatatctgcctatcagcagattgtatgatcttatcacgttgatccataacaacttcatcctccgcaaagccactctctttgtgaaattgaagcaatcttgtacatctcgtaaggataaaaagcatccgagtgtacagtttcttcagcacacccattgggagctcctgacgatgatcatctaaatcttgcactatgccttcacattgaagccaaaactcccccggtgtcattacacagcagctacgtgcaagtatgagcaaatcttccaaagtttccttccactcaggatgagaatctgcgtacttttccattacaccaaccaagtctcctgcaaatactgccaaatctgaatttacctcctcctttgctttctcaaatctcacctgaataacttttaacacctcctgtgttgatgacagaaaacaagattaattttgctccataaatagcaatatgaaggtcattaatcactatccacgaagaccatgaattgagaataccttcaagttgtaaatgccccgaggcttccaaaaagggaatggtcggacccccttggagttcaactcatgcgaaaaactttttatatctgcagggactctcttccttggagcactggtagcctgcatgatggccttaaagcgtggagattccgattcctttggtgtttcacagggatcatatgcacactgtggattaagatgacagtacagataggaggagtaagaaaagagcaaaagatggttttgtcattgcttgtttaatttaaaaatgtgaaatgggcttgtagaagcatcagtaccacattatctggtatgtgagttggagtcctcaaatctccagaatggttccgcaatgcattcggtttaactgtgtatgagatagattgggcacacacatatcagattttcaagttacaaaaagacacacagattatacattgttagctattgttatatgggataaagtagaatgtgctatggacaaggctacaaaaagaaatgcattttcatatgagaggagcagaaactattaaacaccggaagcacatattatagaataaattcagccagttgtagcaacaatatgaatctttatagtaaaacatttctcagcaaactactacagagtttgctgcggactccaagaagttcgttttttttaagaactagcaaattaaactgaaggatatagctccgatagacataaacaggtatttaagtaagtaatctgccacaagtcaaatgaacacctcactccagtcatatatccaatgagctgtgtatatagaattagaagctgtgcgcacaattacattaacttcaatcatgaaatcgcaggaatagcttatgatcaactgctaaaaatagcaaccaattactagctttgaatttaaattgtctacaccttttaataactaggcgggcattccttacttaaatggtaagaatcattcttacgttagcaccggtggttccaagtttagcatctagacaccatgcggcaaaatgaaaatcatgggcgccaatctccttataactcaacacatctaagttgaaattattatgtttttactgtttttaacaactaccgtcgacacggtaagctctgaagggagcttgaattgaattgcttaatgctgttctccccttactatcaatgcaagagcttggcaatgataagctaatccccctatcttccaaaaacctgtagccggcttgcaggatcatgatgcaaaaacctggaaaacaagtttaaaggatgttcagcttgcaggatcaacaaccttttgcagagctctttccttccaggctcgttgctgtggcgccccgcgctggatgttcggccgctttccctttcccccggctgccactggtcgaatctgcccatgagcttccagccttcctcccgccgccgccgccgccgccagccgatgcagccgacgggtccgcctgcgcctgcccacgcgatagattactgctcccgagcgcggcagcgatgcggtgcccctcctgcggcaggggcccggatctcgtcttaatccggttgaggcccagcgaggacgccaggatgggcgacagcgccgccgccgacgccccgcccgcgcccccatcccgaagctgcgccgcggcggccttcctcccgtccgccgacgggctcgacgaggccgacgcaggcgccgcccccgcgccgcccttggaggcggcggacccggacgcggagccgccgaagagcttgtcgcgcttcctgggggtctccgatttgggcttcttcttgtcggatctggacgacgacgacgacgacgccgccgccggcgaccccgccgcgggcggcgcggaggtgggcgtccgcgggctgttgctcccgtccgtggggctcgacgactccgacgacttgtgccgggacgagaagaacctccccttgaacaccatctcctcgccgcccgccggggaggcgttcggtcgaacaggtggtgggggcggccgagcgagcgagactgcgagtccacaaggagagagagagagagagagggagagcgtggtagtggggacaaggccgcagatgtagagagaggagagaggagaggagccgaggaggaggaggactcggccggtcggtcggggcgcgcggcgcgtgctctccctcctcatccccttcccttgcggctcacggctcgggcctctgggtgggacggtacgagagagagaccgcggcttgactggggcagtagtgggtcagctacagtgctactggctatgctaatgctacagcagctccactggggtcagcgagggagtgtggtggctttggtgggccggaggagagggggttcgttgcagcggggaaataagtccactttgactcccttcggccttgtttggtttggagggagttgaaggggactggagaggtttgaggagaattattccacatcacaataggtgtagaataaatgtttttggcttggttatcaggttgggtaatgaaagttgtctgttgtaaaaaaaaagccgtggaataaatcacttccaatctctcactcttatgcattaaccgaacatggacttaactagtgaccaaatctgattcgtatccttgaaacataatacaggatatctcgacccccaactattaaaacaggtgcagtttaactctctcggcagttttggagggcgttttcactaacgtggtagtattgacctagtctgtggcgtcgacatggcgctttggttctattataattaaaaaaatatatatgtgggatccatttgtcattcaaaaaaaataggacccacatatcatcctctctctcctctttcctccttcctctctctcctcttcgaccgtctgcaaggggcaggagttggagcagccggtggactttcgtccgcagcacacgtatgctgcatccggcctacttgacctcgccatcacgctcctccgcctcacgctggacccaaccaccatgttctacagctccgccatccacgtccacacctcccacagtctccagctcgccacactcgcgctgctctctgagatgctgggtagggggctcctcccaacctcgcacacctgcgccgccgccgctgctccagccctgctcctcgcatacggccaaaggtggaaaaggggagacaaagggagagataatggagagagagggaggaggaagaagggggaggagagagatgatggcatgtggcccgatagggttaatggactcttctgtcagatatggatcatgtttgaggagacgaagattctaaaagctagctggtttggtaggtagctatagcctctaaaaacatgaaaaaaaatggttcctcagcttgtaattttcagttattttctaaatagattgtatagttatacatcacataaaatatgtacgctttaaattggatcatgctttaaattgtaagtgagtttctagtaatggtaacttctcttacaatttctagctcttaaattggatcatgttttttttaaatattttcagcttctctatataattcaaattgtcaatcatactctattacaatgtcaaaaatctaaaacgacagagtagtagtaatattgaataaaatatgatacatttgaaagggtatagttcgaaatgtacatttgaatccaactcgggacaattcgtcggtatgctgtgtggacgggattgagagagacctgacgagtgggtttgctgttccggcgtgggggccgggggagtttctggtttccagcatcgaggattcgagatgctgccattgtgccatgctgctggtagcctgtgctagtcagcctgttcactggtgcagtggtgctgctgatgctcagctcagggcccggtctgggagagtcaaagattcccggtccatggtttgaatttggaaagagagaatttctcttttacttttctagtagatctgaaaattattttaattttgctaaggtgaaccggtgtgagctgagatctactccctccgtcccaggaagaagggattctggaagcccaaggtagttttagaataaagagtaaaagactaaactaaccttagtactagtacatccaattattagttacaaataaagtattactactgccacacattaataaaatataattagtactccatactcaaacacacatggagatacagggcgccaaggtgccaaataatttgaatgaagagttaagcgccactttattggcgggatgtaatacaaatttagcacaccccaccacaacaaaccctacaagtttcaaatctgaagtttccctcccactttatcacttcataactctgcaaaaacacaagtttccctcccactttatcccttcataactctgcaaaaacacatccatggctttagatctaaatatagcattagatgatggagatgaacatgctatacctaacctcaatgaagcagtggctgaagaaacagcagcggctgatcaggaggatgaccaggttggaggtgatctccatggaggtgccaaccgtgagcttcctggaggtgatttccaaggaggtgccaaccatgtgcttccttttgatctcaacttgcatgcatctgaccaaaggagaaatacatctaggtaaccttgtaaacatgaatagaaaataaatgatctttgtagatatggcttgcataaatcactctaaaatctttgccatttctctgtaaaaatgatctataacatgtgcattgatgcaattgctatcttcttggaacaaaattggtctttgataagcttgagaaaacaattaggacttgattttttttctttgatatttaccaactcaattctgtcaagagttgagcataatgaaatttattcccttccataatatcagaggttatactagattctagatatgctagattctgcatggatagtttggttaggccatgtttatttcaaggtgaaaagtttttaagtgtcatatcatatatacgaacacatatttaaagtattaaacatagtataataacaaaacaaattacagattccgtctgtaaactgcaagacgaatttattaagcctaattaatccgccactagtaaatgtttactgtagcaccacattgctaaattatggcgcagttaggcttaaaaaattcgtctcgcaatttacacgcaatctgtgtaattattattttttctatatttaatactccatatatgtgtccaaaattcgatatgatagggtgaaaagtttttctttgtaaactaaacagggccttagccaagctctgtggatttggttgcccgatggccaataatgaagcccataagtaaggccatgtttagatcatttagtccctggatattaaacttgtcccttactgttttgatctaggaacttcagtaaaaaggactaaaagcacgtagaccgagggagaaaaaagagagtggttatcattttagtccttataaatacctctaagagggtctaatagattttagttccaatatacacctttaatcccttttagtcatccctatttagattcttaaggattaaaagtgactaaaatggagggattaatagattactccatgaccaaacatgacctaagaaaacatgaatgcagtttacatttaactatccttcgagatagtcacgtctacaaactaaacctatttttgaacggaggatgtataatgaataaaaactgaactactttctatgaaactgaactagtgatctaagggcgaggtcagcgaaggtgaatagactcatctgcctaaggcttttttaagtatacagacacacatttaaagtattaaacgtagattaataacaaaacaaattacagattctgtctgtaaaccgcgagatgaatttattaagcttaattaaaccgtcattagtaaatttttactgtagcatcacattgtcaaatcatgtcgtaattaggctcagaagatttgtctcgtgatttacatgtaaattatgtaattggttttttttccacatttaatgctccatgcatgtatccaaacatttggttttgatgtgatggaaaagttgaaagtttgaagaaaaaattgtgaatctaaaggcctaattttaatagaaacgttcgcccaacatatgtttgcatctcgagcctcataactgtagtgggagtatttgatacacacgtatacgactgttccatcttgttttaattttcgacaaaaatattgataaattttttgatctttaagcctgaggaacaaaaccgtatagtcgtgcgattttactttcaaaatgacgataaaaattcaacgaatgtcaaatgtcaaaccttgatttctcccttccagaagtcgagagtttttgaattcctcaacttgccgtcggcttgtccctcttcccgcgtgttgaaatcatcttcccttccagaaagccaacgccttcatctgatcatctccttggccaccaagaaatgccttcgtcgaacaccttgccacgccacgccgcgcgcgcgcccatggccctctcctgcgccgccgagtgcgcgctctccctcgcctgcgcgcgctgggcgctccgccgcctctccctgtccggcgccgacgacagcgcgtcctggcccgcggcctcgccctcctccttcgcgcccgtcccgcgcgcgtgccgctccgcgctcgcggcctggcagcaggggcacgacgaggcggagcaggcgccgacgccggcgccgtcgcggctgtgcccgccgtaccgtctctcccacgaccgcgcgcgcggggaggtcgtgctcgccgtgcgcgggctgggactcgcgcggctcgaggactaccgcgtgctcctcgacgccggcgggcccgagccgttcgcgggcgggcacgcgcaccgcgggctcctccgcgccgccgtgtggctgctcgaccgggagggccccgcgatccggcggatggtggcgaaggccgggccggcggggtgcaggctcgtgttcgtcggccactcgctcggcgccggggtcgccgcgctcgcggccgtcgtggcggtgaggtgctggctggagcggctcggcctccgccgcggcgacgtgaggtgctacgcgatggcgccgccgcggtgcatgtcgctcggtctcgccgtcgagtacgccgacgtcgtccactccgtcgtgctacaggcaagcctagcctcccaacaacattgttgcctctttccccttagctgatatcgcgtccatttctagcattgtttatcgaacattctgcaataagaacggaatccgacctcgattcatttcgttgcaatgattttggaattcgaatcgcacactcaattcttgaatttggatgcaggacgatttcttgccaagaactccagcgcctctgcaacacatcttcggatcaattttctggtaattaaaacagctaaaaatactcttgttatccatgtgttccaacggcgttgattactggttgttccagctgttgattcaccaatttttttagaacaagtgattcaccattttttctgtttcttgcattgcagtttgccgtgcctgctgtgtttcatttgcatgagagacacgtttgtgtcagaagagaagcttaaggatgcatctaaactctacgctccaggaagagtctttcatatcgtggagagggagaactgcaggttaagggccaaaattccaaaaattaaaacttttttaaaattaaaaaaacaaaatccttgtgtgctagtatggcattagacattagttagaagcttccgaagattagctgttatatttacacttgattttaattggcattgtatccacattggctgctatgcagatgtgggagacttccgccgcaggtcagaacggcagtgccagcagagggcagatttgagcatgtggtgttgtcatgcaacgccacttctgaccacgggattatttggatcgaaaaggaggctcaaaaggctttggatgtgagtaatttcgtctttgcacatgcctgcctgtcaatagtaaaaaaaaattatccctctttgtaaccgatcaattattctttcttccctttttacgaatcggcacaagacaatacccgtttcattgtatagagtaggagaaaaagtggtataaccaacatgttgcatggctttctttaccaagttgttgttcatccttagcaacatgatttcattaatcattttacctgatgtttaatttcttcgcatgttcctttttttcttttctttcgtttgctgtcctgcatgttctggttgccaatcagttaatggagcaagaagaattgacactacccccatcccagcaaaagatgctcagagtgaaagaaacggaatcactcgcagaccaccaaaagctcagtgcagggaatccacaagaagacgacaccctctcctcctcgtcaccgttcagtagccctagaacttcgacgacatcatcattgcgcagcgaatcgtcgtcgacgaggagcgagtgggatgagctcgtggagatatttctgagtgaccatgaagaagacggtgatggtaggacaaacatgtgtaaccgggcaggttgtttgccttgctgtaaataaaagattgttgcatagaaattttagagtgtaaatgaactatattgaaattagagtgtaaatgaactagaagatggttaaattttattccaattcgacctcacgatcaactcgattgaatgttaatatacagaggctccaataatccatccgtaccagtgtactattgtcccagatactagtaaggctaagttatactcctatttctcaacttgaaactttaacttcctcgttgtttttcaaactgttaaatgatatgtttttttaaaaaaattctatatagaagttatttaaaagattcaaatagttattaatcttaattaatcacgtgctaatgggatttttcgttttacgtgtgtcaaaaatctctctcaaaaacaaagagatcgaacgcagcctaagtagtactccatagtattgatccaccatatgggtactagtagtaatttttctcttcacaaaaattattcagttaccttatcactatatatatttctaatttctatcaagcttgtatggggtaaaatgggtaaaagaaaaacatcatattgaaaaaaaagaataaagacaacattattcatcgtttcgcccacaaataattgtaatattgtgacacttatttctaactaaaatttaattatatgaattcatattttatatatgtgttcttaatgacttgaaatccaatattgaaaaataaattatgatgaaaacaaatattaaaaacaactttcaagttagaatttaaaatttgattgtgtttactctccctgtttcagattataagtcattttgactttggttaaaatcaaacagttccaagtttgattagttttgtagaaaaaaatgtaatatttttaactcaagacaaatatattataaaaatatattcaattattgatttaaagaaactaatttgatgtcgtaaatattacaatatttatctacaaacttaattaaatttaaagtagtttaactttgatgaaagttaaaacgaattataacgagggattaataaactgaagagcagctgaaaaatttgtcatcacttatcaccatgacacggccggtgaccacatttcgccggtgaacacacagacacaaaaactagccgttactctatatcgtagtagcattcaaactaaccagccacgcgaagccaccacgacaaccgcagcaaaatctccggaagccgccccgccaccgaaccgaagagcgccgccaccgccatggggagtctcggcggcaagtccgactacgagagcgtccgcgacgcccgcatctccgagaacctggtaagcatccttctcctcgatcatcaactttcgggtttcctctctggatgaggaatctctcgcgcgcggacgcgatggcaatggctcgcccgccgcgctgattcttgggcgagtccccgcaggcacggatggagatgctcggcctgcgccgctgcgccggggagttcagtgccatcgcctccgcctccgcgtccgcctcggcagcagccagccgccgcgccgggatcggcggcacaaccccgaggaggaaccccaagccgccgcgtgtcctcaccccgctccgccgctccggccgattggtcgccatcgccgccgcggcgccggccggatccgcgtcgggtccccgccgttccgcccggcttaacgggcagacgacggagcacaaggcgctgcctctgaaaggttggtccctctcgctgccgcgttcgctgaaatgctgaatctccatggcatctggctgcctgagatgggaacaaattcttgtgctctctctctcttaggatctttgagtaagtttgccgcggaggaagcagaggaggaggaggaggaggaggagcaagaagagaagaaggcgatggtggtgatcgacaaggagagggtgcggatcctgcaggagcggaggtgtgacagcaaggggaggggcgccgtgtacgaccctgttcttgggatttgctgccatttctgcaggtagattctccccactgtcaacatttacgaccgattagtgctcctcatcttgttcttaatcaagaatgctaggtaccatagttttcatactgtgacttgttgagaaaatttcttcatagttttcgtatgatttgttgagaaagtctcttctcgtgtgatcttaggcagaagaaattgtgcggcgaggagggctgcaagcgctgcggggaaggagacctgaaccagccttgcataggtaaaaaagaagcagtaaaaaggtcaattttttggtgtcaattattatgtgcagcttgattgcaatagtcaactccttttctgtgtcaatctttgacagggaagacggattgctcctcttgccattcttcttatggaatactgtgccgtgcttgcctgaaagtgaggtatggggaaggtaagcttcatgctgtcaagaaatgccattgttgttggtcagcttattgtgttggtaaagcttctgattttgagatgtggtatcagacatggatgaggtcaggaagaacaagaactggatgtgccctcactgtattgaggagaagggtaccaagaaattctggatatgtaacaggtatatgattcttacaaagctttgatatttcatcccaatatcaaactgaaggaatgtatgactatgctcacttgctcgatttttcataaaaactatgcagctccatctgcttgaagaagaggaagttatcaccaactggaattgccatatacgacggtaattctgcgtccacaacttgatatatgaggcttatccatactgtcaatgctaattctaccatgatacatgttgttcttgatggtcctaaatcctatctatttttggatcccttaacaacagcgcgggagcaaggttacgagtctgttgcgcaccttctcatggacaagctgaagtgccgagcattctgaggtcttctatgtcgttcagagacgacgatgatgtttgcctagcgcactggaaggtggaagggccccttttgttttgttgacagtaggtatgacgcactttaggagaaaaactagtgtagaaatgagtaccactattgtgctcaagattgtgaatctagtactagaaccttttgtagccgatgtttccatatgctgcttgtgtttgggggcagctgggctattgactgttcttctgaagatccaagcaagggaacatgtattgccttttcaatcagtggttgatgagtcatgaccataactgtgtctgctacttgctaatttcatggcttaatgtcatttgtaccaaacgataattttgttaaacattggtgccttggtggcatgccatttggataagtagggttttttctgagagaccatttgaatctctaattgtgaattgtgacaaacaagctacaataacttcgcaaatgctacttacgttatggcagtttcaaaaccgtttcagtgcacggattttttgctgttctcacaaatattaggtggcctaccttgcacttgcataacaagaaaaaaaaatctgcctttatccaaatgaaaacttaggccttgttttagcacgtctgatgtctccaacttcttgatatttctacacagggaaagtcgtgtgcaataaaaaatacaagcacaagtcgtccttatagaaaatagggtttataaactaaactaaagtggcttaaactacaaaattctcttatttcagtccgaaataaatacacaatgtgttactaacaatcttaacctgcacccatctccaacttcaacaatgtctgtaactagaaattcccagctcaagaaaaacctggagttgaagttgtgccaaaagggatcacctatacatttgtcaacaaattttctcctaaaaatttgacagatgtaattatagtacaatcatagtgtaattacactataacttgtatataacacagtaacttgtatataagttccatgtaattttgaatcattagatctattataagatttgttctgatgaagaagaaaaaaaatcacagcacacatatgtgagaggatttgttcccacgaccttcattttacccaaaaaacatgttacggggagattcttgaaagtgtgtaattatatgcaagttatagttgtcgacgtttgatgtcgcgattccggtatttgcatagtatggggatcgttggtactaggatatacgcgagactgaggtaaaagatagagacagggatttttatacaggttcgggcccttgaatggtcaggtaataaccctacattctgttggccgaagccgatattgctcttattcaccataatcacaccggtacaatatttggggtagcttatataagtgtttgtcgacatggcggtctgaagctctgactcgtagtcgacaacagggtagtcttcctcctcgagttcgtgctcggcgagatcagagataacgctatgtctctcctaacagtatccggagacaccgtaggggactagccgtgcttatctctaaagtcgatatccagcgtcttgtcttggcgtatgttagtttgtatgttgtggcctctgttgtcccgtagattgtggtgggtgtgtcgtcgatgtccccctctcctcctaaggggccttgtatttatgtccccttatccaagtagaactagggaaaccagtatggatacaatccgagtagtctttgtcgtttccatatagaactctggttgtctttccttatccggaactcctcctatattcgcaggttgtttccgtatatgacatggtaagtggtgggtcctgctgagatttagtcaactactattaggtatgtggtatccataaccctgataacagtgtaattacactatgattgtactgtaattacatctgtcaaatttttaagagaaaatttgttgggaacctctacggctcaggtgcccgatcatttggagaaaaatcgggcgatgatgtcatgcaaacttctttaaactgatttatctcttaaattacttatccaaatcattatctgattgcaccattaaatttgttgcaattaaatcttaaaaacaagaccacacatggatatattccgacgaaattttttttagcttattattgaattatttttaaatgttgcacgatgttacacctggtatatcggaattgtttcactaagtagatcgaaaatatttcactcgtttaaattgagtgttgtttcaccttatatgaaaacaatgtttcagcaaatagcgaaagattgtttcagttcactgcaacatttaatccatacatagtaaaacattataactacactaggtgaaacatttttcggtggaacaaaaaataaaacgaattcccttaatagggggtttccaaaatatgtgggttttttttgttgcaatgaaagatttcagttcactacaacattagatctatacatagtaaaacattgtgagtacactcggtgaaacattttttgtggaacaaaaaaaaaatcaaattcccttaatagaggatttccaaaatatgtggttgatttgttgcaggtgggggcaggtattgtggtggggcccaacgacatcactgcctgcgggggcgggggtggggggagcgcccgatttttgctccccccgcccgatcgcccgaggacaagtattctcgaaatttgtcgcaaaatatatagcaaaattggtgccaaaaagcccaatgataaaatctattgtcggcccaaactatttgtactgaactgggcccggttgggccagttttctcaaccgggccgggtcctggaaccggttggaattttccatttccagcaagtccacggctttacggctgcttgcttttgcgcaagtttcaagcgatgcgccaccgcgtcggccccgccgccgccgccgcggcggcgctccggcggttctcccacctccgcccgccggccccgccggacccgaggctcgccttccttcgctcagagtttgatggccgtgagcccggccgacagccaccgtcaccggaaacaagagaggagccaaaaggtggcgagcgcgcgcgctcgccggtggccgtggatatcgcgcacccgtggccggagtgggtggcgctgatggagctcctccttcagaggggccacctcgacgcctccgtgttcgccggcggcgcggctggctcgccgtccaaggattccaacgttatccgcaccgcctgcctccggtttgggcgagagcggccggagcttatcaggtgagatgcttcagctcgtaggagtcgccaatgtgtgtgcttctttgctctggatgttgcggtgcgccggtgtcacttgagtatgcgattgtcattgatagggctatggtttagctgcacgcacgcgaggtgtttgtggaaatgccccgtcaatatagttgcattttcttggtcaggtagcctgatgcactcgaggtggtctaaatggcgtatgatattcatgtgccttgcatatagagctgaaacccttttgttgcaggcatctatcaagatgggatatccaggttgctctccggtatgggtgccccagcattgacaggaaggttgttaattctgggaagcgattacgtgctcatgtaggccttgatgaaggagaggtaactaataaatacacaattatttattttcatgtactgtatttttctctattacttttattttgaaattgtcagttaccaatgtttgtgaatagaaaattgcctagtagcagtatttctgaataaaatcttcaaaccattgggttatgaaaaaaattgcaacattataattaggatcacaaatggagagaagaaacttctgcatgcttacaatagtttgatgacaaaattagtattttaatgctgcttataaatctatatgttatatagcatttctccagcatcagcttatgctgacaggtctgcagccaatgcaatttaaggggtggatgcgagagggcatatgtaaaggctcggaaggaggaaattggaagaactgtggatgttatgcgcatccttttgacttatgggcttgacacagttactggcaatgtggagaacagagcatgtctaaacaaaaccgttaaagaatccattaagagcctacttaatgagattgttgggttcgattccatgggtcctggttccagcactgaaaagcccacacaccgtatgccaaaaggacaatcttctattcctatgaagcagggtgattggaattgtcccaagtatgttggagccttttaatcacatatacattttgtgataatgccacgctttataatgtcatatgttattgtcagatgcaacttcttgaactttgcaaagaatataaaatgtttacgctgcaatggagaatttgaagagaggtatcagctgctccatgagaaccaagagcatcttcctctcaaaaagggtgattggatatgcaaaaggtgaggtttcacaaatctctagtttataagattgactcggagttggaatagtcttctttttgcacctgtactgatcttatattttcaggtgcaactttttgaattttgcaaagaatacaagatgccttcagtgccatgagaaaccaacaaaccgtcaactcaatccaggggaatgggagtgtgtctcgtgagtggcatttttgttacatatcactgcatatttgcattctcttaatagttagtatcaatatgagaacttggcaacaaaatgatgttagtggctttgtctggtctttcagtgtcatgattatcttctgcttactataaaaaattttccaagataactatacgattgattcatgacaggtgtaattatttgaacttcaagaggaatgcattctgtttgaaatgtggttggaaaagaccaaaatcattgaacaaccaagacagtattgaatcacaacgtgacttagatgataataagcattctgctatttcatttatccaagatggcatccaatcgaggaggcaaattctgcaaaataaggctccattgtctgacgaagattcagacttctggagctccgaggaggaaggggcctaccacagtgacaaaaacattcccccaataaagaaggattacaagttccttgaaagttttcccatcattgggggtaggactgctatgtctcaagatcctcttgagagggagaaatggaaggacgaaatgtccaggagaaacaaagggctcctaacagaagtatcagaagaaagtaatcggccttcgtgccccgttcgtattccgagaagcattgagcagattgaatctggtgacgacgacgacgacgacatttcatcatggttttctggtggtactagtaatattaacatgaaaaaggcatagccagatttctgtaaacgctagtatctgcacaatttcatctgtaatatttacagtgtaggcattcagtaagaaaaaatcatgtctcgcaaagaacttcagtattgtacttctgctatgatctgtcttggcaaataatatactatgattttacaagtttttgtattcgtgtagtggctggttccatccactttagtactaaacaacgtcgagttcttatatgtacatgattaacctgtaacgagtttcgagttttaacagttcttgtactgtcgaagagcatgagaccaacctcttatcacacagctagacgcttgttttgtagtttcttgttgcatttctctcttgtgccagtactccacctgcacgattttgttgtgattgaatttcaacaaacatatccacccaattatgaccaatcaccaaacctgcaaataactggagacccgacacaaccaacacataacctgcaatttctacgctcataaaatcattgaatcgccccctccccctctcccctccccccaaaagaagatgaagaagaagaagaagaagaagaagaagaaaagatcagtgtattataaggatcgaattgtcttctttttctgtccttgcatgtttggtatgagattcgagcccaaaaaaaaggagatgatgcttaacgtttcaggaggttcttgtgcattgattttctagttatcatgatcatggtccccaaccttcttccttccctctgaaattcccattattcaattcttgcaaaaatatcgcaaaattcctttattccaaaggaggccgcaaaacgccttttgaaaagtaaatataaggaggaagaaatggagatgtttaacccatttttgacatcaaaatggacctaggaattttaacccatttttgccggaatatgcatttaggcgcttggttgcattgtcaacctgacagcgacgcacaacggcaatgtatggttggtaataatggaaaaagacatcacatattttcgtagcagtagcaattagcaccaacaactgtcaactcagatcccatgggtccgttgcatgtctcgagtggttaactccgatttggtggtagctagccagctatgtgtgtgtgagctaccaaccattgagctgcagaatcaagcttttgcactgtagattatctggattcaccttgcatattttagcttttttttttttaagaaaagcctaggactcttattacaaggtgtgtgatggtcgatctggcttcaagccttacccctgtcttaataaatttaaatacaagagcccttcctcttaccacggccatgtagatattttgttttatgggcagtgattatggcatattaaaatgaccatgggcatgatttgattttggtgcaatcccttcttcctatatagttggtacccactacaatattaactcctataaagaaagcaccaggttaagccacatcatcaggattttagagccgtctgatcaatcaattgtcagatgcaaggcaccgttagatcttcttccttgctggacacagaaataaggaccaagttggtgagccggccctgttaagtctgtccgaattcctgcaaacctctgctggacacacaccacgaacgatgccatgcactgatggggatttcaatcggctaattcagttaacagaaattgtttacagattatattcaagatgaaattgcactattgcaggttatacatatttccatttgcaacagttcatgctctatctcaatgatattcaaataattcatttttcattttttttatatctacagtatgttgtttgccgtggtagttcttttccaggactatcatgaaatccaattcacactaatatgtcattttgaatttagtacttagcataaaccaaaaggctttaatacataaatgtacgagtctcttttgacaccattgatagtgataaaaagcagttggttcatactaacttttcaggtttgaaataactcaataagcccacagcaacgcgcagggaatcaactagtatatattacgaatggtgtctaactgtccatattctactgtataagattgcttggaaacataagtattgttaaaagtcatttatgtcttttccccttttcccctttgactatattctggagtactggataactagaaattacctaggagtaactagaaggcattatccctaaattatagcttttataacaatgtgaccttggcaaattggcctaaaaaatttccatagctcaaattgaaccacttggtaagttcagaacccccccccccaaaaaaaaaaagatctagacattgctaaaaaaaaattcgaccacatagctagatatttcttagtgccatcatgatttttcggtagtaatgctcatctcacagaccgagacctcgttatgcatgtattccatagaaattcgtttacataactttatctccggaagaaatagaaaaaaaaattcccacattacaaatattttacaataccgagcaggttcaaacctacagtctgaaatctgattgtttcagttacgattgataagccttaaaaaaataaacaaaacaaccaagtaaaatttttatatctatgttatcaatgatttataaactaatacttaaaaataagctatgttaaaaaaataaaaaaactttaaaatttacttttaaagtttaaatttaatggctggtagctaactagcggactatactagctgtgttctttcctctatcttaccaacttctactacctcgttttttacacacatattatcgaattgttaaacggtacatatattttttaaaaaagtttatgagaaaaattgtattaattcatttttaatttctaactaatatttaattaatcctacactaatctatcgttttgttttgtgtattccggagggagaagttgcaaaacctgtgagggccgaactcacctgagagggtgatactatactgttgcccaattggcaagggattagctatacatttatcattaaattttaattaaaaagtttgacatatgtaaatatagtacaatcataatgtaattacagtgtaacttatatgtaactatagtataacttgcatgtaactttttgacctaagtgaaatgctaatactgtgaaaatgaaggtaatggtactgaatcccccttacatgtgcgtgggttgtaattttttcctatcacccttgcacaaattttaaagcaaatcgaacgattcaaaattacattgtagttacatggtagttatactacgattgtaccatatttacattgtcgataaatatatagctaaatcgattgggaattgtcaagtcaaccaactcatcatccaactggagaaaaataaaggggctcaaatccggtgatccgccgcgtcgtccttcagtcctcctcctgattgctgcggtttgcgccaaaatttctctctctctatcccctcgcccttcttccccatgacgtgctcccctcctcctctccttgggccccgctctccagttaccgttaccggcaaaatcttatctgctttctactaaaagctgggccttcatgctttttatctaaaaaacgtggcacataaccccaggtgtcatggttataaagttccacaaaattacactattattcattttgattttgatctaacatacttttgagttctacgatcatatttaattttataatttctttctccatcttgtaagtatagccttttaaaattttgatacaagattgttgtcgaattagttaacggtgtggttttatgaaactttaggatcataatacctaagttatatgtcacataccaaaatatgcaattttgtacaacttggatcataataatatggggttttacgaaatgtactcttaaatttacgctgtggctgatactccctctgtcccgaaatataagggattttggttggatgtgacacattctagtactatgaatttggacaaagagtatgtccaaattcacagtcgcaggatatgttatatccacgcaaaatctattatatttcgggacgaggagagtaataaactaactagcggatttataaagtgactatgggtgtgtttagttcacaccaaatttccccctaactcccacttttccatcacatcacattacatccaaaactttcctacacacgtaaactcttaactttttttttccaaactaccaaccttttcaaacttctccccaatttcagaaactaagacagcctatactgttgcctaattggcaattgtcaagtcaaccagctcatcatccaattgttggaggaaaaaaaaaaaaagctcaaatccggtggtccgccgcgtcgtcctccagtcccagtccctcctgattgctgcggtttgcgccaaaatctcctcgcccttcttccccacgacgtgctcccctcccctcctcctcgggccccgctctccagttgctgcaatcctcccaaggagaggagaggactccactccacgctggggattgggatattccttgtcccgcggggtcagtttttagcagcagcagtacagtagttggctggttgctaccactacacgagctcgggaggaaggaaggaaggaaggaaggaatcgcaaggcgaagagtcggagctggcggaggaggaggtgctcgcgatggggtccgagggatccgccggggtcgtcgtcggtgagtagccagggaacccttgccgaattttggttttgtggtggtggatttgggtggggtggggggatcttcgcggccggtcaagaacgcgagagttggttgagttcttgatgggatttttaggggctgattctcgtgtggtagggcgtaatttctctggacgtgcgcgtaggcaagattcaagaaactctgagagcaaatgtagattcgtgaggaattaggatttgttagattcgtgaggagttaggattgcttcgggattagattgttctgtaaaggggaatgctgagggggtagtctcagctctcggttcccaattcgccgaactcttagcactgtgaattcttgttcaattgtttgttcttttgtggctaagctaagaattggagcaattttatatggatggaaacgatggatttaggggtactagctggatttgttggttgctcacgtttatcttcaatcgcgaattattgcatatcaataagtttgtcttatcattagttcctgagtttgatcctaatatcagtatttttggcatttctaccatttcttggtttgggtattttttgcataacaagatgaacaatactgctacttcatagggggggggagagagagagagagagagagagagagagagagagagagagagagagagaggggatccctatatttggtcattgcaaaataaaaaatccgcaattaagtcactcaagtctgatcatgtgtttgaatttggtttactaatactttacagccacagctgtggcttgtcagctaccccacttgttcatagacatgttttttttttaacccaaattgtagattggcacatttttttttccaatatgcaactaaggccgagtttagttctaaattttttcttcaaacttccaactttttcatcacatcaaaactttcctacacacacaaacttccaactttccgtcacatcattccaatttcaaccaaacttccaattttggcgtgaactaaacacaccctaatgataatttttccttgaatacgcaagatgcgctcattgcattagtagaagaagtaaggcatccaaacacgccaaagaacagcaaaaagtacaggaacttgcaccaccacaaaacaacccactgcaagggcggtgacaaaaccaaaaagtactaaaatagaagtccctagccggggtccatgagggccccttagcccccgccaaactccataggcgggcttactcacttgctaacatcaagacctaggcgggcttactcacttgctaacatcaagaccctatactaatgatattaaaatacaaccagggtgatgcattttacttttgtgatccactgtgttgtgactagcatgccacaaaataaccaaaaataaaggaagtcattcatactcttaagaaaagagacttctaagcgaatacaaagtgaatattacttccaactaataagaattgttccagcgtattctttccactaaaagatgattcgtcctcctaagacatccaactcaatttattggcattcttttctcttcttacaaatggttccaattctgaaaaaaaaaacgtaaatcttttgctttatccgaggccttgtaattattttatcttaccatttatcgtgttcttttctaaattttgcttgaaagtactccctctagtcattaatatatgacgttttttaacactaaaatatgtattaaaaacgtcatatattaatagccggagggagtactttacagaaatggaataaggttagagtggaacataataatctcaataaatggatattgaatctaccctatccatgcactgtagttttttggatgactataaactgatacattcctttatcctaaaatgatactggaactactttaggatttaatgaggaccaaaaagactgtcctagtagcatatgcattttgttaagggagactcaacttttatgattcttattaggtctatgcaccaggttaatatattgttatatctagagcggaaaccagagtttactttcggagtcaataatttgctctttcgttaattcataatggcaggaaagacccttcatttattcacacaagatggccttcttatttcccaatagtgcagctttgcttcccaattggtacttctcgagttaaaaaagaaatattaagcatggaattctcaacaatgcaatgactggctaaggcccactgtgcttatctttttaattgttgcagaaatgtaaacttagaaccattgcattttctttacaaatcaaattaaggttagacaaaacatggtatccaactgttatgtatttcacaatcgttctatcttttctgaatgcaataatattgccgtttgcatcttaaattaaaagaaaaacatttagccaaacacccgaacatctaaaagcagttgaaccaaatgagaatatgataatccacctcaatcgaacaggagtctaagtcagctttgcatgccctaaacatgcatttttatcgtagccatcctatagatggaccatggcaaaacagaactacagaacacattcccttgttcttgaccccatacataattgatagtaactgaaatcaattcactatatacagatcctgtgagttctgaccttagaaactttctttcttgtcactccatgcataactctctatctcatcaatgaacaatgtaagacatgaaactggtgctgaacaggtttctgcataataggcccctctgttcatctcttggctacaagttatttaatttggatgctttagtcctgccaataagtcctatcatatctctatctgaacttggaagccttttttctgaaaaaataaacattgaaggcattttttctacttggtccatcccattttagtgggcaaaatggcatcaagggcggagctaccattgaaacaaggtggtgcactaccatcgaaaacctagaaaatttcgatggaactgtgcattctagcgtttataagtgagaaatcttggatttaggggggtgggggggggggtgggtgggtgcttgggttcctgtgcaccacccaagcttaatgtggctccgccactgaatgccatgtgggtttgaacagcatgaaccatgtgctacatattaataagctgacacaaacattttaaatattactaaatatgctattggaattatctttaataaggaatgctttgcaactccattttttttctttgtgcttatgcagttgctacattatgttagttagccttctagtaataataggtaaatcttgtgatttgtggcataacattttctctattgttttctgtacattagttatgacttgcctttgttcccctcaaacaacacggttcttctgttatttattacatggatagatgagcatgccaatggcctggtgctacagctcatgaggaaactttcgaaatataatttaaatacgtgaatggagtgtgctcattctggaaagctgttttgacttgtgttgatgcaaaacattgtcggatcggttactacactccaattttatgttctctaaacagattaaatattattcttttttgggatttcaagcctcatgagtagctgcatacagaacaaatctagtaattcatttattgaattctttactgtgctgagtacatctctgcagttcccagaaactttagactgcttgaagagcttgagcgaggtgagaagggcattggtgatgggacagtgagctatggaatggatgatgctgatgacatatatatgcgttcctggacaggaactatcattggccctcctaatgtatgttgtataacacccattagtagatattaactgcatttgcttctgtatgctcaaactgaatgatcttttacattcaatttgtcttgcagactgttcatgagggacgaatctatcagttgaagttgttctgtgatacagactatccagacagaccacctactgttcgattccagactcgaatcaatatgtcatgtgtgaatcaagaaactggaatggtacatgtccacttgctttcctttaagctaaagtagttggtgaatcattttattggcgtagtacttacaaggagctactttctaggttgaaccaagtctattccccatgcttggtaactggcaaagagaacatacaatgcaagacatcctgatcggcttaaaaaaggagatgtctgctcctcagaatcgtaggctccatcaaccccatgatggtaatttccatatctctgcttcagtgaatttgatctacagcctcgtcgttttcccttaagcttataaaccgcaaccaaaatttgagttttaaaacttaatttcggagttaattttagtgcttttttttatcgtagtttatttctagcatttgtttttaaatcgctgaggacacgtatataaaagtttcgctcacaaattattttttgggcactgataagcagttacagtttataatcagcataagcgaaacaatgaggttgctacttgctagactgaagttgcatgttgggttctgaacctagttgctgtttctttctgcaggcaatgaagatcaaagagtagaacagaaagggctatcgcttaggtgtgtcatcatgtaagagatgcgaattgcaatgtacagtattattaaattgagtagcatcaggcgcaaaaaagagaacccatgatctcctgtaatttggcagtaactacattggatccaaaccgtgctgtcgcctcaataaaatgtcggcaacttcgttaatttgcacattgtgtaaaccgttcatcccctcgttcagtaagattgcaacttgcaagttgcaacccatgtctccattgtttcaggaaagcatccgtaccatctttctgcttgtctgttccagtctgaattattagtttgtctggagacctgtaattttcttcagacacctggtatgcatgctagttggagagcagtatcttcagaatgctaacctggttgttgatgtcaagatacccctctctttttattttttatcactgcacccaaaatataggtgctccaaaactgggaatttggtttttttctatgaaattcagtgaattacactcaaaacttttttgccgacaaacttatcccggtaacctagacacctagtatacgtgcaagctggaggtccataaacttccgaatgctgtggccggacggctgctgtttgaggcgattttaaacttcttgcacaacaccaaatccagacgaaattcagctaaactcattagagaaacctcctcatgaagtcacccaaatgctgaacctcacctcttgcaaacaagcaggagaccgtgccctcctcctgttgagagatccttgacgtttcaggatgagaaaagcatccgtccaagaaaggggaaaaaaaaaagagagacgaacaccaaaaggcaaaggcaaagcatttacagggaacatgctcctgcgtgcccacaagcctacagcgcaagccaaggaaagcgaggctgtgcctaccctgccatggccatggccatgccttctctgcttgcaactcgcacttcgcaaagctgatgacaacgcctcctgtcctatccaatgtgattggaatcatcgtcgactcgatctttttcctcatcgaccaccggccaaaccccaggctgccgacacggcagcatcaaaatgatatggcttgtcctactcttcttcttcttctttttcttttttttttcctactatttgtttggagattgacagattgtggaagtaaaacttctggcctctctgcatcgtgtgatgcaaataaccaatttcagaagaccaaaaatgctgagccgagatcggtgtgattctgcatacgagttacttgaaatgcagggaattattatgaactttatgtttttttttagataatggaaataggttacatctctggtctctgcccgtaagcacacagccaaaaagtccagaagattatgaactttatgtaactctcagtagtgtggagttctacacttcaactcattgctctttgaaaccaatgaaacttgcagtgcaaactgtggcctgtgggtgcagactactacagaattacaccctcatcaatatcgcagccatgaaagaagattctaccattgactcgtaaagcagactgaaaatttgtttttccaaagtaaagagaagatggaaacgaaattcaatgttcagagtttcagttctcaaaaaatgttcagagtttcagacttatgtaccacaagaaaagaataaataaacagctgactattcagactaacatgctgtacaagagacaaacacccagcgtcagagatactccgtaatgttcgtttcactcttgcagaattctgatcccgaattctgaagtaacacaagctggctgatgtggcatcagagatatccagagcagtgcaataaacatctcccaggccagtttaattgaccgtacagaaactacagtgcttagcagatcatgtccaagaaaagggaccatttgctgaaaagtaaacactgacaggtcctggatgtaagtactgaaaatgagtactagctacaacaaattcagagtgacattaccaaaaacataattgatcagtctccattatcatatactccctccgtttcgaaatgtttgacgccgttgactttttagcacatgtttgatcgttcgtcttattcaaaaaatttaagtaattattaattctttttctatcatttgattcattgtggggatcctctagagtcgacctgcaggc

SEQ ID NO: 4858 - DNA, 79142 bp, Oryza sativa
cggacggaaaacgatcgagaattgactgaagtgttaaaaagagaacggggtgaactttgggtgctattaaagttaaccggcatctttcggtactataaaactaaaaacgtgaactttcgatgctatataaccaattttgcctaattttaactacaaaatttgaccactcttattattttaaaaatatgtaaatattatttatttatttattgtaatttgttctattacacaagatactttaagcttgatttatactttttttaatttacactaaatttgtaaataagataagtggtcaaacttgataatcaaagttaactctgtcagatatttattaccagagggagtacttccgtttggagaaagagcgccgaagattttgtttcgagcgaaaaatatcgaaagattagcaaatacaatacaagaaccatacttactagccaacctagtctggccaacctggccaaggacagaagctttgaagtttgaactccctagctgaggaggatgtggttggcagtttcaggcttcatcttgtccatcttacgtacactaatgcactctgtttctccattttgcacattggtcaaacttctagttctagcagaaatcaattggtgatattcaaactctgcttccggaagaggtagggaggcaatgttgtgcttaatatctattatcaccaaccattagattcccgcatacataacgcatttcaccaacccatttgggttctcacgtatagccatctcgcattagtcattcttcagtacttagtagtattaggtatggtggaggaaacaaaaggtgtatcaagtgggatgacgtaaggttcgattacatttcatacatctttgatctttgaaactaattaatttaataatgagggtaatgcgtcaaactaataacataatgctttaatggcctattttggcctgtgtctctctctgtattgctttatgtaaaatagaacgagaaacatgtgacaacattcgaattgtgaaagttatttttttaattagacactttggtttgatcgctgacgatggtcaatggatataataattatcttttcgaggcaatatgcttccgtacgtcagggtgcccgattcatggagatcacaggagtagcttttggttcatcatttatgggattattgcccacatttggtgagataaattcatttctcataaagtctggtaaacatcaaaagtccagtaaacatcctcatgggcactcctatgctgtcacatgtcatgcctcgaattagaaagaaattctttaaaaaaaaggtcataagtttcatattataagacactttaattttttaattaaagttaaacttgtttaagtttaattaagtttatgaaaaaaatgtagcaatgtctataacactaaactatttttattgaataatctagcattgaaaatattttgatggtaatattttgtgttgaaaatagttttcttttaaatttgatgaaacttattaaagaagtctaatataaaaaaacaattcaaaacgttttacaatatgaaacaaagagagtggaccaataggctaattattttaaatcattagatttatctagactagaaaagatccaaaattcgatctctcacctcacccacccttccaaagcacgcacccctcccctctgttcccccatatcattccttttctttagctatacagtagaagtagttagtaagatgcagtaagccaataatcatcacataacaaaaacaaaagttaaaacaatcacaatttttaaattgttattgaattttctgtccttctatatcattgtattcatatcacggttaaaattaacagttcaaaaccagtattaattatattttgacttgtaaagacatatgttatattcggtcagatcttaacccttttaacatatgacatccaaaaagctatagtaaattacaaagaaaattgaaattagacgttaattatcatcatatatcactttgtaaaacatgcatagttaaattagatttacaatatctcgaaataaaatcacaaattgtgagcaacattcaaaagatatatattctctatgttatttttgaggcagagcgacctcccgagcaggttaggtggccacccgagctccactgctggcaggggcggatccaggaacaaaaaaaaaattgaggggctcaattacacagtttttttaaactccagtcatatagggacctttagtttattattcatggtgaaaaaattgaaaggggtgctccaggggtatccatgggtctggtgtgtagaggggactcgaatcccccctgcacccacgttggatccgcccctgactgctggcgtctcctttatcaatagccgtcgacacctataaaaagttaaaaactagtcaatcaccgaaaaacactattagtcatccggatttaacgatatcgctggctctgccactagatgaccctttgcatcattgcatgccatcccaccaatcataaaaaattatcaccatatcagttctcaaactaaacaagcccttaattaattagttgctaacgggatcacatccataacacaaatgcaagctgcaaatttttactatatctttggtatgtaatagtagactgcatatacagtgaatctctgcgctgtcgttagtgtgttcaaaaaattgaaaaaaaaatacagcattgcttatctttcctttataaaaatgaaaaggagaaaaaaaaggaagatggtgcacacaggatgagttcataaaacactccagtttgcaatcaaataagtatgtatatctatgggctaattagggtccctgtttttgaccaaccgctaattaagaatcattgtaactgcaagaagtgtcagcaaatgaaaaggacgcatcactaatcccaccaacgcggcgttgactgaaggagcctataaaacctgctgctttatagtagttgattcactagttctcttttcactcccacccttgtctgcttggcggatgtcgctcgtctctgataacatggcgtctgggtctattaggccgtggtttttctgtccactggttaaatgaaggaataagtccagtttgagtccctcaaatatatgttagatcttattcttatccctcaattgtaaaaacaggtataacgactccctcaatgttaaaatcatgcaaaataactccctcaatggtttttagagcggtttttgttgacatagagtccatgactgacatcaccaccgcaacagcatggacaattaggtagctcatgagcttaatttacttgcactcgccgtcgccaggggctgccacatctcgcaccacggtggatgagtcgtgcggattgttgtgatcgtgttgttgcttctctttctgagcttggtttcagctttcaatgggcaggcaaccttctcttcacaattctccatctaactctcctgtggcgccggttggaatgttgtcgtgaaatccgattcaccatagcgcacattcatcccaaacgatggcaatctattaggaaagttctcccacaacgttaccaggttcagtaaccccgacgcgagccatttgtacactctttagccacaatgcgtgtaggcacgagcaacttctcatactggcttggctacctgccaccgtggtgcccgacgacaacacaactctagtcctccgccttcacttcttaccttacgcatcacaatcgggcgacctttccacggcactgttcaacgtctccatcatggggaggtacgtcctgcattcttccttcttgtcgtcgcgcactggcgcggtgagggagttcatcctcgcgtccgatggctctggtgtgggtgggcaggaacgaaaatcgttgggcacctagtttggtgcgtcccaccgcttgttcttcacgcttggcatgattgtctgccgccaccgatcgcttactgtggacaccccttgtcaccgacctcccaccgtcgatgtcgcctctcatggatgagctcgtcggtcatcgttcctctccccgccaacgaactcctagggaagagaggggagaggtagaggggtggggaggagaggggatacgcgagtagaggttgaagtccaattacatgtgagccccacatgttgtatatttctttttaaacgactaggataccacgtcaaccaaaagaaccatccatactgttatgggacctaactcgagtggctttgtcaagatgattggtggaaatttctagtattgcggtttagttatatcaattaaaatcgacgtaaagatgagggatggcaagtggacttactcccaattttctaatccaaattgtgggttgcaggcttgcgacccacctaaatttccattcgctaccggcctaatggaccagaaacattcgtagcccattcaaaacaaagagcggataatatggtgccgtgggccaatttagtcagattttaggatagatcgcaccctcccaagaaagcccagcgctagtatagaccaaaggttgcaatccaaactatagtgggtttttccgctcaaaaaacgaggtccacctttgtcgttgttgctgcatgctttgacagtatggttagcacggtacttccttcgaaccaaaataaaatatactccctccatccaaaaaaaatcaaattcaacttctaaagtttaaattttatcaaaaaaaaaaacttctatcattctacccacccttagcacgtaaaacgagaatttttttcccttcaataccctttatctacatcactcttactatttttttcaattattaagggtattttagtcattctctatatccactaattccacctcgggatactaggaatgtattttttgtgggacggagggagtacttccttagtcctaaaatataagcgattttggacgaacagacagggaggaaatgtctcatccttctaaaatctcttatattttaggacggagggagtttgacgcaactgccactaagctaaagattaaaaaaatattattatatcaccatgatatacaccacatacactaatggaattagatatgttaagggtggagtattttagaaaaataaacttataggaaaaaaagtattagttaattgcatgtatatatatacgtgtcttgtattataaaacatcggaaaaatggttgcttcttatatttttttatatgggagtactattttctccattttaaaatatactgtactaacctaggatctaaatagaacggaggtagtaattactttgatgcggttcattatgaaatttgtcgcatactcactgactcacacgtgctatttattgatgtgtattccctctgtccaaatatataaaggatattgttctaatattttatctaaatatataaggaattttgggatccctagacaatattttatcttccatccatcaactcatgtgctagtttaaataccactccaacctttacttttacttgtttatttcctcaatgatcaccatcttttgtcaatgatttgacccccttccactttcttaattctttctaaaatagcataatcccttatatatacgtacagagggagtattcattttatccattacggtttctgattctttgctcgccgtaaacggctaaacataaccgggcatataaacaatactgtactaacttcgtcctttaaaaaaaatctagacataatttggccaatcctaatcatcagccaataacacccctatctcgtgttttgtttaatatcaacttattgccctaccaaaattttagtaactttaataatagcaagtgcatatttggtttgttaccaaattttgtccacaatagtttaaattcaacactacccaatttggtagtgctaaaacttaccaatattttggcgctaccaagattttggtagggcaaaaattgacttcaaaccaaacaagcccttacatatcgaagtttattgttccctgctccctgtgcgcacgcatgccatcggcggtcctcggtgtgccggtcacccagacgggtaggccttgtgcaattgtgcaggtaggttacatgccggttggtgcagttgattgtataaaagattgtacacatttgtagtactaaatatcatatattatatttaattttttataaggacagagtaaatactttttttatataaaaaaacttaatagaaaatataaccccttctatatagcaaatctcgataaaaaagattgtctattttaccaggtggggtcatcttttagttcgatttttttttaaaagaagggagtagagttaatccgtcgtagtacagcgcaaattccaagttatcacgtctcattgacctccacgcttgccgaccacactgctccagtgctcagtcaaagcactgcctcactctcacccctctggctattctcaacaggccaatcagaccaaaaaaaaaaaaaaacactgacgtcgatctgatccaaacaacgcgcggaattaattgagcacacacggagaaggagatcggccggctgtttcccggcgcatatccatccacccgaccgcgaccagcggcgtcgtcatcacgtacgcggcgggcgagtggatgtggatttggctgcgctgcggtggtctcgccgaccaatccgtcgagcagcagccgccgttccaaaaaaccggataataagcaagctagcaaagcaagcgctggcggcttggaagggatacttcaccgatggtgtccctatcgcattcttcccacttgtcgcggtttatggtggctcgcgcgcggttttgccgcgctgctcaggtgtcgggtgcagtggattggatccgactctttcaccgggttaattgcagatttgagtcaaaaatgttcacctccactagacaggaaaccacacacccgggtttctgcgtactttttctactgtatatttagagtctcatagtaaataggtaatggtatctcatggcatcttcttaagaatcgtaaaattgcttttatttagctagatttcaactatggttgtgtttagttcacactgaagtttggaaatttggttgaaattagtacgatgtgatagaaaatttgtgtgtatgaaaaggtttgatgtgataaaaagttagaagtttgaaaaaaaaaatttagaactaaacatggcctatgcacaacgggatttttcctgtgtttcaggagtagggagtactgtacttgtgggcatgaattcagtgcgaatttggccctggaaaaaaaatgaatgggaaagaaaggagcagcagtaaatgcggcgagaagacgacacaggatgtgttcggatacgacaaaggggattcattacttcctcgtcgtattgtcagattcgctgtgcttgagccattccagaagcttccaaacactgcgatctcgaagcagagcgtctccgctcgaggtaagcagcttgccttttgcaacgaaacggtttctagaagccacgaacattccaactgtactgaaacaaacaaacacaagctgcgaaaaggcgtgtgtttgttacaaacacacactgtcatttgatcaaaaatttcaaaattgatacactcgtttaaccattttttttcctcgcaaaagttgctgtacaaactcgaactctgctactcacacatatgtgatatgtacatagatggatacacaattatacacggaatttagtttctgtaatacgcttcagatttctagaaggcaggcggcctggacgtgcccggagaactcgggcggcgccggcgcgcgcgcccacgacgcgggcttgccggcctcctcccgcagcgtgtacaccgtctggtcgccgccgtggcagtcggacccgatgaccacgacgcggccgtcggggatgacggaaacggccgccgcggtgcgcgcgtcctccggcaccggcgccacgggccgccacgccgcgggggcggaggagatggcgccgtggcgcgccacgaggtgcccgtcgcggagcatgtacatgcggtctccggcctcgggggcggcgctgcaggttctcgggcacgcgccgtcgtcgacgaagccttcttggacggcggaccaggtggacgtcgccgggtcgaaccactcggcggagccgacgaatcgcccctgcgccggcgtcgggtacccgccgacgaccaggaacttgccgtcgacgcagagcccgcgcggctcgtcgcgctcctccgccatgtcggggagcgcggcccacgcgtcggcgtccgggtcgtacgccagcgccgatcgaagggcgttcttctcctcgtcgtggccaccggcgacgaacaccttcccgccgacggcggcgcacgcgaagaacgaccggcgcgggcccggcatggccgcgccacggcgccacgcgcccgtgaggaagtcatacacgagcaccgagtccgtcggcgcccacgtctccgggtcccagccgccgacgaccaccagccgcttcctcccctccacaccgccatccaccgccgccacctggcagaacagcggcaagctcccactcgctccacccacctccggcagcggcgtccacctcccctccgccgggtccaacagcaccatccggtacgagttccccggcacaccgccggccgacgactgcttgtccgccgccgggcccgcctcggcgagctcacgccgcgcctgcaccagcgcgagcgccgggcgcgccaggccctccgccttcctcaggcggttgtacgccggcgactccacctccgccttccactggcgcgagatgcggcgcaccgccggcagctggtcgaaccccacccggatgaggcactccctcgccacctcctccggcaaccccggaatcagctcgttgtaacccatgatgctcaatcgagctggaattcgagcaagaaatgcgtgagatgatgatgatttcttggcttctcttctcttctcttgtctgagcttggtgtgtttgatgtgttttgtgtaaggcagagtggcgggagtggcatccgctacttatacaaggggaaagaagggaacggactgcggatggagggatggatggattgcgtgatttttttggggggtttatgtgggccccgttgcttgcacggctatggtttatgtttctttcagtttggctttttctagttttttttttgactctgtgacgtgtaaaattgagtagattagctcttttgagactaatctaccagtagatgatatggtttgttttattttgggagactctgtttcgggtaagaatgccacatcggatgcagtatcctttttatgttggccgaggtaaagggatgaggctgtttgtgggaattgcctgtttgtgtggaggtttatctcaaccgtcgtcatgcttagttcaacttcgtttggctaacgaactgcttagtactccactatacgacatggaaactgttgcttcgttctgcaatctgcaccaggaaaacagcaaaaatccttcgtcgggtgttgccaacttcacaggaagtaaaacaagaacgacatgacacgaccattacaattttactagtagtactgtacacgcaaatgcaacaaaagaccgagctgttatagttctacggacacctgtgccaacaaattgggcccacatgacctccaaaaatccgtgcgcttggatttggggattccggattccccttgtcaccctcctcacactttccgccggtcttctacaaacacacgtactagtagcaataagagtagtaaacacgctctgtgcaatcatgtttccatatttcaatttcactactgctactactagtagcacggtttttatttcggttagcactgtctcctctccacgcagtcgcacacgtgtagggctcagcgcaggtatcgcgcgcgtgccgcccgtggagtcgcgccactgaacaggttgatgtgccgcgtcccgtgaagctgtatacgctttgcggcgagccgggtgccgtctctgaacgctacggttttctctcctcctggccacacgtcggagactcggaggctcattattgccgaagagtgtgcacgcgtcacggcgtcaggagcagaagccgccgcggccaagctaaggtcagaccgggttcggcctgcctccatgaacgaacggatcgatcccgcgatcgagcagccgcgcggccgccggccggcgccacacgtcaagtccagcgagccggacggcgcgtgaacgtgcttgctgccgaactagcggcgtcgtgtcaagttcattgctaaacgccgggaccgggaaggattactatagtagtactaggcatcatgaccacaccgagaattgtttgctgtgcctgtgctgtgcacgcagttccgctacaccacgcgcaacgtcgcgccgcccccgggatttttagcgacagcgacgtacgcgagattagactattagagagcgaaagaaaataaacgggaggagaaaaacaacgggtgggtttctccggtgatccggacagccgcctgcctgcatgcctgcctagttgccctcgcagggcccggtagtaacgcaagtggaacggaatcaccgcgcgcgcgttcgcgggtggtgtcgggaagtggtaagccctatccgctaatcccacctcgctcgcgctgccttatctcgtctcgtctcgccacgccagggcccaggggccccccgcgtctcgcgcagccggcctcaccctcgcgattgattctggctggctctcgcgcgcgcgagcggtggggaagggtaaaaaagaaaaatctggaggcgcgcgacgaggcgtcgccgtcgtgggcgggggaggctgtgacgattgacgaacggtggcggagcggtcgctagctagcttgccacgcaatcgcgcgtggtgatgcggcgcgcgcgtcggatcgatcgaatcgaacggcggcggcacagcgcttatgtatccggaattccggatccaccatacggcctgacggtttcgatacggctctcccgctgttttttctcttcgtttttttttatgacgggagtgtgctgggagcctgcgatttctgtctcttgccacgccattaagccacagcaatcttttctaataactcgcgtctttttccgaagtctagcttaagtaagaagcgtattcttagccaacatatggaattatggataacgcttggaagaacagaagccttgctgccgtcaaaccgaaatgggagacgagcttgggttgccaagttgtttctagaatcattgaaccagctagttcgaaataaagaacgagttcactgagtgatattatctggagtccgttggtctcaagtaagacaagctgactgcagagtatgttaaacagagcaagcaatacgaactggcaaacagagtatggctaacccggtggtgttgattagtgcattaaccaatatcaaacattatgggacgtgggtatgctaaaaaatttaaaagacccaaaacagcgatggaatcaaaaaacgaagatgtcgtaaaagacgggctcgcttggtcgattcaatggtcgtcatctccatgaccatccaaccgtgtgattggtttaaggggaactggtgaagagggaatgaaagtttgaggttatgtaggaaccagaggcggctgaacctcagaatgtagtggacggccccgctcgttcgcgggtggtattgagaagtggtaatcctatccgctaatccccccgacctcgcgctgccttatctcgtctcgcctcacgctctcaccaccacgcgcccgtgttggcgcgcgggggaagagaggcgagaaaaagaaaaatctggaggcgcgacgaggcgtcgccgtcgggcggtcgggtggcggagcgcgtggtgatgcggcgcgtcggggtcgatccgctcggcagtgcgcctgccggtttcgttacgactcccgctgtttttctccccttcgttttcccgtttttcgatccgttcctagcagcgtgccgcccctttccgttgaaagccaccgcaaacctgcgtcgttttcggaggattagcttatgttggaagcgtattctttagccaacatatggataggcttggaagaacagaagctagctgctgtcaaagctaaaacaagagagcgtcctaaggtttgccacgttgttcataaaatcgctacagctcaaaataaagaatgagttcggtgagtgacaactgcgaatccgttggtctcaagccaaacaagcggactgcagaagtgcagagtatgtcaaagtcaaacagagcctgtttagttttaaacttttcctttaagctttcaattttttcaccacatcaaaactttcctacacatacaaactttcaacttttccgtcacatcgtttcaattttacctaaacctccaattttagcgtgaactaaacacacggggagtaagaaaaaaaaccgtgaagcagagtatgttaatggcttctacatcggacggcaccaaattcagatttcccaaaaaccgtatagtttcaaaaactaataagaatatcgtacccggtaaacatgattgccataagcgaggtagaacttcatcgtttggcctaataaatcaaaacaaaagccaaaatttaaatttttaaaattaaatttaatacattttcaacttaattcttttaaacattggtttttaagtcgttacgaacaaatatataaaagtttaacctagaaattaacttttattttctaataaactattttgccttattagaaaatatgggtaagtaatgaggctcgtattcgcgtgatattgcaaactctgaccctatgccaatccaaagtaaagaggtgcatcaaactcagaggatttcctttcctcactcttgttttatgaagctctttctactaccacctggaacatttggaaggagaaaaataaacttaaatttaagatattttcaacttaatttttttaagtattggcttttaagtcgctacgaaggtgtaaattgatggaatcgagaaaagaaggtgtctcgattaatggtcgttgtctccttcatccaagcgctctacacacggggcgacgctaatgggcgatcgatccccatcccctatacgctcctctcccccttcctcctccccttcttctcttcctactacaccataatttttttaaaaaaataaaaaatataaagttggaaaaaattatgtatagaaatactataaataaaaaatatttgaatttaaattcaaatttgaaacgggtatgtaaacttttgacttataaactttgggtctataaactaatatttgaattcagattcaaattcaaatttgaatcgggtatgtaaactttgggtctataaattttaggtgtatagaaaaactatatataaaaaaatgtgaattcaaattcaaattaatatttgaattcaaattcaaatttgaatcgggtatataaacttttgacttataaaatttgggtctataaacttgaggtgtataaactttagatgtatagaaatactatatataaaaagtatttgaattcaaattcaaatttgaattgggtatataaacttttgacttataaactttgaatctctaatcattaggtgtataaactttagatgtgtaaacttaaggtgtacaaactttaggtgtataaatttactaaaataggaaagtaatgcggtgtcaaaaaagaaagccagccatatggggaggggtgatcgcccaggtaagggtgggcagaaaaagaccaaaccgaaaaaacggagaccgagaaattcggtcagtacttcggtcttatgtgctagatgaccgaattttattcggttaattcggtcatcaccctcgattaaccgaattgaccgaatttcacagaaagcccaatatcagcccaagaaagcaagtccaacattaataaaaccctagctccctctctgtttccttctcctcatccacccagccgccacacccgagcgctcctcttctttttaacgctctccccacctgagcgctcctcgttttctctcgcacatcggcgtcctgttccgtcgccggtgcctctgcacgactgcagcgtcccagcatctcctcctcctcctcctcctcctcacaagtgacaccacgacgacctcctcttcttgcgtggcttcagtggacacccaggccccaacagccaagcccgagccgcgtggaggctccaccccgggggcacatccgatggtgcctcctccactccgacggcgacgagcggtgccaaagccgatctagatgagtatatgatagtgaagaaagctgatctaggatttttatgaattttcttgatgtgtatgatttttttggatctgaaatttattgaggatttgtgcgattcttctgaatatttctaaaatttcggtctaaccgagactgagaccgaattgatcggtcttcaatatttttcaagaccgaacggtcttgcactatagatgaccaaactttcaaaaaagaccaaagacctaaaccgaatttttggtctgaccgaatgcccacccctacgcccagggcgatcgatagcccaacaggaattttgctacacacgaccattcgatcacggcccgcagccgaagtggtagaaccagcgtcccgcggcgccgctggtgggttgagccgttgagcgccattcggccgcatgatgggcaaatggtccggttaagctttggagtccatcgtaaacagccaagattggatcgctaccaatgggcttacgcgtcgtaggaggctcatgggctgaacaaacccgcgccgagaaaatgagtcggatataaagcccaaacattccgtgagatggtaagtttcggcatgtttaggcatcccaggtactacaagtttgctgtgaaaatcatacatttaactcaacctcagcagctaatggctcaagaactgatgccaccttacccatgtccacgccttccagtgttgctggcttccactttggtttctacagatctatctatatctctattgctggctttgtctgccagaatcagaaaatttaatctttttcaactagcccaatttctagtagaaaaagaaatttggctatacattcaagagcattctactgattcttttttcaaattccagacacacatagccactccgtcacaatttcggcgtcgcaatgcttttcacaataacttgtgtcattttctgaagtttagcttaggtaggagccattatcttagccaacttatggataatgcttggagtaacagaagcttagctgcagtacttttgcacaaacgcctcatctactgtgaaacaactttgttggtctcgaaccgggaaggaggctccattgctgctctcaaggcaggcaaaatttgtactgtgcaaaccagctttgtctatcttcctcagaagcagctgaagcctgaagatgaacaaaaaattcttggttacgcagcacaaagggaaggagctggcatcgaacaggcgcttgcttgttggcttgctgtggcatcgggtgcccagacatggaccatctcgaacgaagcgaacagatgccgatgccggcatcccgtgcagtgccaggggggcttgtctttcatcagagtaaaggtgcagagcagaatggaatcaaaacgaaagcttaagcttgtgctttgccactactattctctgcgcattgtcgtctctttcgttcctgcacattcttggagattggtggcagccggggatcgtggacgatcgaagcagtgacattctgcgctctccggccgctcaatcgccggcgccgggggggagatcgagcgatggagtcggtggccgtgaacgcggcgcggcgggtggtcagcaaggcgctgagcccgctgtccggagggttcgtggaggcgtgggtggccagcaaggagctcggccccaacgtcggcgccgtcaagatggagctgctgtacgcgcaggggatgctcgacaacgcccgtggcaccggcggcagggaggcccgcagccccgcgctgaggcagctgctcctggagctgcgtggcctcgcccacgacgcgtcgacgccgaggacgtgctcgacgagctcgactacttccgcatccaggacgagctcgacggcacctgcgaggccgccgacgagcacgccaagggctgcgtcgtccacaacctcttcctcaacactcgccatacagccctcagcgtcgcgagcaacctagtgctcctcccgtgcgctggtgatgatcaccctgacgctgacggtcggcggtcgggagaagacaagaaccgtcagatcggctcctcgtgtgctggtggtggtcaagtgatgaaccgtcagatcggctcgtcgccgtcgcgcactctccacgccgccgccgacgaggaggctgttgccagcaactgctgcatgcacaagctctctcccagtgctcgcggcaacacccatcacatcggtaaacactttccatgcctctcttttgcaccttaacatgacggtacggtggtgataactctagagtacaattcaattctaatttatacttccagtatgacgacctaacggtgtagattgattccttttccctatttaatgagtaaaactttttaaaacatttttttttgaaaaaaaaggcaaatatgtctctctgggtaaacaaccagattatagtgaagaaataagtagtgtggctctatcctttcccgctgatcggagttgcgtttagccgccatagtaaacctagctgcagtttttgttttgtttttttctctcttccccccttggcataagcctatatagctgattgcattgtgtaataagaactcttttccttctaatatattgacgtgcaatctttttgcgcgttcgtgaaaaaaaaatagtgaagaaataaagaacacaccctgctaaacagcccttgctcttgaccatatatacatcagctcgtcgccgtgtctagcaatgagccgtgaggctcggccaaaaggacgagcgcacggcgagcctgccagaccgccgcgaacgccaacctcttggccgggctcagccacctcgctgctcgtcaaatcgctctagcaacgttcttccctagtgcacgatgagatccagtactaaatactcctcccaattggattaaatataaactataaattgctgtaaaatccatctctaattttctaccaaattcctaacatgcccttctatatactgctaggatattgtactgtacaagttttctaactctagcgtcatgtgcacatgcaggaagccagttcctccgctgcacctgttcctgcggcagggtattgcagagggaggatacgatgaaaacaccaaagctgaagttcgatagggtggatctgtcccaaagaatgaagcgcattgtcgaacagctgaagccattgtgtgccaaagtctctaccatactcaatctagagttgttggaatcaaatcgcagcattggccagtacattgccatgagtctcaatgccgagttttccaagaaaccagggcatgcacctgttcttccaagcggttttgctatcagtcggcctatgaccacttcagagtttacagatcctacagtttatgggagaatggatgaaaaaaaatacaactattaaaaacattactcatggtgattactgtgacaaggacctgaccatcattccaattgttggtccaggggggatagggaagacaactctcgcacagtatatatacaaagaagtacataactactttgatgttaccgtctgggtttgtgtaactcccaatttcaatgtgtatagattgaaagaagacattgccaagtcgatccctcaactcaaagatgagaaaaacagtggtccgcatgatttgattgtgcaaagcttgggatcaaagtttttacttgtcttggatgatatgtggaattgtggccacgaggatgaatggaaatatctattagcatctctcaaaaaaggacaaaccaagggaaacataattctagtcaccactcattttctagcagtggtagaaatggttaaaacaattgatagtccaatacaactaaaagggcttgatcctcaagagttttgggaattattcaaagcatctgtgtttggtgatgagaaatcagcaaatgatcatgctaatttacttgagactggaaaaatgatatcaaaaaaatctgaagggttcccctttggcagcgaaaacagttgggaggttactgaaaaatcaccttgatttggaacattggacaagtgtcctggaaagtaaagaatgggaattacaaaccggtgagaatgatattatgccagcattaaagcttagctacgattatctcccttttcatctgcaacaatgttttacatattgtgctatgttccctgaagaccataaatttgctagtgatgagataattcacttatggataggactagacatcctacattcacaggatcaaaacaagaaaattgaagacattggattgagccgattgaatgatttggttagctatggattttttgaaaaacatgtagaagatgggtcttcatactacgttatgcatgacctactacatgagttagcattgaaggtttcatcgtatgaatgtcttaccatatgtagttcaaatgtcaaatctatacaaattctaccatctataagacacttatctattgtggttgatgacatggacgtaaatgatagagtgacttttgaaaacatcaagaaggatttcatcacattaagtaagagactagatgttggaaaactgcactcattgatgctatttggacaataccatggaagctttatcacccctttcagtgatttgttaagaaaagcacgtgcactccgcatagtcttgttgtctatgccatcttatgctatagtcagtatgttgcataacttttcaaaacttgtccatctacgctacttaaggatcaatggaggaaaattttcagaattaagtctacccaacatcatatcaagattttaacacttgaggaaaattttcagaattaagtctacccaacatcatatcaagattttaccacttgagaatccttgatgtacgacaatgcaagggtcattttggtttaccaagagatatgaataaccttgtaaaactgcggcattttgttgtccaagatgataaactctactctgacattgctaatgtgggtaagataaagtgtttacaagaattaaggagatttgaggtcaaaagacaagttaaggcatttgcactaagccaaatagggcagctggatgagctaaaaggatcgttgggaatttatgatcttgaaaatgcaaaggcggcagaggaggcaaaacttttaaacaaaagtcacttacacaagttaatattagattggaatgttaaccattctacaaaggattattcacaagaagaacatattcttgaaaatcttagaccacatagcaatcttcgggagctacatattcaagggcatgggggtaccacttgcccttcatggttgggtcctaacttatctatcaaaggtttgcaatcactttgtataaacggtgtatgttgggacaagtttccacctctaggggggttgtggttagttaacaagcatggtgaaaaattcctggcttgtgcaagtggccgcagcttccagtatttaaaaaggttagagctagttgctataccaagactagcaaaatgggccggaaatgatgcttgttgtgtgctctccctgttggaggagtttattgtaagagagtgcccagaactcatagagttgccattttcacattccacttgtccttggtcaagacaggagatgaacttgtctcaattctccagactacagaaccttgagattgcaaaatgcccaaagctattaccattgtctccccttccttggacaagctctccatgccatgttctgattaaagaagttggatcgcattttcatctcttggattatcagagaaacaaccaatctgaacaagggttacaaattgagggaaaggatggccctctggatagtacattctggaagttattggctttaagtaatcttacagaactaagagagttgaagatgaagaaatgccctcctttgcctctcaaacatcttaagttgctatcagctttgaggaggctctccattactgattcaggtattgccttgttgccgactgattgtgaaagcacagtcacatatcattttctagttgagcaactcgagatctatgagtgcagtgctagtgggatagaaatgacacaactgctatcttatttccccaagctcatgaacttgagaatagaaaaatgtcaaaagataacagggcttggtgtggcagggcaagagatgatggcaacgctagcatctccaccatcactttcttataataagtctgaggatgcacagattgggaatgatcagcaacaaccaagaggagacaatggaatagcatcggtggttacaggactactgctcttgcctcaccaactacagaacttggacatcagacactgctcaaagctgatcctgcagctcgattcatttgtaggcgacacaacacgcaacctaataagaggtgtaggaggaggattacaatacctgcgctccctccaatcattgtgtataaagcattgtcccaattttctctcctcctactcaccctccttgtcttgtttcccatttccatcctcccttcaagatctggctattattgattgtgtgagaggcatggaaactctggtacaaaacctcagctctctcactagattgtccatatgggactttggggatttaagaagcgggagcatgtgttccctcctcacccaaggccaccttagagtgctggctgtccataaaactcccgaattctttgttgggtccaagccatcggggctgcaacagctctacatggatgacatcgtaggggtatttgttgagcctacttgcaggcttctctcttcatcactcaccaagttaagcttaagcatgaaccacaaggtagagcgcttcaccaaggagcaaaacatggcccttcagctgctctcctccctcgaggtccttatatttgtgcaatgctcgaagctgcagtctctccctgctgggttacatagactcaccagtctcaagagattagagatcgcatactgtccaaacattcattcgctgcccaagggctgttttccgagttcactagaagtactacatgtttatgaaagccaaagcgaagagctcaaaaggcagtgccgcaagctaaaaggaacaattgcaatcatcgaagatgaagactacttggaactggtaacaaatactcacttatttgacttagcccagttcacgttttgtttggcacaacactagtatgtcatagacgagcgcttaacatttttttttcaattagcgtgggaacttgtgacttttctagttaatatgggagctcccaagcttctagaaatagagttatgtgagaagtacacaccaaatctatgcatgctgagcttaatgaaagtaatatggtcagaaaacaaatatttacagatcaatgtatggacacaggatgctgaattgatcagaccaacttgatcacctatttgtcatatgttttctgtcgagcaaagactccatcaagtttgaaaggttaaattcaaaatgagaacttctccatgggaataattacatttaactagaatgtgcactacttatatgtaatatgttcctctgttttttcttgatcactacttctggcagtttattagcatgcaaatctggcagaagtatcataccatacattaagaaatcatcaaattatgagatctgtgaagggtgtaggttaagataatagtttccatgttgctatatttgagtctctgcacaggcttcatgtgttgatgccatggaattagaaaagtaataaggaacatacttatacatgattaatggtcctgctaattgatcaactctttgtgggtgctaatgtcgtgctcgtaactatcttctctaaccaaagtatgtatacatttggtaccccaagttttgaagttcttggaataaccggaaacagaggtagccttttgattctttcacagacaccactggtagatgtgattttccaagtatgaaatcgaagactcaatgatgacttacttgttatatgatctttgaacatgattctttcaagtatgttctttatatgttcagctacctgtagttgctgcatctaatttaatagagaaaatctcctgtgtacgtttgaaagttcacctaatcccttctgtatccctgaattttgctcaatcccttacatacccctgaattttagtttggatcccttccatgccctttccgctagttgaccattagttgactattaaattcttatgaaaaagtccattttgccctttggtataaagaagcatataaattaatagagtatattgttgaagcatagaaatttgttatatgagactactatgtttatgagatagttatgcaccatattatttgcgataaatatacttttagatatgatataaaaaattaatatttatttattagttattaaaagattttttagcatatgtgttttgatagtaataaataaatctgttgtattactataaaaacacatatgctacataaaagaacttttaataaataataaataagtattaactttttatatcatatgtaaaagtaaatgtcacaaataatatggtgcatcacatactcataaatataatagtatcatccaataaatttttacattccaacaatatacttcattaatttattatgtttcttcatagcaaagggcaaaatggactttttcaaaagaatttaacggtcaactaacggtcaactagcggaaagggcatggaagggatccaaactaaaattcaggagtatgtaagggattgagcaaaattcaagggtatagaaggaattaggtgaactttcatgcatacataggtgattttctcaatttaatactcagggtggccatgcaccatggacagagatgcagaatcaataatttcaactcaagaaccttttatttttactgacaaaggaatgcataaaaaacaagtatactcttttttttcaacatattataagttctagtgagtgtttaattatgatagacatcatgttgttggtgctgtttatacttatttagttggatgcataggacaaactattatttgtaattacaccgaataaatatataaggctgccactagtcagaacacaatataaatgttacacctgtatggtgataaataggatggtcttaattccgagatgtgatgattgatgatcgcaagtagtaggagatttccccgcacaaagcaaattttgcgcgtgctaattgaatcggatttgttatacaacttttagctcatgcttacgtatatgcaattatatttaatatcttaactaattaaaacaatcgtcacctcgtccgtgcgctttttcatccgtccaccccccccccctcaaaaaaaaacccagaacacaaatacgagtccacatcaaaatctaaattggacccaaatcatagagaaaacactactacaataacacaagaacaagaacaacattaacacaagaacacaagaagaaaaggggagaatgctgccatcgccgccgtcacagggacacatggacatcggtccgccgccagcttccctcccgctggatccggcgaaggggaggacaccgccgccgggtcgccaccgcctcccctcccctcccgccgtatctggcacaccgggccgccgccgcctcctcccccgctggatccggcggaggggagggcgccaccgccgccgagacaccgggccgccaccgcctcccctcccctcccattggatccaggacgtcgggccactgccacctcccctcccactggatcggtggaggcgagggcgccgtccctgcccgccgcctcccctcccgctagatcgaccgccggtggtaggggagggcgctgccgccaccgcctgtgatgagggaggacgccgtcgccgccgtcggtggtgagggaggacgccgtcgccgccgccggtggtgggggagccgctgccgccgctcgcgggggaagggcgacgccgccgccgccgccgtttgggggagatcgggggcgggggggggggggggtttgaatcctagggttagggttaggtttcgggtatatttatttaggttaggattaatctggaccgtccattcgattggacggctcaagctgctcccacgtcgggctgcctattgggccgccgaatggaggacacaaaatggacatcaacgaagaaaggaaacaggccagaaacttaggctgcgttcgagcgcaggagaaagagagaaagatagttttgttttccgcgcgcacgcttcccgaactactaaacggtgtgttttttgtaaaaaatttctataggaaagttgctttaaaaaatcatattaatccatttttgaagtttaaaataattaatgctcaattaatcatgtgctaatggctcacctcgttttacgtatctttccaatctcctcaatcccctctttctcaaacacaccctcagggcacccacaatggttatctatagactctctataaaagatccatgtaagcatatttttctacttggaagagattaaatgaagagagagagcaaagctatctactaacctgaagatagtttatagagaaaaacgaggcaatttattagagagctatagatacccatgtagacatactattgagattgtttattattaatctagtctattgctgagatgtacatgttttatagatagcaccttactttaccattgcgggtgctcttagaatagataaaagggaaggaatataaacttttctatattcggcccaaacctaaaagggaggattttgattcctttttccaattaaataattgttaaatgatgtttgtattatttaaattagcaattaagctctgaaaattccaataaaatttcaaagagtgtaactaatcatggagaatttaataaaattaaatttaaccatgtcattttatttctcacttactttacttgtaaattgatttaattatacacctacctacttaaaaataccaaatatttcagcaaatttgtattttaattaattacataatgtaaatttttcttaacttttcctcaattttttggtctgtacattttccgttgcaacgcacgagcacttttgctagtatacaatagatattaaaagtagggaaaagctggaatacggtgcccccaactgcattcacaatttcatcctgaccgccctgtcacgcacgtgagagggaaaacagaagatttcccctttcctctctactccacgtcgcctccaccgccagttgcacttctcccaccgtcggtgcaagaagatgctcgacatcaaataatactcctgttcgcgtggaggtcagcttccgaaccaccgaagaaatcgatttgtatcggtttttaaagtaaagagatacgttatacctagctttgtggttgagggatacaatttgctggtgagggatacaatttgaccggcaagagatgaggaaggcaaaatagacttactcctaacaaaaatgacaatacattgctagtacttcagtaagtcacaaatactgtaatcatgatattatttattggctcaataatcatcatttttatccttgttatttcttattgcaacataacagggaaattgaagagggtattccggtaccaataatattacatgtttgctgtgaagatcatacatttaactcagcctcagcagctaatggttcaaaaactgattccacctcacccttgtccacgtcttccagagttgctggcttccactttggattctacaaattgaaaaggaaatttagctatacgtttagtaaatatatatctatagagttcatctccaccaagtttagtaaatattatttctctcctctcttattaagacacatcacctcgattatttctagccctttgataattgatatgtggtccaaataatttccctccttttcttctcttataaagtcataccaccttagttttgtctttgatgattaatctatgttactttctttttttttttccttctctcatctagccacatcacgtaagttttgcttttgattgatcaatccatatatgatttaaattgttataaaccacaacattttaattgtttatagctttcttttttaatagtcgatcatagatgaaaattatacaaagtgtagccatcttacatgttatttcgactaatatcatacaaaactccgcagcaatgcgtggggttttatctagttctattaatcctaactctagagacataacaccattagttaaacaaaacacaccacacatgtaactatgtgcctttttatattattactaggtatatggaaaaagaacagctatgtgcctatgtctagcaaggcaaaggagagtgaactttgcaccgtgccacacatgctataatgtctgtatccctctttcccagaagtcgcacagtgcgcaagacatggttgaattctaaggtctacctctactggtttacttcttattaacaactcagagaaatgttcaaactctgtagtacgaagtgttcttcagaatttcattgacagaagtttcgatccattagtggatagctccgcgaaaagtagctcaaggcttaaatattagggagtggcaaataaacaattgattttaaacaattaagcttcttaagtttaattacaagttgaataagctggcggatgatacgccacaaaagcaactatttaatgtgacattcatagtttgtaatttgcaacccatgtgctagacatgtggccctgggacccacagacacaggaggtgtctaattatcactatggagaggcaaatgtcagaagatggatgtcctttgaattatggaaatgtgatcctaaaacatttactatacgctatggtgattataaattgtccgccaaacaatttaagtaatcggagagtaaagagatactaagtcacatggataacttgcctggtccttgtcaactaagacagcacgtacaccttcaacaaaatcatttcgaaccgatgacctcaaggcaattcgatattcaactttcataacaccagccaactgaacaaaccaaatgtcagaattagcaatgtccttgcaaaagaaaaagagaagcctgaaaataaaatagttaaccaaataaaagtattcaattgtacaggatagcagtcataccttcgatagatagtgttcattattcctatatgctgatgcaacttgagaaaaatgtttttgagttaaacatagagaaaatggagccccttttttgagtcctgccaaggcctcgttggcccattctgccactgcagacaacaatgaaaaggatacacgtgcaactagtcagtactaaactgaatttataaaacggtctcaatatagaaacactgttggcacttgtgcataaatataacaacattctcttgacgccttagcttaaaagcagagtacctgcagcatcatcactttgactacacttcttaagctcttccacagattcagcaactgatttgtcaggaccaaaggaagaaatgatatatggtaaaaacttatctagctggggccctgactctggctcgttcttgaactttgtcagcaatgactcaacatctctgtgaggatcatctgtgctgcaaaaataaaaaacacgatatcagatgtcaagacactatcaaacagaattataaccgagttttgaatgtgtcactattattctattaatgaaaaattatggaatttatacttctttaaaagaatggaatggtggaggcagtgaatctgacatcccacctactcccattgtaaattttgcaaattgccccttgaatctaaatggatagccacatataaaatcaaattaagatggatgttccctatagaaaaaggatgggtaacacatatcatggaaaatatgtttttatttattttcagtagcaaagcaggggcattcagctagtagtaattaaaagaacataatgatcttgctagcatttagtaagtttttaccaaataacagttcggaacatacaagttagcactcaagagggattccctgagaggtcccaggttcgctgaaggtacataatgagttccaagaccaaagaaaagggcatcagcaggtgatgatatccttttccctgtcatcccaaggtaagatcctgaaagaagcagaagtgagcagtgaaccgtgttattaaggcggtatggcgaagtatgccaacccagcaccgccttaccgccatagcgataagacgtatggcgtggcgacgccttaagtgcattgaaaaataagaaagtattaagtaatatgggccctaaaaatactaatggggtactccattcatcacagcccagcccaatagtagcacttacctagcctagtccaaatactttgctcttttgacctagcaaacaacattttaaccctacccaacagcttccctcccagcagccgccacctcaccttcatctagatctctctcccccattgtgcagcacggctcctctcctccacctttcttctctccttgtgcacgatgcagcaagcatacaccatcatcctatcctttctctcctctattgcagccagcagcctcctctcctccaccttttctctctcatgtggcacagcagcagcaggtggtgcctctcttgatctccctgtactccccatcagcacaagaagggagagggcgatgctagggaggaccagcagcaagacaacagacttttcccctctgctctcaccctctttccttcagtttatgcctgtaaggcggaggtagcctatggcggaaggatgccttgcccttctgggaacgtcacgatgctatagcgacgccttaataaccatggcagtgaatagaaggaaatgaaaaaggcttttacacatttggagcagcaaataatttaggagagcaaataaagacagagtttagaaccaggttacatatcttgcaaaattgaacaagaactgaataatatgcaatgtccagaactcatagctcagaactacagaacaattcctatgttgtcaagctcaaaatgagttatgatgatagattattaacaaaattagtagcggaagacatggttctacagggttactgaaacaagatagtcaagaatcttaccaacagcaccacctcctggagctttggcaccaatgtaagcaaagccaacgtccgggaacaagccaataccattttctggcatagccaggagcgtcctctgtaacagtagtgcatgcgaacattttgagccttacaattcaaatactgagaatacaaatgatgaacataaaatctaaatcagagttacagaaatttcaaacttgcctcagtaataatgcggtagcggccatgccctgataatccaattccaaatcccattgtcacaccatccatcaggcatatataaggttttgtatactcatgaatcttacaaatcaaagagtactctgctgtgaagacctgaaaacaaataaagtaccttttcagtgatgtaaattttaagaacattttggacagaggacatatcaactacatccattttcccatgcagcagagagaagggggaagggggagggggggggaggagtagaaaatgtgtgctactgcctactaggactaatcatgcctatagccctgtaaacaccatttgttgtgcaataataagatgcaaatggtgtctcagtgctcagcagcctaacctcaagtcatttgcaaaccagctaagcatgctgaatttcagttcccatggtactttaattaaaagaagaagaaactagcatggaataaggttcagaaacccctctacgactgactactaattacctaaagttggcatcaataattaaatatgccaccagagtcatattttagattatttatgtacaaatcagctggttatgaatcatatagaagttgttctgcatagtgtgggggaaacattaagtaatttacaaaaataacaatccatttttttttcaaatgagtcgaaatatgttttgcacaagtgcatgtatacatacatgatagatgtattatgtgaattaggcatggttaatccaaagcaggttattggtcacaagtcataaccagttattttcaaacaagtgcatgcatcaaggagcacaccaaacacagcttgtagtttgcagcagatagaagtgattgtaactgtgttggaaaatgatagtgcttcaaagtgagttggtggcggatcagatggtgttagaaaagaaaaggatacaacagactacgatggattaaacaactgaagtctttcaactgtatgtgcattgcacaacttgagaagaataaataataaatgtcagttactaaacccacagatcagttccttctttctttttatttttatgtgtaatatgaacgcaccaataatatgttttgacaacataatcaaaacccaccaataatatgtgaaaacaatgccagaatttttagatcctcatgtctcagtaggagcaggaggatgtacttgtatttttggatattgcagaatcatcagttaaatttaattatgtgttaaatctcaattattgtttagatgtatcaactacaatattaaactgcaaatcaaaattttcagaaaactatttcaatattgcatgactttcagttcgttatgaacttcatatacaaaaaacctattcagctctcctctcaaattatgattgcaatatcaattccgatatcttatatacactttttcagatacaaagagggcattataatttttagaaaatcagagcaaaatagccgcaatcaacaaaaggttttccatcatgcgatggaaactatctccaggaaagcattaatcatgctattactagacctctattatctctggcattgtgcaatcattagcaagtctcttcacatccccacctgcagtttacactaaacaatatcactatctgagcaaagcaacgattgttaacaacaccgttatactgtcacataaactgttgaacaacaaatagaaaagaaatatgagctttaaaagtaaaatcagatcaaaaacacacatgacaaaggtaaaaaccttttgcacaagtggtgtgctcttgtccttttgaatttctgctgcaacacccttaatatccatccctgcattggtcatgaatcttatttgcaaacatctccaatgctccggaaataaaaaggcgcaaaacagcatgttcaatgtacaaggcccagctttttcaacgaataaaaacagagaggtgatcaccagctgagaaggcacggggtgaactgctttccacaagaacacacttgacacttggatttgtttcccattcatcaagaaatgccttgtatcgaaggtccatttctgcaatcatatgagaccttaaatatgtgagtgaacctcagaaagctaccaatgtactcgatacacagttggtgtgcatcatttcttcagaaggttagtgtcacttatatacaaaatcaagaagggaattgttgagtaaaaaacaagggatgcttgttaaaaataaataaatatgtaatctacttttctgcaagtgaagaggacataactatcaataccataaatttatggtgtatctattagtgtctacatgacagcgctagaattgtacggagtacatgaaacccatgtaagtgcagtaagctttgcaaattcccagctccaaatgtgggtctagggctctatgctactaacggaacgcatgaaatctgtaactgagtgtcaattttcaaaacctcaaactaaaacaatcaactggatgaaatatttaacatgcattttgactagagtgccaactgtaccaaacttcacttagctgcatgccattgagcagcaaattattttgattgctttcccatcaccactttgagctcacaaaccggactaaaaagccgcacagcatccagttaaccactaacactgtacagacatgttcaccgcacgagcaacactgattttaattcattattcgcaaccttccaaactagtgggaacgccacaaatcgtggagacctccgccgcccggcccggtcgccctactcccagtaacccaaataggaggaggaagagagagagagagagagagagagagagagagagagagagagaggagcgaccctcaccgaggttcatggcgttgagggccttggggcggtcgagggtgatgacggcgacgccgttgggggtgacgcggcccttcacgaactcctccgcggcggcggcggccatggcggcgaagcggcggaaggtgagggtcggggctagggttttggaggcggatgcggcggtggaggaggggcactggaggaaggaagtggtggagatcgatccggggccgggcgggtggatgcgggagaggagagctcgcatagtgacgtgagagcaacccatgtggagaggaagaagccgagagcgagagggggggggggggggggattaatgtgatgaaattgactattgagaattggagggggtgtgttgttggagtacatttttttcccccaaaaaatgcgctgaactcgcgactcgcgaggaactgatgctaaaagtcagggaaaagtctaactgtcaattttcaaaaacgaaccttccgtctgacctgtttcactacatcgctaagatttgatttaaaaaaaaagaaatataattaaaattcataatgcccaaaatacccttgaggaaaccatacccatctttaaccctatccacatgtctctccatgtctctctcctgccagtgagttgcggcggcggcgatgtgtgcagcggggagggaggtggaggttggcgcgcgaagcagggagggaggcggaggttggcgcgcgaagaagggagggaggggcggcgcgacggcagctggcgccggagggaacgcggaggaataaaggaggcgacgtcagaagaagaagagagaagagagaactgacgggtgggtcccacatgtaatagggtcaaatgactaagggtaaaatggaccttttgtgcttcagttaacaccgttagaagcctttaacagaatagggtcataccgtatcttcaattttaaaaagaagggtcaaataagcaaagttgaaaaaagaggatcaaattagtagttagctttcaaaagagggtcaaatgcgcaattgcccctaaaagttagtactaatattataaattatttgacttttttaagtcaaactttgttaaatttgattaaatttgtagaaaaatttaacaacatataaaatattaaattggtttaattaaatcttacattaaatatattttgataatatgtttgttttgtgttgaaaatactgctatatttttccataaacttataatatgaaatgaaggggtactggtttaccgctaatgctaaaagggagcaggtcctaagcgtcatccacaatgcaatgataattaggccattcatagtacagatcctctacttacaggtcactaatatgtggatccgctggtagagggtccatatgtcagtgacacaagttagaggatctcaatccttgcagtgaggtggcgtttggtctaaatacgccactttcgagattcccttccacgtaagcagatgttgttcatagtgagtccctcgtcctcctgttaggatttggtggccttgttagagaaaagtagaaagacgtccagcgaagcagaaaacatgagagagatgttgccatcgcggagctcccatctctgccaccctgcttcgccggtttgccgttgatcttgcctagccaaaggtgcctccggcagggagtgccctcaataactagatctcgcccgatccacctttgagaggttgctgccttgatctaaattgggaggacctcgtcaacacggtgccgcttggcatcctcgctaccgccataatgtggagagaggggagaggaggaggcaccaccttgatccgcactggctaccccgatgtgcgaactgtcatgagtttgtcggccgcaccgccacaaggctatccacctcgctctgccgggccgagcgcaaatgctaacattgtcgacctgcgctgccccgtctactcattgctccatctgctccattaggaagaagggggatggttgaggcaagaaggagtggcaaaaagggcatcgacaagagaccgctgtcctaatctgtgagttgttaggagcttattgggagagggaggtgaggaggttgtcggcatcatcgggcagccgggcaggagggatagtggaaggagatgggattccattgttctgtatcacaaacaggtggggcagcagagaacatctttgatatatttttgtttagaaaaaggtcctttatgtaaagatctaactagaaaaaaaattaatatataacaagggttgaaacaaaatatgcatgggcttaaatgacaaaattgcatgggccaatggaaacacggtgcaccgtcgagatgtgtggttctatttactttcttattatgtagaagttgagtatccagttaggtgtagactacaatgtgagtactcttatctagtggtctcatgttgccagctcggagattctaatccagatcagcactgcgtgccccacgagagcgctcgtgccttgcaggggcacggatgccttgacagccgtgcaggtctcctcctctattgtgcacgtttctttcgcgagatagctagagagagaagttgcggccgaaaagggaaaagaaaatggccggagaggacagagacaggtctagaacaacctttaaacttatcaaaatgaccttaccaccgtcaccgtcaccgggtgttgagctcgctagttggagctgtctagttccttttacgcggatctggaagtatacgacgcatatctagtatttaaacggtggcgatactgatgcaacacctacacagtggtgctcaatgattggatgaggcaacgccaacaacaatgatgcgtggaaggtcggagacggtggccctcgcctatgttcaaccttctcattgaccgcgcggtgcactaggcgagacccagcatcaactccaccaatcgccttcaactgccattgccattgtcgctgggttttaggtaggagataagcaccatggggaggggagaggagaacgatggcggtggaaagggaataggataggtgccagtcggagcccaaaggggatggggggacgggggaggggggaaggggcacgggagagctaataacctagagatggggtgctatgtgcaagcgtgctatattcaagcgcatgccccctattgcttgcctagctgcttaccaatagtacaagcgtgctacatgttagcttatgataagtgttgactgtcaaaagcctagagacaaggacaccgaccctttataattgactaaatggtaagatttgtttgaattaaagaccgtgttttttcatcccatcccagggcaccaaaacctaatggttgttctatactcaacttgtccaaacattcagcacatgtctctcctcacattacattagtgcttgagttgtttaactaggcaagaagcttaatagccgagtaggcagacgtatgaagagaagatcggtccaatgtataatactctagacttattttagtcatcgtaggtaaatttagtaattagtagcgaggggaaaagtctaaagtacttctcgttaagaatagaaaattacgtagtaggagtatcagtgtattaccacgtgataggtaagtgatattgaaagtataagacttctcgattttgttgacgtagttaagagggtagaaattaattaacttatttttattaattttgaatgctaaaaattatgttactaatgtacaatttaagattattttaattttgtcactaacttcacgagtgtattcccgcctaactaccgcatatccatttgtggtgttcattgatcttatagccaaaaccaatcattagacgagacttgatagctccattgcatccaatctcacttttggaaaacggtagttggaacctgatagcttcatctgccaatcaaggcccccccgtacgttcgtttggtcaaaaagagatacatgttttccttactagaaaaaaatgtttgtacgttgcaacgggtaaaaatattttttatcctacgcactatgctccctttaatgcccatgcgttttggaccaaacgaacgcacattccttctgtccttttcagctctagtcctagtacagtccgctatctctctctgctcggtctacctctctttggctcagtccataaatggagttgtaggcccaagtcgaacagtattatgtccgtaccattacaaagccgatcctcccatcaaatccggtaatccgctcgagctcccatagtcttataccatgacggagccgatcctcccatcaaatacggtaatccgctcgagctcgcatagttccgtacccatacgatgactaacgaagccgatcctctccatcaaatccggtcgaatctttctccatatccaaaattattgagggatttttatccacttgatcttccttttccttttttttaccaaaattaaagcaatcagcaaaacttgggataaaaaatgacgacgattaaatggttcatcaaaatcgaagcaatctgcaaaacttgagataaaaaataactatgattaaatggagattcaatctgatgaattaaagctgaatcaaaaggggaattcatggggaaaataatgagagagtagtggggaatcaattattgcaacgaataggaggaggaagcatatggggagtaaaatcaacgtggcggcggcgctgggtttggcccgataaaaaaaccgcaaaaaaatatagcgataaaagaaataaacagaaaaattggtgaaagaaaatacgcaaagaggggaaaaagaaaacggacaaagaaaacaggaaaaaaggtgaaagaaaaaaaaagaaacgggaaaagaaaataaaaggaaaaaaacaggaaaaaaaaagaaaacgaacaaaatgtagttttcttttattttcgccactttcttatggggaatcagacttttttattttaggtttttttttctatttttttatttagacggacgaaggaaacatctcttaaaatttttaagtagtaatagatacaagataatgtaattttttttattgaacttgatgattacaccaaggtaatatagaccggtggagaactcatttttattcccggttaaaaacccccactagttccggttataacaccgtgaccaacaaatcgagactaaagatctcgatcttcaagtatcgactgaaataaccggtactaaatttgcatatcaagttaaaaaaaatatgtgggatgtgagagattcgaactcaagatctctcacctcatcctacgttaccgtccctcctactacacacatctaacttggatagatattaactaaccctgtagacatcttaccggtattaaaaatatctttagtacaccaaccgagactaaagagctaccaaccgagactaaagagctagagagctctttagtcttggttagtgttaccaactggtgctaaagatgcatttttagtactagttggtaacaccaactaggactaaaaaagtttccatgaagttaaatttttagaaccgatactaaagcatatttagtaccggttcctaatctaatcaagatatttgtgattttgggtaccacaataaaagattaattctctagtagtaataactaataattactccgagaatgcgctcggcctctgcctaactaggatgtatgtagctataacagaaaccaacaagtttaaaagaaagaaagtacaagcagcattaacgactaggcaaagtttgctacagaacaccgcgacttcgtggttttagctgtaggacaccgcacgaagtcacttttgagggagcgcactatgtaaatgtggtaatttaccaagggacactacatctattaaattaatattttcgtgctgactagacgagagggggcccacttttttacacagcttgaccaaattacccctcttatctcattctgatcctctcttcttccttatctattcccatctctctttcattctctcttttacacgacagcggatgcccacttagcagcggcagcgtgtgtggcctactcggcggcggctgcggcggcctgctcgacggtggtggcaaagcccggagcacatgcagcctactcagcggcggcgacgcacgcggcggtgccaagagcgcggcctactcagtagcggcggccggcggtggccgtggaccacgccagctgcaacgtgcaggtggcctagtgccggacgagcacccgctgctccagcgtgtgcttctccttcctcaacgcgacgacctctgaccgcaaccgtcatagctcgtcgcaccggtggagctcctccacggccgcccgcttcttccccgcatcgtttctcgcgatgatggtgtctttcgtctactcgacagcacacttgaacggcggttcttggccgcggccagctcgtgctcttcgccgagcggcatggaggaggggatagagagagaagagagataggagagctgatatgtgggctgaagggcatttttgacatttcacgcgatttatctctcatcttcgaccggaaattattattttaatgagtaggatgtccaccagtaaatatttaacttttgagagtgtcttccctaaaagtcacttcgtgcggtgtcctacagctaaaaccgcgaagtcacgatgtcctgtagtaaaatttccctaacaactatcaatcgtaatattagatcaccacacatgtccctgttaaaacactcttgaccacatgctccaaacatagatatgccggcaataatcaaatcctgcaaggtgcaagctgggtttctatagtataacccaagtgcgtagccaatggatagttaaatagatagcctgcatgggagaaaaaaaatttctatcaaaaaaacatatcactccaacataacttaagcaaccagcatataacttaggtggtgtttggttggagggactaaagtggggctaaactttagtccctctcacaaaaatataagtccctatacttttgtgagagggactaaatttagtccctagttcccaaacacccccttaagcaaccagcatatagcagtcgcccctaacaagatatatatggttgcagatcttcttgaacaccccaaatccaactagtgaatttgcgtgaaatactaccagatggaataattccttactccacactaaatgggctaagtggcattcaaagaaaaagggtttaattgtcttcttcttcttgtgaataacaataattttaattgccttgtcaattatgtttacataaattatctttggttaacacaactccgcgacgaatgtatcaatggaaaattttaaccttcaaaggcacttttagttttcagagatttgggatgtcactatggacttcacattcaaccgtccattaagggttaagttccatataaactaatattgctcctgaattaaatcaatattagtgatgtgtgataataaattattccatgccagtaattttgatctagttagatctgttctctaaaacatctgcaatagttacctatttatacctaacaacactgtagaggaaagtgtactgttctcgtagggttacatctcccaatcatttgtctttccataatctaatttaatttagtaaccattcttaattatgtaggatccaagacaaaagagatctcatttcatcttcattaggctgtctccggccttctactgaacttgcgtgagcggctgtgaactcaaatacttattttgtattagctgtttccaaacatcatctacagtaagcaactgaaatagccacttactgagtaatactgaatttctaaaccaccttatctttaaggcggcatagtatgtctcacttggcttttttttttaccatcactctaacaacaaaaaccagagcaaaaatagtagattttttttaaaaaaattcctctcgctactgtgaagtacttcattcatgaaaaaaaaactcaatctaaatgggatgtgacatactccatccgtttcacaatgtaagtcattctagtatttcccacattcatatttatgttaatgaatatatatatatatatatatatatatatatatatatatatatatatatatatatatatatatatatatattcatatacatgaatacaaatatgggaaatactagaatgacttacattatgaaacaaaagaaagaatatagtataacaaatctggatacctttatatctaaatccattataccaagttggtcgtgtcacatcccccaattagattgggtcttgttttaagacgtgaataaacactaagttaattagtgtgagccctccttcaatagatagaaattttcctttccaactatggaagagatgcatatgcgtgtccaaacaccaaataatagtacattagcccgggagcaagccattggagcatactccctccgtccaaaaaaaaccaacctagaaagagtttgtttagattcgttgtactagaaagggatcctttaaggttgtcttaaaaatacccaacctaaaaaagatttgtccagattcgttgtgctaaaagagaaccctattagacttgtttttttttatggagggagtacgagactaactacaaaattttcagtctagacaatgaccaagcgggggggacatatgtcgctggactcaaactccacgacggaactggcaaacagacgacaagatctcgaccgaatctgatcgacactgggtaaggtcaggaagaacagtcttactcgtcttttttctaatccaacttaagctcagtgatgacgccaactaatctggaccgtgtttagttgtttaggtgtaaaaattttaaagtacacgggcacacatttaaagtataaaacatagactaataataaaacaaattacatattccgacggtaaactgcgagacgaatttattaagcctaattaattcattattggcaaatgtttaccatagcaccacattatcaaatcatgacgcaattatgcttaaaagattcgtctcacaatttacatgcaaactgtgtaattggtttttttcgtctatatttaatgctctatatatatatatatgcccaaacatttaatgtggtggaatttttaaaagtttaaaggtaactaaaagcaacgctggttgagttcgtggatgcgacactgccatctcgaactcttgtgcactcctctcgctcgccacacgaaacgccacaccactaacagataaaaaatagctggccaattgccacccattttgcctatgcgccatagctgagctgagctagagctctcactacagctagctaaccgagagccacacgtcggtgactcgtgacctgtggagccatgtcgccgacgccgaggccgcacttcctcgtgctcacgttcccgctccagggccacatcgcgccggcgctccgcctcgccaggcgcctgctcgccgccgcccccgacgcgctcgtcaccttctccaccgccgccgccgcgcaccgccgcatgttcgccgagggggagggcggcgacggcgacggcaggctcgagctcctcccgttctccgacggcaccgagaacgggttcgtcaagcgcggcgacgccgcggagctcggcgcgtacatggcgtcgttccacgcctcgggccggcgcagcgtcggggagatggtcgacgcgctcgcggcgcgggggcgccccgtgtcgagcgtcgtctacacgctcctcctgccgtgggcggccgacgtcgcgcgcgaccgcggcgtgccgtccgcgctctactggatccagcccgtcgccgtgctggccatctactgccactacttccacggcctcggcggcgtcgtcgacgagcaccgccgcgaccattcgttcgtcctggagttcccgggccttccgccgatggcggccggggacctcccgtccttcctcaccgaagccaccgacccctccgactacttccacagcatcttcaccacgttccgcgacctgttcgacgccctcgacagggagacacccaaggccaccgtgctcgtcaacgtgttccaagaactcgaggcggacacgctcgccgccgttggggcgtacgacgtgctccccatcggcccggtgctcccgtccggcgacgacgccgcgctgttcaagcagaacgacgccaagtacatggagtggctcgacaccaagccggccggctcggtggtgtacgtcgcgttcgggagcttaaccgtcatggcgaaggggcaggtcgacgagctgctccatggcctcgaggagagcgggaggccgtacctctgcgtggtgcggaaggacaacaaggccgccgtggcggagacgggcgacgcgacggcggcggcggcggcgcgcaggaacggcgtggtggtggagtggtgcgaccaggtgcgcgtgctgtcgcacgcggcggtggggtgcttcgtcacgcactgcggctggaactcggtgctggagagcatcgcgtcgggcgtgcccatggtgggcgtcccgcggatgtcggaccagcagatgaacgcgcggctcgtcgagcgcgactggcgcgtcggcgtgcgcgcggaggtggacggcggcgacggcgtgctgcgcgcggcggagctgaggcggcgggtcgaggaggtgatgggagacggggaggcggcggaggtgcggcgctcggcggcggcgtggaagcgagcggtggcggaggctctagggaaaggagggtcgtcggatcgtaatctgacggccttcgtggagggtgccagaagtgtcatttgaaaacgacataatttgaaaacgttataagatgtattttaatttgaaaacgatttggggatcctagggtcttcccttgttggtttggctgtttgttcacttgtatgtacaacctctactgaactactccctccgtcctatgatataagggattttgagtttttgcttgcacggtttgactactcgtcttattcaaaaaaatttggaattattatttacttttttgtgacttactccctccgtcccaaaaaaaaggtaaaccctggattttcgtatccaactttgactgtccgtcttatatgaaatttttttataattcgtatttttattgttgttagatgataaaacatgattaatattttatacgtgacttgtctttttaatttttttcataattttttcaaataaaacggacggttaaacgttgggcacggaaactagggtttgtctttttttggacggagggagtactttattatctaaagtactttacgcacaacttttcgttttttatatttgcataattttttttaataagacgagtggtcaaacactacaagtaaaaactcaaaatcccttatattattggacggagggagtagctgccaactgggctctcattttttatgggcttttgctatattgttgggccaaattattaccaccgaactgaactacctgttgggtaagggaacatgggctttctctggtgtactttctactttggggtcccgtgggtaatataccatccctgccctcgcacccagaaatgaccagggcccccacccgcttcccctgcgggttagaattcccacccgtccctgtaggggcgggtactcaccgggtccccaaccccaaccccacgggagaaattaccacccatatatccaatcgttcgtaggctcgtagcatgtttgttctgcacaacccagatatctaattgatgacagtttgctatagttttactagctaggctatttggtgagaagccgacaagtgaacggtgcctacacattcgtagcccaataccctacctatgtactcaaccaagttcttctttagtccatggccatgtttggatccggagggctattaaatagccctccggaatcttgctatttaagagtattaaacgtagattactgacaaaacccattccataacccctaggctattttgcgagacgaatctaacgaggtatattaatccatgatttgctacagtgatgctacagtaatcagccgctaattatggattagtatacatcattagattcgtctcgcaaaatagcctaggggttatggaatgggttttgtcagtaatctacgtttaataatcctaaatagcaagattccggagggatatttaatagcccggaggatccaaacaaggcccatgtatacaatcactcctattccttcttcagtccgtatcctatcgctcgtaggcttctaggtggcagcagaggtgcggcgtagggcggcgacatggaagcgagcggtcgaggcggctttagggaattgaggctcgtcggtaggggtgtgtcagggttacgggttaggtataccctttaccctttgatatatgtcacatatcggtatggcatgcccacgcgcatacggatactctctacatacactaaggaaatccttcacagagtttacggacgaaaagagtcctactcggacaagactgggtcgtcaatgtatcgtgtagggtttgatgtctccgagttctacttggaaaccgcctgacctgcgatataaaagggaccccccagggaggacctaaggcatcaaatctcaaagccaacacaacccccacagatctagtcgaaccaactcgactacgatcttgtcggatccatcgaattccattgttccctttgtaacctgtgttttccatcatataatcccacgtcaactggattagggctattacctatcaaggggcctgaaccagtataatcttcgtcttttgtttgcttgatgtcgtattacgtggacccttgtaacaacgtactccaataccctctatatccggtctatgggtatcacccgtcgatagtggcgcgccaggtaggggcacttggtgctcaaggttctactactatgtcatccagcttcgtcgacaacagcgtcaacaccaacctcaaccaagtattccctgcttcaacaatgctggtgtagactcaagtcggcaaaatcgtcttcccggtttacaccacgatgccgatctcagccggtccatcagtgaccggaaacgagaacgcagtggatacaaaccaagacgactccatgtcgaaaaatcctcccgccgaggcagagaacggaacatgaacgacatctgagctcgagaaggattccaaggcgaccaaagcttgtcactccgacaagaaccacgagccgacgaggatgacttccaaagcgacaaggtcctggtgtcctatccacaaaaccaggaaacacactttgcaagcctgctgggtttttctcaacgtccgcgctgaaattcgctcctgcaaagagcgtggaattcagcgtatttctccaactcgtgatgtctattctcctattcacaagacaaagaatcacgacctctcaagctgcaaggtctttctcagcgccatgaaggcgccatctcctaaggtccaacagtcacacatcctcatcagggataaagacaaggaatgaggagcgacgccaacttcggatcgatttgttggggtaatcgacatcgatccccacgaaccatcagtcttgcacctcctcgaagactatggatcatcgacaacgagcgtgccacgggagatattggctattgatgatgtcggcacgtcacagcgcaccaatgcagaagcggagaatcaagtagccactccggcccaacacatcagagccgtcaacgctatactgagggaaaccccctacgatcccgttctgaacgatgatctcgcgcgttggacagaacgactacgggaatcagtgaccaacctcagcaacgcgttcgaagaggccgctgccgcagcgcacccagagcagccaccaactggcgatgccaatggtgaaaaccctgaacggagggaatcgcctcaacgagccacccctccacctcgcggcaccggcgatctccgtgatcacctcaacggcagccgagaggcacgacgcacacaagacaacgagaaccgttcccggcgtcatgtctcttcacggcgtcatgataacaaagatcgaggagaccgttcaaacgaagactgagaccgtgataaccgccacgatcacaacgatcgcgaacagcgggtgccaggcgatactggtcgaggacgtcgccataatgacgacgatgatggagaccggcgccgagacaacagcgggagacggcgacaggattctcgagagccaggccgacaacctcgtaatcgtacactggaaccaagcgacccatcgtcatcgtcattatcctcgtcttcctcatcatcagatagacatccatgaaggacacacgatcgccgataacccaccgcccccagcgctgggtgtagagctttcagtcgttccctgcatgatgtccgatggcctgagagattccgacctggagcaatagagaagtacgatgggagcaccgacccagaagagttccttcaagtctactccacagtactctacgttgccggagcagacgacaatgcattagcaaattatttgccaaccgcgttaaatggctctgcacgttcatggctgatgcatctcccgccctactcgatctcttcgtgggcagacctgtggcagcagttcgtcgccaacttctaaggaacctacaagcgccacgcgatcgaagacgacctacacgcgttaacacagaactcgagtgaatccttgagggaatatgttcggcgcttcaacgagtgcagaaatacaatccccgaaatcaccgacacttctataattcgcgccttcaagtcctgcgtcagagatcgctatactactcaggagttggcaacaagacgcatcacaactactcagagattgttcgaaattgttgagcgatgcgcccacgcagatgatgcgctaagacgcaagaacgataagccgaagaccgggggagagaagaaactagccacggacgcacctgagtcaagcaagaagaaaaatcgcaaaaatgggaaaaggaaagctcaagcggaagtcctcgcagcagaatacgcgaaccctcccaagcgcccagacccacaaggtagcgacgcaaagaaagcatggtgccccatacacaaaacggacagacattctttggaagattgccttgttttcaaaaagtcgctcgagaagcacattgcatttgaaaaaggcaagcgagtacgcgtggtcgaaaaggatgcggaagcggctcccaaggagtcggactcagcatatccagactctgacctccacgtttcacacatcttcggaggttccacaacgtactcctcaaagcgagaatacaagaaagtggaacgtgaagtctgttcgacatggcagggggctgcacccaagatgaagtggtctgaacagaagatagaattctcggaagaagaccaccccaagactgccgtcatcccaggacgatatccgatcgtggtcgaacccactattcggaacatcaaggtcacgcgggttctcatcgatggtggcagctcaatcaaccttcttttcgccggcactttggacgcgatgggaattccgcaaagcgaattgacaccaaccgattaaccctttcatggaattactccccagtcatcgtccaaaccattgggcaagattacgttgcctgtgactttcggccaagctaacaacttccgaatagagcagatcacctttgatgtcgctgaattcgatacagcttataacgccatcattgggagaactgcacttgcgaagtttatggccgcatctcactacgcgtatcaagtgctcaagatgccgggaccgaagggaataatcactatttaagggaatgcaaagctggcggtgcaatgcgacaaacggagcctcgacatggtcgagcaaacgcccagcccacccgccacgaccaagccacccaagaaagtgagcaagacaaacaagacgccgaaaccggacggcgcaatcaagatcgttccactctccagtgccaatcccgacaagaccgtcaagatcggggtgacactaagcgagaaataggaactcgcgctcatcaccttcctccgcgacaatgctgacgtgttcgcttggcagccgtccgacatgctgggggtccccagggaggtgattgagcacaaactcatcgtgcgacccgatgccaagccagtaaagcaaagactgcggagatttgcaccagaccgaaaacaagccatacgagaagagctcgacaaacttctcaagcctggcttcatcagagaagtactacatccagagtggctagccaatccagtcatggtgcgaaaggccaacgggaaatggagaatgtgcgtcgacttcaccgacctcaacaaggcatgtcccaaggatcacttccctcttcctcgaatagatcagctggtggactcaacagccggctgtgagctgttgagctttctcgacgcttactttggctaccaccaaatcagcatggcaaaagaagacaaagagaagacaacattcatcatgccattcggggtattttgctatgttaagatgccattcggactgataaccgcagggaatactttccagcgcacggttcagggcgcacttagcgaccagctcggcaacaatgtcgaggcatacgtcgacgacatcgttgtcaagaccaagacaagcgactcattgattgacgatctgcaggaaacgttcaacaacctccgacgatatcgcctcatgctcaatctagagaagtgcacgttcggagtaccatcgggcaagctgctcggattccttgtctccggcagaggaatagaagcaaatcccgagaagatcaaggcaatcgagaacatgaagtcgcccacaagactcaaggaaatacaaaagctaaccggatgcatggcagcactgaacaggttcgtcgctaggatgggagaacgagggcaacccttcttcgctctgctgaagaaacaagacaaatttgtatggacacaggaagccgaagaggcattcattgcactcaagcgctacctatcaaacccccctgtacttgttgctccccaacctaatgatgaattattcctctatattgccgccacgccatattccgttagcaccgtcattgttgtcgagagagagaaagtacaacgaccagtctattacgtcagcgaagctctccacgacgcaaagacaagatatccacagatccaaaagctgctttacgtggtcatcatgacatcaaggaagctacgccactactttcaagcccacagagtcacagttggctcctccttcccgctcggtgaagttgtgagaaacaaaaacgttgtcggccgcattgcgaaatgggtagtcgagctgagccagtttgatgtccactttataccacgaacagccatcaagtcccaggtactcgccgacttcgtagccgattggactatgcctgatgacaaatcagacaaccaagtcgacaacgaaacgtggacaatggcgttcaatggtgcactcaacagccaaggagcaggggcagggtttatcttgacgtctccttccggagatcaattcaagcacgcaatccacctcaacttcagggcgaccaataacacagccgaatacgagggattactcgccgggataagagctgcagccgcacttggggtcaaacgactaatcgtaaaaggagactccgagctagtcgtgaatcaggtgcacaaagattataaatgctctaaccccgagttatccaagtatctcgcagaagtcaggaaactagagaaaaggttcgatgggatcaaggttcgacacgtttaccgcaaggacaacatcgagccagatgacctagcatgacgtgcgcctagacgagaactgctcgagcccgacacttttctggacatcctgacgaagccatcagtaaaagaggttagcggcgaagttagcccggccgccccagacattggcgcggaggccacaaaggcagaacgcgccgttgccgatatcgagatcacagatgactggcacatcccacttatgaaattcatcaacagcgaggagttgcccgaggacgatacagaggccgagaaaataacccgtaaagcaaaaatctaaagtgtggtcagcaacgatctatacaaaaaagcgccaaacggggtacttctcaaatgcgtctcgtccgacgacggcagacacctcttccttgatatacatgaaggcatctatgggtcacatgccgccggtcggacattggtcgggaaagcttttcgacaagggtttttctggccaatcgccctcaaagatgcatgcgacatggtccagcgatgtgaagcctgtcaattccacagtaaacacacaaagctacccgcgcaagtgctccagactatccctcttacttggccattctcgtgctgggcgctagatatactcgggccattcccacgaggacagggcggttacaggttcctattcgtggcgatcgacaaattcactaagtagatcgaagcagtacccacgggggaaatcaaggccgacaacgccatcaaattcatcaaggggatattttgcagatacggactatcgcaccgcatcataaccgacaacggctcccagttcatcagcaccgatttccaggattactgcatcgggctgggaatcaagatatgcttcgcctcgatctctcaccctcaaagcaacggacaagtcgagagggcaaacggcatagtactacaagggatcaaaacccgcgtctacgacaggctcatgtcacacgacaaaaaatgggtcgaagaactcccatcagtactatgggccgtacgcaccacaccgacaacatctaacaaggaaacacccttcttcctcatgtacggttccgaggccatgctccctagcgagctatgacatcagagtacacgagtacagaagtattccgacgaggatcaggaggagtagtgaaacgtcgatgtgaatctactcgaggaacatcgcgaacgagttgccgtccgagcagccaattaccaacaggccctccgccgttaccacgagaagcgcatccgagcacgcatgcttacgatcggcgactacttcctccgacgggttcaaagccaagcagggcgaaacaagctctcacccaaatgggaaggatcttacacgatcacacaagtcttgcgaccaggcgcatttaaaattgcagacggtgatggtcgcgagttggcaaattcttggaacattgaccaactacgtaaattctatgtatgagtcaatgtcatccatacctgtaagacaccttacagcatcaataaagcctattcttaggaccatattacaatcaaagtgttcctgtccgatgatcccttacccagatgacacctaacgttgaaatctatcctcatgtccctttacgccgtcttgacaaggcctccgaggaacctaagggatcttcggctggggacgcccagagccgataaggccttgtcagatcctgtagagacgaaagaccatgtaagacctggtcgtgtaagagttctcgccgtgcgtattaaccaagtcgtgtaatcggaaattaactttccaacttcacggctgggggctaggatcagtgcttattcaaccaaggcaggtcaaaggtccaagagccttatcctctgagaaaactcctccggtgacaaggctgggggctagggagagtgtacgactcaaacaaccgactaaagtcgtgaactgaggacacactcttacacacgatatccggagtaagaaatattttctaaagatagatttcttttctatttcacaaaatactccttacaattcttacacaagtctaaggctatattacactttcccctaagatatctatcacagggtacaaaggctaccaggaaggccaacgccagtccacagattagaagaccttctccgccaatggcgccatcgacttcaccaggtggtctatctctgccagagtcctccgagaacgagcaaaaccttcatggagaaaatcgatgtccagtcgcgggcgatgatctcataggcaggccaacacgtgccccccggcatatcggctcgatcgacgacactcctacttcaaggcttcgtcaatgcgcttgccgacgccctcgagctaagcataggccccgttcagccacgagatgtatctggccgccgactcctcgggatccccacgaggtactcggagctctctacagaccttggccatggacgtgcagcaactcttcaagtacgagttgaaccacacctcacgacctcggagcgtttccacagcttgctccttctttactgctagcattgttctctcaagttccgctacttcaaatttcgtcttccaatattggatacgacgatcttgcccagcaagagcactctcgagatatgctcaatgtgggaataactaagtcaagcttcacttctctttcaagaacacgactgatctaatcggaggagcaaaaagggataaagggaccactaacctaaggaagtcgtcgccatctctatccccgtgggtaggatctggtctacattgtccggcgacgcatgtggttcaaacgcaagagccggaatgatcgccaatgactcaggctgcccacgctgctggacatcctcgtcatcaacatctctacaagggacaaaaagtactcaagatcaaaatgcaagagaaagctagggtaatgactacacgcacaaaggcgatcgaaacccatcgaagttttacatagcacatctaaggagtacaagagatcctactcttcaaaaagggggagaacagattcccccaggtcgccgacttcttccatcacctccttacgcgtgccgctagccgccccctgatccaagatctcgcgcagatcgagtttaggatgcgccagcctcacacacgcaaggacatggcacgcctcggtgtagatcccgttggacgtctcctctccgatcctggccgcatgcttggagggaatctcctccatcgccgccgcgagctccgctagagaagatgtcagcgagaactcatcgggattcgccgggatggtagacttgatgccgcactacccggcgagctggtgcagaccagtataggtgacccgcaacgagccacggatttccgacaaattgttcccgagctttgacatgcggtgctcgagcccctgccattgtcgctcgttgccagccaccaactccctcatcttcttgaggtcttcacgagcttccgccaactcgtatgccagccggtcggcacgctcgtttgccgacgctgccgccgaccttgcctccgcaatctcgcgaccaatgccgcgagcaccagcttcgaggagacaccacatttcgacctggagctcctcccaggtgaggacgacagccggtggaccacgaccagccgcgggatcgctggctgggccgcttggtgtcacctcgcggctcccgggcgcaagcacgacatccgtcgaggctacagcgggagacgcaccggaagtccctccagactcatcctgcaccgccttcgcccgcgccgccctatgagacagctatggttcagacaacgctcggacaaaatcacgaaaacttaaattcacccacttacttctcgccaagtgtcacaagtcgctgttgacgtggaggtgggggagacgcgtccgaggcctggagaacagttgatgcgaagtaaggcgaaattgttctggctgtttgatcagacaacaagatagcttaccgagggggctgatgccttgcgacgatgtccgcttacagaggagaacttcctcccctttgctggaacattgccaccacttgtggtagcagcagcagcagcatcagacgcctccttggcgaccttctctttcaatgatgccaccacctgatggtccgcgagcggcccgatgatgtcagtcagaggaagagcctacgctttataaagtcacaaagcgatctcagaagaaaaacgcagaatgactactgagtacacttacattgatggcggcatcgcgttcggccgcccccttctcgcaaaggggaacgggaacattactcgccgtcgccgggccactgatcatcacctggccgacacgacgtcccacggcttcgttgctcagacctgtgaatcgagaaccaaatttcgatgagccaggaggagcgcgcacacaagcatatcaggataaatgcgagaaagataccccgaggagaaacccgggtcgcatcctccggtccagaatagtcaaaggctaggtgggcttgagcctggagtggctggattcgtctactaatgaagtcaacagcgacttcataccccgacaaaccacgcactcggagatcgtcgaccacatcgatgaacgactgaagagaaggggtcaaagggggttttgcggtccaagacgaaatcttgtctggttgttcctcaggaacaacgaagacaggatccgaatcttctatctgaagatagaacacctcgtctgccatttgctgcgagaggagggacactggaaggggatataacgcgattttaggccatcccgaagtcggaatccaacgcatccagataccctgttggattccatccaacgcaactcgtagtagaagcggaagagatcgagaaagggctctaccccaatgtaggcttcacaaagatgtgaaaaatactaaggctatagaattggggttcagatggagcaaagaaagaccatagaagtttaaaaccaagagaagaaattcagaaggtggagggagaaaaccgcagagaatgtagtcctcgatcacaaccatgcgacctaagatgggctggggttcagtacctcctgcttccctttccatggttccacgacccggaagggcgccgtcctcctgaagcttcttcagcgacacgctagtggaggatgatttgccgagatccatcgccgatcggagatcgccggagaaagggctgaggtcgacgaactagggtttcttgtgggagcggggaagacgaagaacgcttgcaggcgggaggttttcttcacaataggcgggcttcaaaatggatcccccaaaattcctttaaatagacgcactaccgacggtgcgaattccaaggaaaggagagagatagccgccggaaatttctgggtccgttacgcgcggcagtattttggacttcagtttaaattcactcgtgaccgttgggcttcacatggtgttctcgattacgtcctgtctccacggttctcgcaccgggaacaacaatagcctcgacacgagaagtcgcgaatggttacacgagttcatttaagcagaagtcgggggctactgtcagggttacgggttaggtataccctttaccctttgatatacgtcacatatcggtatggcatgcccacgcgcatacggatactctctacatacactaaggaaatccttcacggagtttacggacgaaaagagtcctactcggacaagactgggtcgtcaatgtatcgtgtagggtctgatgtctccgagttctacttggaaaccgcctgacctgcgatataaaagggacccccctggggaggacataaggcatcgaatcttagagccaacacaacccccacagcctacgaagtcgaagcctgcaggagccaaatcgtcgaggatctagtcgaaccaactcgactacgatctcgccggatccatcgagttccattgttccctttgtaacctgtgttttccatcatataatcccacatcaactggattagggctattacctatcaaggggcctgaaccagtataatcttcgtcttttgtttgcttgatgtcgtattatgtgaacccttataccaacgtaccccaataccctctatattcggtctacgggtatcacccatcaacagggtgggcattcggtctaaccgaaaattttagtctcggtcttcggtctttcggtcttttcggtctttgaaaagtgaagaccgaatttcagcgcaaaaatgttaggaccgacaaattcggtctcggtctcagtctcagtcctgaccgaaattcaacaacattttcatatatgcaaagaaataatggaaagtttcaacacaaaaatcacaaaaaaatttcgtaagcacttatgagtaaagactcttgttaggttgcatgcctagaagaagtagggatgtgaaaattagagtttaatcctattaaacatagtggattgtaggttgcatttagacgtttttttgataattctgtcttttcgatatattcggttaaccgaggatactaaccgaattgaccgaacaaaattcggtctttcactgcctaggaccgaattgatgaccgaatttctcggtctcgatcttttcggtctcggtctcggtcttttcagttcggtcttttggttcggtctttttctgcccatccctactcgtcggatcataatctgatgactttcgtggttgggaagtgccagaagtgacatttgaaaacaatttgtgtcaattataagatgtattttaattttaaatttccacctttgtagattttaatgatgaattagtcagataacaagtatatttatacattttttcattttattgattattagtgtgggtgtgggcacgagggagcgagggggagctttctaagaaattataatgtgcctattgcaaaattatcgcccttgaaaggtaggatagaaaaaacacacaagaattaaagttgtattttttaaaaaagtctatagtaaccaaaaacaccggaaatgagaagagaagaaattaactacaccacaggataattttttttctaaaaaaaatcaaaaggtcttatctcttgctttttttttggaatgtaatcctgtggaattagtccgtagaaatgcaattctatggaatatttacaatttctatatgaactaaaggggtctatagaaaaaaaaattagaaaattgaatcctctaaatattctaaaagtttctatgcagacaacataaaacatatattgtatacttggttcgttcagtccataaggtcgcatgctccatacattattgtaggactcatggaagttaaagagtggctgttttcaagacttgatcgtgttgttgactcaataatctccaacgcatagcttgaacattgttagttgtataaatattataccaatagatttacagtgtgcttttacacagcattagtactgctgtcatgaaaagtatgttttctgataaatccatggtcaaaagtttttctagctctagaaattcatggagttggggctgctgctagagtagagttattaaaatgtgacatttaattcatatcttagatcaaataaaagattgaaccattttaattcaatctacaaactctaatttctgcaagcctgcaagaattaatccaggagtttggccatgccaaacaagaatgaactttgttgtgttgtatagtgttaatttgtaaattgtattatgactacaaaagcattgtacagacggtatatatccaagtcactattacatataaaagcattgcaatatataaatgcttttttttttacaggcgatcgggcccatgcctttatttttacatgtctttagtcacagatgacatgatcggtcacctgttaaaacgtgttttggccgcctacgacaaccctatcgtagtagtaagagtataaaaggaattaagcgtatgcgaataatttctgtgcttttttttttatgacgggaatggtcctgaactcctgatccataagttttgagatgcatacaaacaaccatattactccaccacgcaagctgtcatctatggacaaatggtgaatacgtatgtatcttgatctcgtggaggttgagtcgacgtgacacttaccttgttcaatagttgatccatggtgtcgaattcacggcaccttctctttttcacattgtgacacaattttttcttttacaaaataactttatttattttctacccagaccacacataccaatataagtgaaaaaaatagaataccctctattttatcaaatccaatataattgtatcccattttatctagtccaatataattgcttttgaaagatgagttaatttaggataaataagatggtacaaaataaagttatttcggagagagagggagaagtaacctaatgcagatcctagctggagtaacattttttcttaactcctgaatgaagtagtgaatttgaagtagtgaatttttttctacctggcttactaggcgacggccggagatcgctgtctcctggcagattgaacttaattgcttggaggcaatgccgtcgagataagattttaacatgagccgcaggccggcatatatatagctgtgattatctacctgaccggcctgactctttcctactgtttctatcctgtatccacagatcgatataggtcgttttcagttcagctcatggcctagcttatcactataaacatcggtatcgtgttgccggcctagcaagtgtataattaatagtagtataagagttagtttggagcttatgattttttgaaacacagcataggaaaaacgtaatattcaagtgtatttggtacctcaaattttataaatgaaaaacaaagaaaagtattataaatgatcattaaaaaaataccactcttaactcgttactcatagctacaagctagaatactatacatgatcaaattgctttagcctccttccccatcttctctcccaactccaatgtcatatttccctctataaataccatcggcaagccactgaccgtcccgcctcctcaccttcctcctttaagttgcctcggagttggggacttggggcatgccggtcgctgtgtcggagttggaggagcctgactgccgcgccaaggctcaagaatgtcgcggcgatgtgggagtcgaaagaggccaccgttgtctgctcatccctccatcctgctgttgctcatgctccccaaccacgacggtggtgtgccgccacgtgcctctcctgctgcttgtgggcgcggaagaagtgttagagtttatatcgaatatgtgtacgtagtcggttacagtttaggacttggagttgtaaaaggtattaggactagagtatgagtcggactctatcctaggatccctcatagatagaggagcgtgcctgttataaccgcatggtgacttagcataaagagagggagcggttgtcggcatcgaccggccgtaagtcgttgtaactctgatacgctgtatatgctggatcggggaggagcgcccgtaatcagtgccccgaagatgtaggccacggctgaactccgttaccaaatatcgtgtctcggtgtcgtcatcgttttggatctcctatggcattttcttccgcgtttagctaccgatgtcgatttcggggctggttttataacaagtggtatcagagcctgcgggaggtccatggtagaggcgcgatggaggtgctccacaccgcgtagcctgctgtaatgcccagggaggggcattggcgcaaggtggagcacggcggcgatcaacggagtcttgatcggtggatcgaacacttctggcggcggccggaaccgtcgatggctgccttcaacaaggagatgactagacgtggtgctcgggttgatggcggcagaagcgattggcgatccaatcgatgggtcggacacttcgggcgggtggctcggactttccggtgagctactctcgacagggagacgtgcggccgcacgctcgggttgattgaagctggaggcgatcggcgttctcgatcggtggattcgaacactctgggcggggtggcccgggcctttcgaagagttgcgttcgacagggagatggctagacgtagcgctcgggtcgttcggcggctgggaagacggcatgcgacttgtcggcttcggctcgcgactagattgatggcgttcaatcggatgtcggagcgggtggatcctataggctgttttggaggtgttgacaggtatttccacactggaattgcttcaaaagcggcgtattagcggtggatggcagaactaagcgtagggcgtctagactagcatatgtgctagttccaaccctagagaggtctggttctactgtttctagcacagatcaagaaaatcacgatgacaacagatcagtggcactagtcattggtgtagtcggcaagtggtgtttggcagtggtgctaggttccgctggagatacgaagaagcccaggaggtcagggtcgcggcggtgtgcgcgttttgcgtcgaagccgagctggcggcggagatcagggtgatgccgagaaggagcgggctgagccaggacgtgcaaggttcggtggttgtcggattcgtgatgtagaggaagactcggccatggagttatctatgtgtcggtcacggcatggacacgaccgaagacaagctggatggataccgcgttcgacacaggagggagttggatacggattcgatttagactggaaatcggacacgtttttccccaataaaagcagcaaagggaccacgggattgtaacaacgcagtcgaaacaaatcatctagcagagggcgagattcgtacccgattttcgcagaggcaaaggtggtttgggcggcgaggtcacgggcggctggagacgcatcattgcaggcggcgcacggcggcgtggtactcggcggcgttcgtcgcagctcgggcaggagcttgcggcggcggcggcggcggttcccggcgaggaaccggcgccggacttcggtggcgggcgctcctaggtggtaggccggcggcttcccaaggcaggcgacgcggcggctcctcgcagggtcggcgcaagtgacggcggcgggaggcggcggcgccccaggcggtttctgaggcgggcggcgcagtgcttcttgcagggccgacggcgtgaggagcaggaggcggcggcgcatcgggaaaaagtggcgtgggcacggtttctaggaggagcgaggaagccaaaggaagaaggggaacagggtcgatctgtttttctttgactggtggttgaccaagtaaaagaaaccggtccggttttttggagagagaaaaaaaactggttcggtccagctggtactattcgagttagtcggtgggatcaattaatcagggcagatcaatttaacagggcaacagctgttgagttgattatcgttgatggcggcgacggtggtttccaaatttgaggtggtgaagttcgatggcaccgggaatttcgttctctggcagatgaggctgaaggatctgttggctcaacaggggatatccaaggctcttgaggagacgatgccggaaaagatggatgctggcaagtgggaggagatgaaggcgcaggcagctgcaacaatacgcttgagtctctcggattctgtcatgtatcaggtcatggatgaaaaatcactgaaggaaatttgggacaagttggcaagcctgtatatgtccaagtcgctgatgagtaagttgtatctcaaacaacagctatatggtttacagatgcaagaggagtcagatcttaggaagcacgtggacgtcttcaatcagttggttgtggatctaagtaagttagatgtgaaactggatgatgaagacaaggccataattcttctgtgctcgcttccaccgtcttatgaacatgtggtgactaccctgacgcacggcaaggatactgtcaaaactgatgagataatttcgtcgttgcttgcacgagacttgagaagatcaaagaaaaacgaggcaatggaggcttctcaggctgagagtttgctggtcagggcaaagcatgatcatgaagcgggggtgtcaaagagcaaggagaagagggcacggtgctataagtgtcatgagtttggacatataaggaggaattgcctgttactgaagaagaggaaaggtggcattgcaagtttagcagctcgtggtgatgattcagatagcagcagtcatgagattctcacagtgtctaacgagaagtctggagaagcgtggatgttggacttagctagttcctatcatgtgacatcgaagcgggagtggttctcttcatacaaatctggtgattttggtgttgtttacttaggcgatgacacgagttatcgtgttgttggagtgggcgatgtcaagttcaagatgtatgatggaaacgaggtgctactttcaaatgtgagacacgtgccgggactaaggaagagtttgatttcgcttgggagcctacatgagacgggttggttgtatcaggtggattctaataggaagaccatgaatatcatgaaggacggcaagactgttatgactggtgagaggacaagttcatgtttgtacaagttacaagggagtgctgttgcaggtggagtcatggaagatgggtatgctggtgttgttgtgcacgatcctgaaggcggcaagcctggcgtaggctagtcgagcggctcggtgtgagctgcggcagaaccaactcaagtcctggtacacggaggttcgagcaagtaacagattcaagttggtgtggcatattcgccaaggtagagtttgttagagtttgcgtcgaatatgtgtacgtagtcggttaaagtttaggacttggagttgtaaaagatattaggactagagtatgagtcggactctatcctaggatccctcataaatagaggggcgtgcctattgtaaccgcatggagacttagtatagcgagagggagcggctgccggcatcgaccggccgtgagtcattgtaactatgatacgctgtatatgctggatcggggaggagcgcccgtaatcagtgctccggagatgtaggctacggctgaactccgttaccaaatatcgtgtctcggtgtcgtcatcgttttgaatctcctatagtattttcttccgcgtttagctaccaatgtcgatttcggggctgattttataacaagaagtgagatgtcgccacgggacaggagcgcgatggtgtagacgtggctggactagctgtcggtgaggaggtgggagccgtgttgcgccatgaccgcgtggggacaggcagcgaccgcgtgggcgcccgcaacaggaggatggagcaggcacccgtgatatatatacgtgggatgcgacgacgaaaggcccgcaaccgtcaccgtggcaggccacgaggatgagttcgtcgtcaccatacagttctaaatggagtagtattataacgtctagccacacgttaaaaagtgatattttatcaaaatccatctgcacagtggctttcgagcgatactcacttgtgacaataaaacaatgtcaggcccttcacagtgggaggacgtggccagttccttcagatttccagctcggataatcatctacacgttgacaaaacgcgtgcctctgctcagatgctcgggccttagttgggaagcgagttccttcgcctgcaggcaaggacgcgcggcgcaggagacgtctcacgcgtccgcgttactgagagcgtgcccccgcatatgtttccttcgcctcgcgtgcggcagatattctagccatcaaaaagagatcacgagcgttgtggactgcatggcttatgcgttgctgtacagatgactttggactgatttcactgtacggatgagctaaagccacgttatgcgttgcttgcactggtactgccctcagatttgagacaagggatgaaaggaatattcaaattggcggcttaaaggcctctcacagtgctccatgctggaccggtgctatgggcagccacgtaggaattgggcttgcgtggagctagggcgtgcgcccatggtgagcacctcgcacccaaactgaggcacgcggtaccttctctcgcgaggcccggtagcggctgcttttccgcactgtggagctcgtgccctcgcgcctcccgtgcccttgcgccggcaactaatctacacaaatcgcggcaacaaaagcggcaacaaatcgggcggcgcggtcgacggcgaggcgaggcgcacgacggcggcatccccgacgtgccgccgcagcatgggaggcgaggaggtgcgacggcgtgggaggaaccgctggccgcaagcaccatcgtctcagccttctggatccaccgccgcgtccccaacctccttcgccgcgtccccagcctacttcgctgccgccgccgtgaggagaggggagaggagaggccaccggcggggagaagggagaagccgccggcggggagaggggagaggagaggccaccggcggggagaaaggagaagccgccggcggggagaggggaaatgcagtgtcgtcgaggagaggaggggacagccggtggagttggaagagggtgaggggcgtggtgactgagggaggtgggggattcggtgaagtagtatctgtgggtcccacaccggtgcttgccctgtagagaaagtttccttgtagctttttatcctatgtgtcatcctggtgggtgcttgcactgtgaaggcctcgtaatctggaggttgcacatggccacatggatagatcgaagagggaaattttgctccctttattgaactgtttgtagatgatatggcaacatctaaaatttaatgagatctccaattaaatttgctgttacgtcgactaatcaacatactgattgcgtcaacgccacaccaaatgacaaagctattatctgggaatataaaaaaacaacaataatccagccgttgagttcgccatcgccggcggccgccggcggaatcacctgctcgagcacaccgcctgcgtcacggccccggacgcgaacgcccggagattcctctccgacgacccgccggccgcgaccgcctccgcggcgcgctccctccatcgctccgcccgtgcccggacaccgccgtctccgccgcccgccatggcgagctccacgcaccgctgcagctcgccgcgctcgaccacgccctcgccgtccagccgcgcgcgcacgccggcgcccatgcgcgcctcgaccagccacgccaccgtcggctggtccgtccactgcggcacggccaccatcggcacgccgcgggtgatgctctccagcgccgagttccacccgcagtgcgtcacgaagcagcccacagccgggtgcgagagcaccttcatctggtcgcaccactccaccaccatcccttgcgcgtccccttcgccgccgccgccgccggcatcggcggcgggggtgggtgcgctgtccaaggtcgcgccgccatcgacggcgccctggcgcgccacccacaggtacggccggccggtggcctcaaggccgcgcctcatctcctcctcctgccgcttgctcatcgacaggagggtcccgaacgagacgtacaccacggagcgcgccggcttcgtgtccagccaatccacgcacgcgctcgcgtcgtctcgccggaacatgtccgtgctcgagctcgacagagacgcttcgccgtcgggcaccaccggcccgacggcgacgacctccagatcgggcacggcgcggagcgcgtcgggctccagcgcgtcgaacgtgttcaccagcaccctgggcttgagctcgtcgagatcctcgaacaggtcgcgcagcatggcgagcagcaggtagtgcttgtgctccggcgagacgatggacacggcggaggggagctcgtcggacctgaggaacggcatcccggggaggcgcacgacggcgccgcgggcagggtcgttcgcgcaggaggcgagggcctcgccatggccatggaagtagtggtagtacacggcgaacgccgccgccggctggatccagtagatcgccgaggggatccccagcgcgcgcgccacggcgggggcccaaaccacgaggaacgtgtacacgatgcacgtcaccgggcgccccctcgccgcgagagccgcgacgatggcggagagcgactcggtgcccgcggcgcgggtgcgcgccatgtagtcgtccctcgcgtgcaccccgggcttgtacccgtcgtcgtagccgtcggagtgcgggacgtacgcgacgccggtgtcgtcgacgtcctcgccggccggggacggcagggacgggaacatgaggcggtgcgcggagacggcggtggagaaggtgacgcgcgcggccggcgccgacgccatcaggcgcgcggcgaggcggcgcgccgggttgatgtggccctgtatcccgctcaccacgaagaggaagtgcggcgccggaggagggctcttctccattgccattgggatttctgatcagagcagctttgcaaagcaactgatactagcaagggctacctcaatttatatggtttggaaatggaaatggctgaatattaattgctcttgctgatgataaatccgaagctcctttgaaccctttcttttttgcctggcttttggctaaggatcgcctcccaacaaaacgcaacttgcacaggaaaaccatagtgccgaccccaacctgtgatctttgcaattctgccgatgaaacagctcttcacctctgcttccagtgcccctttgctgtggccttctggggcacgctgaatatgcaggttaatgacgcgacgttagctgagcttgcttctcttcccacaccgattcgagttccctccaagcactttttgggtattctacttgcaatgcttttggaacccgtggaatcaccaccactgggttgtcttcaggcacgaagcccctctttgcgtcgattattagtgctgtgtattgaagatgcgtccctctggagcgaaagactcaaattagaggatcggcatgtaatttcgtcctggaagaccttttttcttgagtaaagtgcacgggtggtccttaaacttgtagcggtgtgtcatataggttctaaactcttaaaatgcatatccaagtcccagaattttttatagtgtgtcatctagatcccaaatcgccacaaccccttcaggatcctacgtggcgttgatgtggcatgccacacggaatgacgtggcatcattttgactgaaaaatgggtcccatttaaaatttttcctttttcttttttcttctattttttccctttcttctcctttctctgtgactcgagcagaagaaaggaaaaaacgaagaatgagaagaaaacgaagaaaaagaaaataagaaaaaaaaagaaaatgacacgtcacgtccatgtggcatgtcatatcagcgccacataggatcctagaggggatgtgttgatttgggacctatatgatacactttgacaggttctgggacttggatatgtgttttgagagtttagggacctatatgacacaacccaacaaatttaagaaccaccaatacactttactcttttttcttcctccctctgctctctgaaagtgtaatgccctgaatttgtagttctctaaactggacctttgcccactcttaatgaattcaggtggggaacttctccccccccccccccccacccccagtgaatttttttttataaaaagagagtaaatttcataaaactccatctattatggtccaaatttcatggaataaagttattttggcacgtgacatataaccctaagtgttatgttcgtaaagtttcaggaaaccatgccattaaccaaattgtggcacactctcaaagaaaattaaaaagttttacttacattgatataacatttatattatggataaacaacttacaaatttgagacgtgattgtagaacttaagagtttgatagatcaaattcaaaaagatcactagtgtggtttcgtgaaattttatagtaataatatctgaggttatatgtcatgtctcgaaacccctgaggttatatgtcatgtctcgaaacccctgtgattttactgcaatttagaccacaatacctgggttaggtgaattgagtttaaaaaaagatcctcattcctggtgtgttttgttaattcagttcttttgagttttgatcagtcacaatatgcttttgagggtttttttaatccgttgcctagtcgccgttaagcactgctgggctgtcagatttttgggccaattcgtcctttatcatcagttctccaaccatgatggccgacatccactgctcagtaagcacaatgtcgtactccttgtggagtactcattacataaaaaacaaatctagtaccggatataatatattctagtacgatgaatctaggtagatgtatatccagatttatagtattagaatgtgttatatccggtactaggttggttttttatgggatggagtgagtactccctcaaatctagaactagatgtgatatgttatagtacaatgaatctaaacagaggtgtctagattcatagtactaagttgtgtatttatattattaggttggtttttttatggtacggagagagtacttcactacgaagaaagcaaccatgcggagtagtggagccttcatgtaatcatgtagcgtatttgaacttcgaactgaatcctctttggattactagtcgacagcaactacaaaactaatactaccacagaagtaaaatcttagagatacaaatatttttttggccggctagctaataagaaatggagcagttttggccggctagctattaagaagtggaggtcatactcttaatacttcatccgtttcacagtgtaagttattctaacattttatacattcataatgatgttaatgaatcatactagaatatggatatgggaaatactagaatgacttacattgtgaaacggagagagtagttactaatacagagcaatcggcaatcacaatgtagtgtagatttgtttccccatcaaaattgtagtcctctctaagttgaactcacattgtaacataaggattattgtgtatatccagtggattttcctacgtaatcttacatagagttgtgtttatttcacgtcaaaatttaaaatttggttgaaattgtaacgatgtgacggaaaagttagaagtttgtgtgtaggaaagttttgatgtgatggaaaagttagaagtttgaagaaaaactttgaaactaaacagagccctagatgtaaaattggatttgatatatcactgttagcttttgttttgcaatagattttaaaatccaaattggattccatatataaccgtcatcctctatctcaatagatagagttgtaatatacaatagattttaaaaataaaattggtttttttacaacatacgtataaactagacctaccacgatataacaatacaaaaatttcatttttcttttattattaatgcagtaattcccaagtttttagaacgggcgtggtcgccgtggtggcacatttttaactatcttaataatttaatagataatacataaataaaaacagacaaacataacctcaaagcatggcgcgcataaagcgacctgctaggaaggcagctatcctccagagcaaaacctgatacttctgcttaaacagccaaatccgtacagtagttttctccacaagttatcgtagtgtgactgtatgaagtatcagactatcagtggcagaaacataattatcgttttgataattagcgattcctttagggagagaacaaaaatacagggcgccatacaattctactactcagtgcaatacaattcattgcatcttcttcctgacttcctgtagaacagaaactaccagcatttttttagctattaccatacatctcagttttttatcgatgtaaaacttctcctgaatcagtaatgggctgcaataattatctcccatataacccaacaacaaacatgtccaatcgaagctacaaattggaatgagctaaaatattaaactcattccttgtggtctctgaccttctttctcttccatttgagaaagatttgtaaagagagaccagaaaagaccatcacaacacttccccattgcttcaaggagagtgggttaccactgatgacggaggagatgacaatgctcatgaacttgcgggtggtggtgatggtagtgttagtaagagagccaaatcggctgatggttaggaagatgaaattctgacccacggcaccacacaggcagaacaggagaatgtcccatgccacctctgggttctcctggcaaaatctcactgcctcaaaaccgttggcgtaaggccaattactgaatagtaatggagcaacaaacataatcacagcattgtatatggtcccccagagattcatgccaagcattatatcccatggattagtctttggatacctgcaataacacgacattactttccatgtagataagaagatgataaaatttccagaatgctttaatatggaatggacagggtgtagttacctagactttatcaaatcttgggtcgaattggtgtaaccatcaaaagctaagttgaggaagcacaatgtgtagcccagaggcgcattagggttagcaagcttcttgatagtcttggagcttgtctgatacataggaaacaaacataatactcagaaatgaaaacacagttaacatcagcacatcacacataaaattttattaggccatctacagcttctaataacattagaggtgcagattcctagttatagtgactttgatgtggctgttttctcttctaatttgtattcatcataatacaaatgactgtaaggaacaaaacatattcttttctactttcatactacggagtgaaacagtgccaaaatgtttctgcttttgctttaggctcgtgggatattggtgaataattgaaatagattaaatctttaccttcaacaacgcaaaggatgatacacccccagcaacaagaaaggtgcaaatgtactccggaaatgtgtacttgacaccatacagtatagttcccatcagcattactgtacatattaaatcattggtcagagatatgcgcacatcactatacagactatgaaacatgaaagggctactgttaaaagttattcttaacactgattgctctattacctacaccactctgaccaccaaatatcagcactaatggaaatgctcttgtcatgaaattgatatggttttgacaaaaaaaatgcaagtattgtcgtactaacagctaaagcagccaatattgtggtgccaaaccaaaatccaattttccagtgtacttttttttttacacagaaactgctcagatgagtatacccacccaagctcaaattaatgatcagaagaactattcagatgtagataatgttctgtaaggtacattacatagcatgcatagatcaatgcaactcacctggaatcatcttagaagattttgccaggacctgttaacatagagcaaataattccttagcggtaatgtgctatttaatcaaatcagcatatattattacggcacaaaaatgagacacaaaaatgatattcagaaaacacaggcttgttgcgactgttccaataagttcaaaagataaatcaaattacattgcgcttgagccaaacacattttgatgtataactgtacattggatggttcaaagttcaatcaaaaagtttgatgaggaaatatggttctgtcttcacccatccatgcgatacagcgataagagtatcatggataatcatattttggcatttgtgcataatactcatggcataaatgttttctacgtataaaaattgctaataaacaaatgatctaaacattgtttatatgttcagatatttctgaatcagcccataagccgtctgacttggtcagaccgaaccaaattcaaaactccaagtatatcagaaccagagagtctgaattcgtaatttcactcaaccaaacttaattttcttctccaataatcactcacacatcataaattctccaaatgaccgtatctatcgcatcaatcaaggcaaaaataaggctatagaacattccaaccactgatttacttagcacagttgaacaatccaaaaatagaacattccacttcgcaggcattatactactgcgttgcctatcacccataacgaaaatggaaacatctaattacagatacaatagctgcacaaaaatgcatagagcaacaaagcaagcgaagcgagacgacaaaagggcagctgcaaccaaacctgagctgggtagctgatgaacttgagcgcctcgatccccatggccgggccgacagtgttggtgatgctgacgccccagtacttccgcagcggcgcgcggccagcggaggagctcccaccactcgaccacagcttgatcactgcgcgagcaaaaccagtgtcacaaactcctcacacgatccgcattctgcgcaatggcatgcgatgcgaccgcactggattccacacgacaggggcaggggatgagagagggaggagaggaggctcacttatgaaggaccagacgaagcagacgacgttctgcgcgaagttgaggaacgcgaggtggtcgaaccgccgcgcctccggcccgaaccgcttcgtcgacctgaacgaacggcggggagagaaaacggcgaacaattttcagaaactcgccgaagcagagcccaattcccctccgctcccgagcaccattagagagagagagagagagagggagggagggagggaggcgggcgcttacagggtttcctggaggacgccctgggtgatgtacgccgaccagatcccggcgacgcagaatgcgagcacggccacgcgcgacaccatgctccctccgccgccgtcgacgacgcgggggcggggagggcctctgcctccgcggcccttgcgcgcggtgaccatggcgcggttcggttcggtcggtgcgccgccggcgaggggggagggagatcggtgccgcggggaggaaggcggaggcgcgtgttatagaagcgggggcgcaactggggagaaggagaaggggtcgcgcgcgtcagaggggtgacgtggcgtgatgcgattggggagatgtgccacgggagacagcttattggttgggttggcgtggccgcgtggcgggggaagggaagggaaagagatccgagcgtgctgtttccgtttggtgtttcatgggccgttctcttttggattaagtccaatttgactcccttaactagtggatgagtctaattcatatccctgaactacaacaccggatatcataaccctctaactattaaaaccggtgcaatttagctctcttgacggttttgcagagcgatttcgctgatgtggcgcctacgtgacggtgttgaactggtctttatacaacgtggtgttgacgtgtcacttatgtagcattagaattaaaaaaatatatgggtcctatttgtcattcacacaaaaaaaattgtgggatccaccgccatgtaggtccacatgacatgtgccaaccactgcgcgggccatggccgtgccaacgacgggctactcctctcgccgacctccatggacctcatcgccaacacctcctcctccactccgtcgtccctgacctatcgttgccatccccgaccacctcctctctgccctcgatccctcctccctactcaacaccttcgcctcttacccggtcctctcccccttcgacttctcctccgctacgctcttcttgggcctcgccgcatcccgcatcgagcaaattcaaagaggttatccgcctcctccacctagggatgacaattttacccatgggtccaggtatccacagatacccgacccgatgggcatgggtgtgagtgtgactttttacccatgggtacgcccacccgatacccgaagacgtcatgggcaacaggcgggtttcattttttacccatgggtaacccatgcccgacccgatacatatgtattagctaattttgactcatttcttaattcttataccctttctattggttcatttgtaatgctaactgatactaagttgtgatgtaattcaaattattgttggtaaccaataatttcgtaaattattgattttatttttctttcttaaattatatatattttaagttattatttatatgagatccattgggtacccgccggacatacccgcgcccaccgggcatgggtacgggcacggagttttgcacgctaactctagtgggtagggtttggacaggcaatattaggcatcaggtcgggcatggttttgctctacccgtgcccgacccgacccattgccatccctacctccaccgacacctccttgccgaggagctccgccgccacccgctcctcccattcgacgccaccgctccgggcctcggcgacggcggcgtgcaggcgaggggagctgggacttgggttgtgctttatcaggccggcctaaggcacgacggcccgacatgctagaaagcacggtctgacacggcccgtaaatgggctaggccgtacttgggctggcacggcacgcgaatggcccgtaggcacgatgatggcccgatggcccatggcacgatattggcccatcaggaatggctgctagcctgctagggcgcatgcgcatcgggccatcagcagaaaatctgagtggcactacagctccggaccccggcagcaagacgctcagacctccgaaaatgcttaggatcatatgttcgacgcaaccaataaaaaccggacggataaactactacctccctattcactccacaaatacatacatgttgtaatggtcttcaaaataatttttctcatgaactacttatccaatctacgatatgatcacaccattatatttgttataattaaatctttataacaaggtatcacatcattacattccgatgaaaaaaaaacatatgtttcaatccgttaaatttaatgtttcagatgcggtagcaatatgtttcaacgtgtgtttttgttatgtttcataaaaaaaatttaaatatttcaacaactgattttttttcactatatataactcaatgtttcaacaattgattttttgtttcaccaatatataactcatgtccctactctctctctctcgccatctattggctttctcccacaccatgcatgaatcatgatgcaagtatttagtgatattaaaatatttttccttctaaactacttatccgatgaacgattcgatcacaccgttgaattcattataattaaatctttacaacaagatatcacatgattatattctgatgaaagaaaaatatatgttttgacaataaaagcttaatgcttcatacgtgatagttatatctttcaccatgtgttcttattgtgtttcacaaaatttcaatatgtttcataggctcatttttctgtttcaccacgtataatttaatgttgcaccaacggtcaactgaaacatttgaccgtccgatttttttttacatcggacgtctgatttatagctctctcctcgtacctcagaggatctcctgcaaggatgcgatggtgtccggcgattcccttccgcattggcgcaatgaatggaggcggccggccgaagagacacagccgtggcgccgcgcagacgcagtcaagtgacgccgcccggccgaatggacgcaatcgagtactggggatggggacggcggacggccaaacggacacatcctgccatctaccactggacaaacgctcgacctagtattagggactaggtagtagatgcgtgtgtgcctgtgattcccttgcagccttgctctgctgctcctgcgccctgcctttgcctgcccgcatgtggcatgccatcgccattcgccgtaagcgtttgctattatggccccaatttcatattttgtatgtggtcacatgcacgctgtagctgataatacatgtttgcatgttgctgttttaacttgtgcagatgtgcacgtgcagccgcggagaaaaggcgcctgccttggattgagatggagatgggacgcctggcaacagagaatatgggcatggctaatggtgattggatgtgcctccgtggagcctgcaggcagcacgtgtattgtgtggtgtgtcatgtgtgtgtaagtgcaacgagaaataactagctcatgagggcaatttgttctataaattcctcctcctcctcttcttcccaacacaaaaaaatgcagcacaaaataaacagagcaacatagttatttccctcccacagcaaaaatgtggggtgatactcgtcggaggtcgacctcgtcgagacccccgcaaagacgccgccaatgctcgcctagtcttgaccataggtcggtcgatgcccaccaactatccccgggtatggacgactacaggatggatgaccgccatatggatggtttggagggagatggggatgatcctacggaacagcccatccctaaggccaacgatgacacagtcttgcccatgccgggaagcgaggccgagccatccgcaccatctacagagagagcggagtgttggcggcacttcgaaaaaatcagggtaatggtggactacaacattgtggaaaaactttgtctgcatcttctagttcaggaacaggacatctcaaacggtattatttgacgcacctcaaggataaagcaccggcaggagcaaggcaaacacagctgagcttcggacccgacggttctgtaagtacatggacttatgagccacaactagctcgagatgaaattgctcgttacatagtttcggaggacctaccgattaggatgggcgaaaggaaaaattttgagaggatgatccgaaatgctttttgtccacagtacacccaggtttcaaggaaaaccaccaagaactttattgtttcattatatcgttctaggttggatgagttgaaacgcttgttcagtattgttagcttttcttttgttgtgacatctgacatttagacatccaagcaccaaagaacctcttctgttagtgttgttgtgcattatcttgacaataatcgcacactaaataagagggttatagggttttaaatgatgtcgtcacatactagacgagccattgctgccacactactagatatactacaagaattcaatttacaatctagggtggtttctattactcttgacaatgcatcagcaaatacaatgggcatgacgattttggagccaaatctgcaaagctacattggaggttatgttatccatcaaagatgcatttgccacatcatcaacttgattgtgcaagcaggtattactagtcgttgagaatttattgaaattcattttttagtgcaaataatttatcaattttaatgcatatgtgacaaggaatttattatctatgtaggatttactgttattaccaatttacacaacaagatccgtcaagctgtttctatcatcgagggtcagtcagtgatgaaggagagattccgggactattgtcgagcaaaggataaacctgtgaggatgtttggcattgatgtgaaacatcggtggaacacaacatacctcatgctgcgtcaattgaaagggtatgaggaaataatttctgttttcattaattcattgcactttagaagtaatgataccgatgaggatggtgattgtgagattttgcttcttactgaggaagaatgggacatagcaacatgtctatgtatattcctaaagcctttttataaagctatagtcctactatctaggatttactatcctacttcttgtttggtgcttgaatgtctttggaaatcgtcccttatatttcaagaaaaccgacatgatagagttttagcttctgctgttcaaccaatgaaggaaaatttctcaaatacttcactactattccacacctttattgttttgctttggtacttgatcctcgtaaaaagttggaggtcgtggaggctgctttcatatcaataggtgatgcagtgggtcttgattattctgaagcttatcaacatgctagagatgagttgttcagggttttccgtatgtaccaaactaagctaagtgttgttcgttgggtgcctgaggaaaccccacaaaaaaagtaaagcaaatcaagtgcaatgaatttgtggaagaagatcaagggcaaggaacaagcttcctcatcaggtagcaggtcaaattggaacccagatgcggagcttaaccattacctcaacaccaatcgcacagaacatgatcgaacactagatggtgaaaatgttgatctgtttgagtggtggaaagagaaagaaaggactcttcctgtgctagctcactttgcacgggacgttctattggttctggcttcctgtgtctcttcagagcatgcattagtgaggttggaagaattatcgaagaatggaggtcatgccttgcacctgacatagttgaggcaatcttttgccttaaagacttgattgaagcatatgcaaggacgcaacaccggctagaggatccagagattgccgatgcagcggcagacgcgttggcggaatttggcatatccactgattgcggcggtgctaatcaaaattagtaatgtaatttatgtaataatgtaagcaagttgttatactatttttcttaccggggaaccctactctagggtgtaaggtttttaacgaagcaacaactttgcatccctattctgaataaatttgttttccctcaatttttacatctcaggttatttgcattcggtgtgagaacaaaaatacaatacatatttttagacgaggtaataaagtattgcagagccatctgggcgaaaaaaaagaagagtgtgaccatattgttttccctactcccaaaaattccctcctcttttcagatttccatcccaaaatttccctcctctatttcatattacaggctgctacagcagtgcagcatgaggtcattagccatcgctaagggtgcaagcggctacccacaaaacccacttataaactaaactaacccgcgaacttgtttatttcgacctataagtgggttcgcgggtgacccacttcacccatcacccatccacggtcaaaacttcccatgcaggcatgcagctagccgctagcaggtagcagcaagtagcagctcttcttcatcgcctcatcggtggcaggtagcagcaaccagcaagccagcaccagcagttggcaagattgttcgctgactgacgcggccacgtcgccgcgacgagccgacgaggaggagcagggtgcgcgtggccgtcactgccgcgtcgccgcgacgggacgacgaagccgcacgccaccactgccgcctacctgcgcccatcgccatcactgccgccgccggagtttcttctcagcgcagccggcctgctccctttcttttgggctgtgcttgtgccggcccggcacgaataggcccatcgggccattgggccgtgcttgggctgcgtccctgaagaggccgtgctagcacggcacgacacgacgagtgggccg

SEQ ID NO: 4859 - DNA, 2444 bp, Oryza sativa
  unsure (1)..(2444): unsure at all n locations
gagggggagaaatgacgataacatgtggggcccacgtgtcggtgggtcccacatttttttttgaatgacatgggggtcccacaatttttttaactctaatgccacgtaagcgacacgtcgacgacacgtgggctgaagagcgggtcaacattgccacgtaggcgccacatcagccaaanccgcttccaaccccaccaaaggatatagtttgcatcggttttgatagttggaggagtctatatacctggttttgtggttcgaggatatgaatcatactagttgagggagtcaaagtataatttttcctttttttttcccaccgggccacggcgcccatgggccaggcccaggcgaggcatcctattccgtgacgtggataaatttctttttcgtctcccctgatcgcttctttccccatcgagagttcgccagaaggaagaaacctaaccctaagattgcgattcggcggcagcgacgaggcgcgggcggagatgaggaggcccaccatagaagagaaactggcgacctactccatgttccaggttcgtcagggatccaccgtcccgatcaccgcgcgggagtggctggactctgtgatggctggagttggctcgatctctctggcggtgcggggtgctggctcgatctcggcggcggcaggagcgggagatggggcttgctcgagctcagtggcggtggcggggactggctcgatctcggcggcgggagcggcagatgggccttcctcaagctcagtggcggtggcggggactggcttgatctcggcggcgggagcggcagatggggcttgctcgagctcagtggcggtggcggggactggctcgatctcggcggcgcgagcgggagatgggcctttctcgagctcagtggcgggggcgggggctggctccatctcggcgacggcgggagcgggacatggagctgggtcgagctcagttgcggcggcggggtcaggcgaagccccggcgaggaggaagaggacgcctgggagatggaggaggatccctcgcacgctacctcatccttgcctgagaaagaggcccatgacatgggaggagcttctcgcggacagcttggacatgagcgatgaggttcactgcttcagagaggaggataagcccgctttccgcaagtccaaggcgcagatggccaggttctatcagaggatgatcgacatcgagaataacaagatcaaacaaatcttccgaccccgcgtcccatccgatacacagtatgttaaaccccttcttctttctttcttttttttttctcatgggtatgtcaactacaccactaagaaaacatcatacaaatagaactttcctttcgtagatcctaacacacgtgaaatagcacacccattatattcctcattacaaagttcatgtgaaaaactatcattgtttttatcacttataaaacagtagtgaccgcaaacaagacatcgataattcagcttagaatagatctcctaaggacacaaggaagaggtggagacagaaaagccaaagttacttaatttggagacgaattctgtacaatcctttaaatgggtaaactgacattacaacttgcaaccattttaattaataagaaatgtggattttttaagctgcatttccattcttggtcactgaaacagttaaattataaaacttcagttgattcatttagctagtggtaagagatagaacatattaacaattgaactcttgtatatgcaacggatgtaatagttgaagtacgctatcgtcatagtattttaactcatcagatgcatcatgttcctgtgcaaacataggtggccatcttttatacagtctagcaactctttggtacttggccaaccttcacaaaaggtgcttgcatttataaattgaacaatcaaaggtcagatatgcgacagcaacagtgaatctgaaagaatgtcaggtactaacttctagagttagtttgaccatctcagcatcccaggatcaaataaaaattttaaggatggtttaagaatgtgcagtccaacttaggagttgccattagtcaattctctgagtttgaaaacaacactaaaatctgagctaattttaaaggaatgatccatcctgtgtgctgcactaatattcaataattatgttccaatctggatggcagacacaatctggatgggcttgaccaaggtttcatgcatgttgggtaatgaatattcccggggacaaaattaagcttgggtatgggtattcactattgatgcccgccatgcccaattgtcatccctatctatattcctgacaaaattaagtgaatacctaaaattggttttgtccaacacactgttgaatctattactcttttgaatatattgcagcgagcaacatttgaccgcagaagagatggaggcagagttcgctggcaagaaagtttcttcc

SEQ ID NO: 4860 - DNA, 5064 bp, Oryza sativa
  unsure (1)..(5064): unsure at all n locations
atgatggccaacctgcaccgcgacagcgtcccccaagccggcaagtatacacggtttagacgtttagttatttgttgtaaccttgatgttacaaggtagtcactgccattcgtgtgattggaatgccgttttgtttgggaaatttgagagccatcgggtgagaatacgaaaaacaagctaaattctacttattcttagggcctgtttgggggagtttttagctactgcagcttctcccagaatcagaagctcccctaaacagtctagcttttggtctaaattataagaagctgtagttgtagaatccagaaaataaaaagctagaagctgggaaacccagttttttcagattcttagaagctggcaaccagccagctgtttctcagaatcttaagctccctcaaacagacccctagttcatttttcagattctacaactacagattttcagaatctgggtaaaaaactggactgtttgagggagtttttggcaactggagattctaggagaagttgcagctactagaagctcctccaaacagacccttagaatctagatgaaaagctagattgtttgaagagccgaagatgaaattgcagttacaagaagctcccttaaacatggcctgattggctgattatgttgtcaattatcaaaactgtcagctcctcgccatcaggcttccaaaacctgctagtgactggctgtagcctgtagcaactagcaaccggtttgtggtaagtgcataaaaaatcgttgaatgctcgcatggtttgatggtttgaatgctcgcattaagattcatgtgactgcaagccaaaaatctcaccaattcacggccagatcgatcgcgatcgagtgagcgcagaagtttgacactagctccggtcattcacgcacgtgggttttcgcggttgcttccttgctgttgaacatttttttttctcttttgtaactaatagctgttgaacagttatgttgctagcaaccttagctcgcagagaaaaaatgcgtacggtagcaactaactgacaacatactgtcattcgtgctcctttcctgttactactccctccgtcccggattttgagtttttccatactacgtttcaccactcgtcttattcaattttattttgcaaatataaaaaacgaaaagttgtgcttaaagtactgtagataataaagtaagtcacgaataaaataaataataattttaaatttttttaaataagacaagtggtcaaacgttgcaagtaaaaactcaaaatctctcatattatggtatatatattatggtacagggagtactaaacattaacgacgactagttgatccaaattaaatatatattttttgatggttcagcaatactaaggctgtgtttagatccaaagtttggatccaaacttcagtcattttccatcacatcaacctgtcatacacacacaacttttcagtcacatcatctccaatttcagtccttttccaaactttacaacgatctaaacacagcctaactaacaaaaccgttgactcaccaatcgccacacacattgtcgacaagtacaagcgccgtacgcaattaaaccctacctatgtaaagagctcgccgcgagcgctgcatcttgcaaacacacatgcatacatctctcgatccatcgatcgaatcgatcagcttccttctgatctccttcattcccgccatggagagttcgtctcgatctccctgcatttgcaagctgctggcgatgctgatgcttcacgtngtnctgctcgctcctncgctggtccaagctcggccgctcgcgctctgacatggacatcgtctgctggagtcgtcgccgccggttataatgctgccgaccgacgacggcgaggccgtggccgccgcctcgccgggactggatgtgccgggacagctgggacgatccggcggggcgccgccgccgcctcagtcaaatcggccggggacaccgctggccgggggttacagcggcgtgtctggggggagggcgcccaccaatactccgccgtcgcctcaaccgggtgggtcgacgaagccgctctccgacgacgacgggaagccgccgctggggatcgctccgccgtcgccgcagggaaacaagccgcctatcacgtctccacgtcttcgaacaagcacggatcccccgctccggccgccggcgccggcggatgatgccgccggtttgctccgcctgatccgcgacgccgtcgaatacgtgatcggcgaactcgaagcctgatcgatcgagaccgaggaagaagatgaagttatataaactgtaccattaattaccaactgtatgaatatatgtctagcttaagtagacgagcacatgtgtatatttattttgcatgcatgttaatttcgtcactagctaagtaggctagcatatatatctatcgatcctcatggtagtatttcgaccttaattaacatgtatcttttcgatgtttcaataagtctgaaattctgaatcaataaaaactaagttgtattcagattggtgtcttaattataagtttgccatgatttaataaatttcaaaatttgtaattaataatatccggttgtacttagtttgggtctcacaattataatattttcagttttgataactttatagaatttgggattaatgcttattgtcgacgggctatactcgttgacgagatttgtagagtatactcaaatagttatagaaaaaattaaaaaaaaaatagtaacatcaattgtgatgatataagtctatacacaaacatgcatgactaaatttgatctataactaaagaaacaaaaataataaaatcagacagtgactagtccctgtacagtgcagataaaatttgttattttttttctttgtatgtcgattaaatttagacttgtatgtttgtatagtgttttatattaacatagcctatcttattaaattttataaaacttttatatgactgtttaaattacatgtatacacctaggtaccatgtgtagaaaatactttcccggtgatatacccaaaacgaagcgctgcagcttgcaacacacgtacacatcacatctctcgattggcttccttctccttcccggcttcccgccatggagagttcgtctcgatctccttgcactgttgctgctgctgatgcttcacgtcgtccggctcgcccctccgctgctccaagcacggccgctcggacacggcggactacgtctgcaggagtcgccgccggttataatgctgccgaccgacgacgacggcttgctgaggacgaagaagagccgctctcctccgccgtgccgatcagtctggccgacgacgacggcgtgctggggaggccgcgccgctctcctccgccgccgtcaaccttggtaccccggtgtgccgcgacgcacatgcagctcgccgacgacggtggcggcttgccgaggaggcagtggcatggcccccgacaccccggtgcaaccgccctccgatggcgcgcgtgtcgcggtgggacggccggcagcacgctccgccgacgccagcggccgggaaacccgccgcgtggacacaacgtcgccgtcgtttgcgccggctgccggccgccgcttttctccgggtgatccgcgacgccgtgcaatacatatggtcggcggactcggagcctgatctgtcagaagtataatttccttgttttaatttcaatatgtttatttgtatcgttatatggtataggatcagctgagcaggagccaaatgtacgtgtgttgatttccgtgacatatgcataaatttcttttcgcatcgatatatatatatcaggaccactttctttcacccatcgagttcgcgaggaggaagaatcctaaccctagattgtgattcggcaagcggagatgagaaggcccaccatagaagagaaattggcgacctactcgatgttccaggttcgttagggatccaccgtcctgatcaccgcgcgggagtggctggactccctgcccacggcagggtcaggcgaggccccagcgaggaggaagaggacgcctgggagatggagaaggatccctcgcacgctacctcatccttgcctgagaaagaggctcatgacatgggaggagcttctcgcggacagcttggacatgagcgatgaggctcactgctttagtgaggaggataagcccgctttccgcgagtgcaaggcgcatatggccaggttctatcggaggatgatcgacatcgagaagaacaacatcaaacaaatctcccgaccccgcgtcctgtccgatacaccgtgtgttaattaaaccccttctttttactaccattgtttcatatcataagtagtttgattttttttcttaatgaaaatcttttgcctgcttgctcctttcgtccccacggacggcgccaaatgttgggacaaaatccaacaagcgtatgtgtatcacttctgtattcattatgcccaaatgtgagcaatgtttacatatttatacaaggatgtacaaggggaaattacatcgctaccctaatagctaatttatctagccggttggctggtgggccagctttagggctcttcggtcagctcctcggtgataggagggctgcgcccattaagggagtggcgccgattcccgagggcgccggctattacccgggtatctgggtaatagcgtgcgcggtatgccctcatcaacagcgtcagaggtggttggcagatgtgtagtgcgtatttatggcgtcccactacgatccgatcacccatcttacgtccaaggctcttgaagccctggcttccttcagagcccttgaacagctccggagggtctagaaggctttggagtccttggatggctccggagcccacggacagctccggaggccttgatcggccccagagcccttagatggctccgaaggccttggatgaccccggagcacctaggtggctccgaaggctcgggttggctccagcgcctctagttagctccggagcctaaatcagtagatgcctccggtcattctcctggggtggatggctccggtaggtgct

SEQ ID NO: 4861 - DNA, 8803 bp, Oryza sativa
taggctgacgaggggcgggcccaacttgtacggcccgaacgtacgtgatactcccgttccgttccggcccaactataatgggccgcaggtgttgttccggctcaattagagggggcctaaacaaacgagagctcactttggtatcagctgcgtctgtgtgtgtcaagctaccactactcgtgtatcaggtggctgccgagccagtggatcagtggatggatgggcaaaagatcgaaaaataccggaaaccactgtagcagcagtccactagtgtgcaggaaatttggtggtcatcgctactactggctgcacctacgctactgttgcatcgtcgtcgaattcgttcgtctagtgcatctcagccgcattctctgatcatctcatcgtcgtccttctctgtagactgtagtgtgtataaatgtacacacgtactgatcaatagtagtagtggcggcatacagtagacaaatagaaaaatacgatatactgtactagctactacgatacacttgtacacgtacatgtgtagtacagcctgcaaaccgtgcacgtggattgatctgtacaagaacctaacaatttaatttcttttttccctagcttactatcacgtgtagcgtgtgctgaaaaggattggtggtagtatgacctaatgtatagaagcaaggtttacgagagtgaactaatgtgacttttggaattgagtttgtttaacaattcagatccacttgtatatactaagtaaaattcatgcttatagtatgagcatatacaccactagtacaaaaacgatgtctagtgcactagtattgtagggacactagaagacatttttctagtactatagagacacttttcaaatgtctttacaatactatagaggcattttaaaaaatgtctaataagtgccttatggtgaattgtctctataaacgaagaggcattttataaaatatctataaggtggtagagacattttctagagacattaaattgtaccacaaccatatgaaaccagtaaaatgagaataaaatattttcccttgtttttgccaatccttaaactcatgatctcttgaacaaatcattcttatcttcaaggcactaaccaactcaaccccatgtcattcattgtatatgtttatgccttaagttacttatatttagtcatttagtatatttttattgtaagaagtgtctctacagagtttaaagtgtctcaagcaaacgtctttacatgttagacacattttaaagtgccgaaagaatgcctctacaagatataatctaataaaatgtgttgaaaatatttctaaagtgtctctagagtaaaaattttctagataattttgaaagtgtctctataaagtgtctctacgctataaactcatgatcttagaggcaatttgcaaaatgcctctacaaaagtgtctttatataatgtttttgttgtagtggggagaaattatgaatggcgtataagtaatttgttaaaccactagcctcaacggaacccctcctcttgcctcgtgtcgtgtacattgctgatccccttccccatcatccacctaaggtggtgctgcaccagtggcggatccagcgcagaggctaaggggcataagccccctacttgttggatctctatggaaagagagggttatcgtttcacaactctagcctaatatatcaccatggcagtgaatgaaggggtcgttcctatggatgttggttccgcgtgtgtcatccgtaatatagttacagcttgacggttttactatagacgttgggccgtcatcttacatcaatcactgaaggatgaagtaatgggcacaaacttcctcttcccaagcctaacgccaagtcgttcaccagttcctttgctgaagtcgtctcaactatctctaagtccaaggcgatgtggttgctcagtggaaacctcctctacttccattgccattccctttctagccaccagcccttctccacccgaggtgatgtctccctaaattttttcctatgttttgggtatgccagtgcacaccgacaatccatgggttcaccctgatatgggataataagaagtggtgtcttaccatctattactgatgagaagaaaatttatgagaggaccgttctcacattggcatgataccgttctggtatgccgctaataacaacaattaatatgtaatttaggctcatagctcgatatatatatggatcggaattaattaatgtaccacacgtaactagaaaagtcagctaaaatcaaagatgacacgagaaactaacgtacacatgctaccttaccactcacgccatagctaaaggagtactacagtgtaaggccaaaatatgccgcatacgcttacacttccatcgccggctagctgagacaacggtgcaatgcagtgattaccggccggtactgcgtcaattcaagccaacacacgaccaaacatttccatgtaggagtataaatttaagtctcgtacatctgattaattgacggtcgttattctagctagcagctggctctcaaatctcatcggttcaattaattcgtctacagtatactaactactcgttgatcatgcatactctctccatacttgtaaaggaagtcgtttaggacagcgacacgatctccaaaacacaactttgacttcttatttctataaaaatatttattaaaaaaattatatatgtatacttttatgaaagtacttttcaagacaaatctatacatataatttttacatttttaaactcaagaacttgaaagttattcatgatttatatttttaaggtttgacttaaacattgtcctaaacgactttctttatgactatggagtagtatatatctactcgatcagagtctgcatgcatgtacctactatataggagtatatgttagcggctagtctctctaaaaagatgacagagtgttagattaatagttaggatttacggcctatcttttcgtttattcttatacttatcagctaaaatttaaattttcaatattaaatttaaaattgattttaatatttttttcatcatagtttatttttcaacatctgtttttagatcactaagaatatgtatataaaagttttattataaattattttccgtttgtaaatatgttgtttgacttatttcttgaataagccaaatgatgggactattagttttctatgggatggagggtgtactggtccatgcagctgcaacaggaaaccggccggtcgatcgagcaaataatacatgggtcgcagcgctactgtgcacgagagcgattgagcctgcacgcatgcagtaaactgtggtccaacacgtctaaaaagaggccgtttttgcacggcgcgacgactgtggcattgcctacctatagtacagccctacatatgctagctaaagaaaatttcgttccaaattaagatatattatatgatacatcatcgacacccaagtgatgaaaaacacacaccattcatacatatatattttttagaaataaggtgttgtctaatatttaagtacatcgacaaaacgatatatatacatgtatatatgtcggattaagtacgggtatagaaaacaattcagtctaatctcgcatgataaaccgtttaattacacagccacctataatctatggcaagtgaaaaatcaattgtttatatagtcgtaaaatcgatcgtctattatagtcttattaggccaagtcctagattgacctactattttaaaccacatttaaaacatgataaaaaaatgaatacaatattatcgactcataggctaacaactctgaaaaattgagttgtccatatattcaacacaactaccctaccacgtggatcggtggatgctacagtgcatccgatagcttataccacttcaattaatgcatatgcttccgtttccatttgaccaaattaaacgaagtgttcgtggtacaaacgtacgttccttcaattaaattcggaaatgattgcactaacgggcgtactttctccgtcctaatttaagtgcaaccataagttttcgcgtccaattttaatcatccgtcttatttaattttttttataattagtatttttattattatgagatgataaaacattaatagtattttatacgtaacttatatttttaaattttttaaaaatagttttaaataagacaaacggtcaaagctgtgcacgaaaaattatgactgcacttaaaattagacggagaaagtaattaagtttacgttaggtgctaaagtagctgtcagaacaacacgacaagtcggtacaatattcctatgaagtttgtcacgtcagagagagagttatggatcaatacgtgtcgtcggttgcattgcatttgcaattaacacgtccatcaatatgtaacagaggtacatcaaacgtacttaaaaacacattacctacaagcctaaaactagctagccatcgacactgttagtgcaacatgcatccaacagcaatgcaaacaaatacaactagacatgtttaatactttatcttgcatgagtaactagaaggtcgtataattaaccatataaaagtacattgaaacataaaccagtagatatcactttcttcattaacatatatgacctttctataaatgcagctatagtgtggacttttaaagctcgaaagttcttaaaatattatcacacattctaaatttggataaaaggataattagccactgttgtttcccttcatcttttgagggattttctctgaagttgttttagaagggagattttctctgaagttaacagttactacatgaacaaccatctgagatatatagaacgccaagtagccacgtaggatatatatatatatatatatatatatatatatatatatatatatatatatatatctgtgtgtgcgcgcgcgcgcgctgatgaggattgaggagacaagagaaggaggagatagtataacatcatgtcaccattaacaagagaaggaggagatgattcaccttattcaaaaatttatttatttattactttgctataatttattttgtcactacaacttacaagtaagggtggatccatcgtgggtgctagaaggactcgactctctcctatctcgttggatcaccattgatagaatgagttaaggagggggggctgaaggaggaaaaagaagatgagccctccctctaatcatctattttatttacaaatgatcgaacgttttgttttcgctgtgtcgctgacggaccttcactcacttgtcacttaatctctaatgggtaacgagggctctaccggtcagagattatatatagtccaagcccgtcagatggacgtaagtagaaaaaaaatcgtcagaaaaaaaatggactagtagattgagtagagactcgtggcatgcaactgtcggaggcggcaacccacgtaccggcggccaagcttccggaccctcgcgcggcggttgcggccggggccggccggagagacgtaccggagacgcgtcgcggagacggagcccccaccgtctctaaatgccgccgcccttttggtactttgatgctgcagacgtacgactcccaattcaattctcatgctgtttccatttaattttcgtatacagattgccagggattctgattaattaagtttgtggtgatcttaattagccccccgccctgctactgctagatgttcctttcaaatacagagaaaaagtcgcctagtagatgcgaatgtgatggaattttgccggaactgaatttaattatgagttggtacgcttgagggggggatgatgatcaaatgctgtaaacactgtacttaattttgcatgttgagtggtgctgtcgagtgtaaactgtatggttgctgtgctatgctgcaatggcaagagcagtaggatgtgtcttgtgaccacagttggtacgtagtacgtgatcctttttttctgatgatatgcatggctgcaaactgagactctgacaaaagagataaaactgcgcatatgtttggagtaatgtgctatatatgtaagcgttatgctgctaattaagctcgtgtgaaggcacaccaaacatatgcatctcaagcaaaggagataaaaattacgagtgctcctagtattcttcacacaggacacacaatagatgatattcaattgacaagagcgtcatgtatgatctatctgagtatatctgaccataggtaacagatatacatagactttatcagctccaaggcaagtagctagcaggcaaccaatttgtgaatgatatatattattcgcttgtgaatttttcagtggatttctttgggtccaacttgtggtagattggtggtggatgcatgtgtaccgggaagcagaattttcatatagtaattaattataacctggaattaatgagagtagacagtggaagttcattacagtatactagtataggattcaagatccatgcaagctcgatctctgtctactccttttgtactgagattttccttaacttttcaataaaaaagcagggttcttagaaaaaaaataataatgagagggccacttgatttttagtattacaattccaaaatggagggcaatatatgttaccatgtgccgtatgcactaattaatctgaagcttgactacttcagtggtactggctaaccttttcttttctgaaaaatgaacgcatgcatgacgaaaaaaccgacatcttgttacaaagaaatgttccatagtagctgagtactgtacatctatcatggattgtatttaaataatggatgtaagtagactttgtgttcttatcttgtcctttgtttattaattctttctgaagaaataggaattcttatcttgcaatcgattgtggttacatatcctcatcaatatgtggtcctcatcttatcatggatatgatgcatgtacatatatatactttgcattgtgtgtggttccttcccttttgaatcaagaaaataatatcaaaataagtatctagtaaggaccttgctctgcattaccgtttgcttgtgtcacggatttgtcttgtttcatctgtttcagagatgtgtcctgccttccttgttatcttgttcttttcaaaaaacggacaggaaatcttgatgtcttcctggaccagctgctagctagattcagcttgttgtagttaaaaactactgctactgctactaaatgttacagaaactatacaagttatcgtgcttaatcattagtcctgtcacatgaagaaactccaaagtttcatgtgatgtagtaccaagtcccaacaaaaaactaccagatacagtacaatccagagataagttacctcaactcctcaaccagacaagaaacaagaagacaagcagaagagggcactggcaataatattcatcaaagcaataaactggaaccatttccacagaagtaaattcagaaatattttttagataatactgagaatctcagaaatcttagcacagtaagatatatacggtctttaatctaaccttgcagaacaaagaaaaatagctagtacagtagttatcacctaaattgactcgactcaagagcagtcaaatgtaactgtcaattagtaattaagcgagtgaaattgttgtgctagtactctctgctgtccccaactgattgcgccccacataatgcaagaaagagatagagagaaaatgacttatcttgcttttttctaaggaaaaagaaccaaatttggccagctatatggattagatttagcccactgctagctcagagccgcctataaaagacgcccatatgcccagccatcccacaggcagaggaccatcctagcaaacgctgcacttgtgctcagttcgtccccatgctacaccaatctcttcagaatctatctcagatcggcacttacctatagctgaaatgatcagatatcctcactaatcaggtactcccaagatgcaataaaacactatttctttcctgtttttgttcttcttcttgatttctactccgttatgttaatcttggcagcaatagattctgttgggctagatatatatcttgcgtatgttgatcagcatttttggttgggagttagattctgaatttattgctaatcatgcagttgcatactcttgcatgtgtttctgctgacacgagctcatttaatttgcagttaattgcagtggtagtagcagcagatagctacaggcgagtttagctagccaatttggaagcctcgccggcggcgaccgcgtcatgtacatggacgccttcgggtggagcgcgccagccgcgccgtgccagccgagctgcggccccggcggcgacgacgacgacgacgtcctcctcgccgccgtcttgggcgcgagcttcgagctccactccctcgtcgacggcggcggcaacggcgccgccggcgccgttcgctctgacgatgcctacggcctcgacgtcgacctgccgtcccaccagatgagcctcctgcgttgccaagatggtctgagtgctcttcacggcgacgcgtccccgacggcggcggcggcggcgttccttgactcggtggatgtgttgccagtgccggccatcgccggcgcgacgcacgacgacggcgggctcctcgataggttcgcgttcccgaacgttgccgagacgacgaccgtgcaagccgccgcgtcgaacaccgccttctccggatacagcagcaacaccaccggcggcggcaacatctcctccggcgagtcgaacacctacacggaggtggcgtcgacgccgtgcgccgtg

SEQ ID NO: 4862 - DNA, 11882 bp, Oryza sativa
tcactcttctcgctggagcagcaggagaaggaggagatagagtgaggccgtgacggcgacggcgaggtctgggggcggggcgcgatgggagacggagcggaggcggcgggggcgaccgcggcgagcaggttcgggacgatctgcgtcttctgcggcagcaacgcggggcgccgcagggtgttcggcgacgcggcgctcgacctcggccacgagctggtacgcgtagataacgggcgggcgcgtggcgcggcgacggtcgagctgtctcgctcgccgccgccgccgccgccatcgtacttttccatccttggtttcacactttttttttcaggtgcgagccgtgagattcttctcctttttttgtttttcaggtgaggcggggcgtcgatctggtctacggcggcggcagcatcgggctgatgggcttgatcgcgcgtacggttctcgacggcggccgccgtgtcgtcgggtacgtacgcacgcagccagcttcgtttctgcgcctgagagcgatttcctcattacttttgctgccttgctttcgcggctgcacctgcggatgcctgtgattctcgtgtacgtgctacaccaccatctaatgcggcgtgataaaatttttgcttgatttattcgcagggtgattcctagagctctcatggctgtcgaggtctgcaatctcttcgacttcctttcagtatttcgtagatttttcagggttcagaagtgtcgttgaattcagctctgtattggtatgttttagcgtttgccatgttgtgttcttacttggagaacttgccgttggaatcctgtggtgtttggatcagaattccacatttgaaatgaaccctaaagtctaaacgaaatgatcaagctagacagggctaggatttccgaaagtttggtttctgtccatttttaggtggcaggtacaagccgtatagcagcatacttcaattcattgttagttttcagctgaattaaatagtaggaccagtacacttgctatcttgaatttgtcagggtgatgtttatcttgaatatgtcagggtgaagttacctgatcctaacataattgataatagtacgtgtatgcgatcatttaaaagagatgttttactttgacttggaaggactgtacagctttgtgaagaattttgtaaagggagtggtttgtgttgacatttgcaaatattgcttttctaacagatatcaggtgagagtgtgggagaagtaatagttgtacaggacatgcatgagcggaaagcggagatggctcggcgatccaaagcgttcattgctcttcctggtaattgataattccaatatatgtgagatggactgacgatctgaaatgttcagtaccttctttctaacatcatctatcacactagtaattgataattcaaatgtaacttggttattgatttttatcagggggctatggaacaatggaggagctgttagagatgataacatggtgccaacttggaattcatgacaagccagtaagcataattgagatatttgatactagatatattgtaaacggcaaagtagcataatgctttgttgatggattaaggtctccatcacatataaaaccttggccaattgaacaggttggattgctaaatgttgacggttactacgatccactgctcgcgttgttcgacaaaggcgaggcggagggcttcatcaactctgattgtagacaaatatttgtatctgcaccaactgcaagtgaattgctgacaaagatggaggtaatttgactgacctatgaactctgatgtgagcatttgcaaagcctgagcgacttttttcatgcccccatttggactcagcaatacactcggttgcaccaggaggtggcccctgcaacaagctgggagatctcagagcttggctatggaagaacaccgggcgctgatcaatcctagcccccctcacttcaaaagtgactagtacaagctctactaatgcctttgcttttgttttcccttgcttcttgtgatcaagtgtcaaattaaactcctcaccatggacatggtctccagttgctgtgttcttgatttccatcgatccggtgacgaaccaaagaagccggtcgtcaccgtctacaaatttatttgaagtttgaactgctgcatgaatgcatgatcatgtagtgggagtaatataatttactagtaatttatgttttgattattcgtggaatccggtatgggagcggctgcgggaaaagcagctgcaattttctcggtcgccgacgtcacgggtggatcagtggaatgacatctgattggatttgtactactcatttgaggcttttcttttggggctaagaatgatgatgatgatgatgcgagatcgcgagggtgatgcactggattctcatcgctttgaaggtaggccgcggggggcgtactttcctctgctgggtcggtcggtcttttttggcatttggtttgctttacggagcgcgtcttgtgttggtctcgtcgtctttggttgatgacggtcacgtcggcacgtccacgacgttgtggatggagatccctcgctcctgtgcttttccttttctttctcatttttcgcttggtttggctttgcttgcacccgatcgatcgatgtatctgcacgacacgtcgatacgatcagcggcgaaaccagaaattataagagaatagggctaagatataactctagagctgtatttaattcacaccaaaattgaaagtttggttgaaattgaaacgatatgacggaaaagttggaagtttgtgtgtgcaggaaaatttcgatgtaatggaaaagttggaagtttgaagaataactttagaactaaacacggcttaatgaagcattagttttctaaaaaaataatactacatggtgaattgaactttaagcatgttttttgatgcgggccaaagactcaaagccctagctgcactagcctgcccctgcccctagacacgatcactgatgtgcatcaactctgaagcgaacttctctgaagaaaacgacatgctagttccatcgcttgtctttttgagataagaggaaataagaagattgagagatgcgtaatgaattttaaaaacaaatatctttacataaaaattataaaaaagtttagaaaatgtgcgctttgaaaaaccagagaattttccatctccggacgaacgcagcttcgcaggtaggctgacgaggggcgggcccaacttgtacggcccgaacgtacgtgatactcccgttccgttccggcccaactataatgggccgcaggtgttgttccggctcaattagagggggcctaaacaaacgagagctcactttggtatcagctgcgtctgtgtgtgtcaagctaccactactcgtgtatcaggtggctgccgagccagtggatcagtggatggatgggcaaaagatcgaaaaataccggaaaccactgtagcagcagtccactagtgtgcaggaaatttggtggtcatcgctactactggctgcacctacgctactgttgcatcgtcgtcgaattcgttcgtctagtgcatctcagccgcattctctgatcatctcatcgtcgtccttctctgtagactgtagtgtgtataaatgtacacacgtactgatcaatagtagtagtggcggcatacagtagacaaatagaaaaatacgatatactgtactagctactacgatacacttgtacacgtacatgtgtagtacagcctgcaaaccgtgcacgtggattgatctgtacaagaacctaacaatttaatttcttttttccctagcttactatcacgtgtagcgtgtgctgaaaaggattggtggtagtatgacctaatgtatagaagcaaggtttaggagagtgaactaatgtgacttttggaattgagtttgtttaacaattcagatccacttgtatatactaagtaaaattcatgcttatagtatgagcatatacaccactagtacaaaaacgatgtctagtgcactagtattgtagggacactagaagacatttttctagtactatagagacacttttcaaatgtctttacaatactatagaggcattttaaaaaatgtctaataagtgccttatggtgaattgtctctataaacgaagaggcattttataaaatatctataaggtggtagagacattttctagagacattaaattgtaccacaaccatatgaaaccagtaaaatgagaataaaatattttcccttgtttttgccaatccttaaactcatgatctcttgaacaaatcattcttatcttcaaggcactaaccaactcaaccccatgtcattcattgtatatgtttatgccttaagttacttatatttagtcatttagtatatttttattgtaagaagtgtctctacagagtttaaagtgtctcaagcaaacgtctttacatgttagacacattttaaagtgccgaaagaatgcctctacaagatataatctaataaaatgtgttgaaatatttctaaagtgtctctagagtaaaaattttctagataattttgaaagtgtctctataaagtgtctctacgctataaactcatgatcttagaggcaatttgcaaaatgcctctacaaaagtgtctttatataatgtttttgttgtagtggggagaaattatgaatggcgtataagtaatttgttaaaccactagcctcaacggaacccctcctcttgcctcgtgtcgtgtacattgctgatccccttccccatcatccacctaaggtggtgctgcaccagtggcggatccagcgcagaggctaaggggcataagccccctacttgttggatctctatggaaagagagggttatcgtttcacaactctagcctaatatatcaccatggcagtgaatgaaggggtcgttcctatggatgttggttccgcgtgtgtcatccgtaatatagttacagcttgacggttttactatagacgttgggccgtcatcttacatcaatcactgaaggatgaagtaatgggcacaaagttcctcttcccaagcctaacgccaagtcgttcaccagttcctttgctgaagtcgtctcaactatctctaagtccaaggcgatgtggttgctcagtggaaacctcctctacttccattgccattccctttctagccaccagcccttctccacccgaggtgatgtctccctaaattttttcctatgttttgggtatgccagtgcacaccgacaatccatgggttcaccctgatatgggataataagaagtggtgtcttaccatctattactgatgagaagaaaatttatgagaggaccgttctcacattggcatgataccgttctggtatgccgctaataacaacaattaatatgtaatttaggctcatagctcgatatatatatggatcggaattaattaatgtaccacacgtaactagaaaagtcagctaaaatcaaagatgacacgagaaactaacgtacacatgctaccttaccactcacgccatagctaaaggagtactacagtgtaaggccaaaatatgccgcatacgcttacacttccatcgccggctagctgagacaacggtgcaatgcagtgattaccggccggtactgcgtcaattcaagccaacacacgaccaaacatttccatgtaggagtataaatttaagtctcgtacatctgattaattgacggtcgttattctagctagcagctggctctcaaatctcatcggttcaattaattcgtctacagtatactaactactcgttgatcatgcatactctctccatacttgtaaaggaagtcgtttaggacagcgacacgatctccaaaacacaactttgacttcttatttctataaaaatatttattaaaaaaattatatatgtatacttttatgaaagtacttttcaagacaaatctatacatataatttttacatttttaaactcaagaacttgaaagttattcatgatttatatttttaaggtttgacttaaacattgtcctaaacgactttctttatgactatggagtagtatatatctactcgatcagagtctgcatgcatgtacctactatataggagtatatgttagcggctagtctctctaaaaagatgacagagtgttagattaatagttaggatttacggcctatcttttcgtttattcttatacttatcagctaaaatttaaattttcaatattaaatttaaaattgattttaatatttttttcatcatagtttatttttcaacatctgtttttagatcactaagaatatgtatataaaagttttattataaattattttccgtttgtaaatatgttgtttgacttatttcttgaataagccaaatgatgggactattagttttctatgggatggagggtgtactggtccatgcagctgcaacaggaaaccggccggtcgatcgagcaaataatacatgggtcgcagcgctactgtgcacgagagcgattgagcctgcacgcatgcagtaaactgtggtcccacacgtataaaaagaggccgtttttgcacggcgcgacgactgtggcattgcctacctatagtacagccctacatatgctagctaaagaaaatttcgttccaaattaagatatattatatgatacatcatcgacacccaagtgatgaaaaacacacaccattcatacatatatattttttagaaataaggtgttgtctaatatttaagtacatcgacaaaacgatatatatacatgtatatatgtcggattaagtacgggtatagaaaacaattcagtctaatctcgcatgataaaccgtttaattacacagccacctataatctatggcaagtgaaaaatcaattgtttatatagtcgtaaaatcgatcgtctattatagtcttattaggccaagtcctagattgacctactattttaaaccacatttaaaacatgataaaaaaatgaatacaatattatcgactcataggctaacaactctgaaaaattgagttgtccatatattcaacacaactaccctaccacgtggatcggtggatgctacagtgcatccgatagcttataccacttcaattaatgcatatgcttccgtttccatttgaccaaattaaacgaagtgttcgtggtacaaacgtacgttccttcaattaaattcggaaatgattgcactaacgggcgtactttctccgtcctaatttaagtgcaaccataagttttcgcgtccaattttaatcatccgtcttatttaattttttttataattagtatttttattattatgagatgataaaacattaatagtattttatacgtaacttatatttttaaattttttaaaaatagttttaaataagacatacggtcaaagctgtgcacgaaaaattatgactgcacttaaaattagacggagaaagtaattaagtttacgttaggtgctaaagtagctgtcagaacaacacgacaagtcggtacaatattcctatgaagtttgtcacgtcagagagagagttatggatcaatacgtgtcgtcggttgcattgcatttgcaattaacacgtccatcaatatgtaacagaggtacatcaaacgtacttaaaaacacattacctacaagcctaaaactagctagccatcgacactgttagtgcaacatgcatccaacagcaatgcaaacaaatacaactagacatgtttaatactttatcttgcatgagtaactagaaggtcgtataattaaccatataaaagtacattgaaacataaaccagtagatatcactttcttcattaacatatatgacctttctataaatgcagctatagtgtggacttttaaagctcgaaagttcttaaaatattatcacacattctaaatttggataaaaggataattagccactgttgtttcccttcatcttttgagggattgtctctgaagttgttttagaagggagattttctctgaagttaacagttactacatgaacaaccatctgagatatatagaacgccaagtagccacgtatatatatatatatatatatatctgtgtgtgcgcgcgcgcgcgctgatgaggattgaggagacaagagaaggaggagatagtataacatcatgtcaccattaacaagagaaggaggagatgattcaccttattcaaaaatttatttatttattactttgctataatttattttgtcactacaacttacaagtaagggtggatccatcgtgggtgctagaaggactcgactctctcctatctcgttggatcaccattgatagaatgagttaaggagggggggctgaaggaggaaaaagaagatgagccctccctctaatcatctattttatttacaaatgatcgaacgttttgttttcgctgtgtcgctgacggaccttcactcacttgtcacttaatctctaatgggtaacgagggctctaccggtcagagattatatatagtccaagcccgtcagatggacgtaagtagaaaaaaaatcgtcagaaaaaaaatggactagtagattgagtagagactcgtggcatgcaactgtcggaggcggcaacccacgtaccggcggccaagcttccggaccctcgcgcggcggttgcggccggggccggccggagagacgtaccggagacgcgtcgcggagacggagcccccaccgtctctaaatgccgccgcccttttggtactttgatgctgcagacgtacgactcccaattcaattctcatgctgtttccatttaattttcgtatacagattgccagggattctgattaattaagtttgtggtgatcttaattagccccccgccctgctactgctagatgttcctttcaaatacagagaaaaagtcgcctagtagatgcgaatgtgatggaattttgccggaactgaatttaattatgagttggtacgcttgagggggggatgatgatcaaatgctgtaaacactgtacttaattttgcatgttgagtggtgctgtcgagtgtaaactgtatggttgctgtgctatgctgcaatggacaagagcagtaggatgtgtcttgtgaccacagttggtacgtagtacgtgatcctttttttctgatgatatgcatggctgcaaactgagactctgacaaaagagataaaactgcgcatatgtttggagtaatgtgctatatatgtaagcgttatgctgctaattaagctcgtgtgaaggcacaccaaacatatgcatctcaagcaaaggagataaaaattacgagtgctcctagtattcttcacacaggacacacaatagatgatattcaattgacaagagcgtcatgtatgatctatctgagtatatctgaccataggtaacagatatacatagactttatcagctccaaggcaagtagctagcaggcaaccaatttgtgaatgatatatattattcgcttgtgaatttttcagtggatttctttgggtccaacttgtggtagattggtggtggatgcatgtgtaccgggaagcagaattttcatatagtaattaattataacctggaattaatgagagtagacagtggaagttcattacagtatactagtataggattcaagatccatgcaagctcgatctctgtctactccttttgtactgagattttccttaacttttcaataaaaaagcagggttcttagaaaaaaaataataatgagagggccacttgatttttagtattacaattccaaaatggagggcaatatatgttaccatgtgccgtatgcactaattaatctgaagcttgactacttcagtggtactggctaaccttttcttttctgaaaaatgaacgcatgcatgacgaaaaaaccgacatcttgttacaaagaaatgttccatagtagctgagtactgtacatctatcatggattgtatttaaataatggatgtaagtagactttgtgttcttatcttgtcctttgtttattaattctttctgaagaaataggaattcttatcttgcaatcgattgtggttacatatcctcatcaatatgtggtcctcatcttatcatggatatgatgcatgtacatatatatactttgcattgtgtgtggttccttcccttttgaatcaagaaaataatatcaaaataagtatctagtaaggaccttgctctgcattaccgtttgcttgtgtcacggatttgtcttgtttcatctgtttcagagatgtgtcctgccttccttgttatcttgttcttttcaaaaaacggacaggaaatcttgatgtcttcctggaccagctgctagctagattcagcttgttgtagttaaaaactactgcttctgctactaaatgttacagaaactatacaagttatcgtgcttaatcattagtcctgtcacatgaagaaatgccaaagtttcatgtgatgtagtaccaagtcccaacaaaaaactgccagatacagtacaatccagagataagttacctcaactcctcataccagacaagaaacaagaagacaagcagaagagggcactggcaataatattcatcaaagcaataagctggaaccatataaccacagaagtaaattcagaaatattttttagataatactgagaatctcagaaatcttagcacagtaagatatatacggtctttaatctaaccttgcagaacaaagaaaaatagctagtacagtagttatcacctaaattgactcgactcaagagcagtcaaatgtaactgtcaattagtaattaagcgagtgaaattgttgtgctagtactctctgctgtccccaactgattgcgccccacataatgcaagaaagagatagagagaaaatgacttatcttgcttttttctaaggaaaaagaaccaaatttggccagctatatggattagatttagcccactgctagctcagagccgcctataaaagacgcccatatgcccagccatcccacaggcagaggaccatcctagcaaacgctgcacttgtgctcagttcgtccccatgctacaccaatctcttcagaatctatctcagatcggcacttacctatagctgaaatgatcagatatcctcactaatcaggtactcccaagatgcaataaaacactatttctttcctgtttttgttcttcttcttgatttctactccgttatgttaatcttggcagcaatagattctgttgggctagatatatatcttgcgtatgttgatcagcatttttggttgggagttagattctgaatttattgctaatcatgcagttgcatactcttgcatgtgtttctgctgacacgagctcatttaatttgcagttaattgcagtggtagtagcagcagatagctacaggcgagtttagctagccaatttggaagcctcgccggcggcgaccgcgtcatgtacatggacgccttcgggtggagcgcgccagccgcgccgtgccagccgagctgcggccccggcggcgacgacgacgacgacgtcctcctcgccgccgtcttgggcgcgagcttcgagctccactccctcgtcgacggcggcggcaacggcgccgccggcgccgttcgctctgacgatgcctacggcctcgacgtcgacctgccgtcccaccagatgagcctcctgcgttgccaagatggtctgagtgctcttcacggcgacgcgtccccgacggcggcggcggcggcgttccttgactcggtggatgtgttgccagtgccggccatcgccggcgcgacgcacgacgacggcgggctcctcgataggttcgcgttcccgaacgttgccgagacgacgaccgtgcaagccgccgcgtcgaacaccgccttct

SEQ ID NO: 4863 - DNA, 8036 bp, Oryza sativa
acattttttattgtagatgaaagatcatttcatctacaattcccctggtttctggcgatggaagaaatactgcaaatctgttagcatgcttccctaactactacatttttttcaaaaaaacctataacttaattaatcatgtgttaattttaaaaattcttcccgaactactactacctttttttcattctgtaacttaattattcatgtgttaatttaaaaattctataacttaattaatcatgtgttaataagccactttgctattcgtgccgaagaggaaaaattttgaacttccttgttcgatcacattattagtgcaacgacgactgcttatggaaatatataagtttgtcgtgatgcaaagtttgatcacgatagcgcgacgcaatatacaagtttgaatacgttaaaaaaaaccatgagaatttgttatagtgtacaatattcctagtggtttaatttattatgtttctttctaatattaatttattattgtatcatcacgcacgggttgatatatttagggggaaacttatattgttattggataatgctctagatctactcatatatagagggttcgagttaaacatagggttaaactgaaatctagagagggtttttacctctcttttttaatcactactcctgtaagcatttgttgtgtaatttagaagaggtaaaaagaggtaacattcactactagtggttttgctatttctattatcaatagtcctgaatttgttgtgtatacagtggtcatgactctctatattgcatgagtgcatgaccttatgggtcttggtttagtaaatcactagaaacgttatatgtgttgtttggttaattttatgaatgttttgaactgaggatatatctcaggacaattgtatttggattttggaggtacaataattggctttaagatattttttgccgttttgtttgtcttacacaatcacccatacagtccaacacaagtaattcatctaattgtgtacaggaggcgcgcccatgatctttcttgccgttttgtttgtcttacataattagttgaattatatgttgtgcctccacgtcacaggtggcatgttgtagcctgagtgaaatgtcatatccaatatactctgttaaaaattgactaggagacctttatactctcaattgtcaaaaaaaaaaaaaaaatcaacctagtattggatttgatgttttctatattcagattctttgtactagaaaacgtctcatccaatactagattgatttttttttgggacgaagggagtaagttattatgcggattatatattctctctccgtcctataatataagagattttgagtggatatgatatatcctaggacaataaatctgtacatgagattttgagtggatgtgatacatcttaggacaatgaatcattgtactacttcctccgtccccaaaataagtacagccatggttttccgcacccaactttaaccgttcgtcttatttaaattttttttgaaaaaaaattaaaaacataagtcatgagtaaagtactattcatgttttatcatctcataacaacaaaaatgctaattataaaaaatttcgaataagacggacaatcaaagttggacgcggaaactcatggctgcatttattttgggacggaggtagtataagatgtgtcacatccgcacaatatctcttatattataaaacagagggagtaggatctagacagagttaggatagaatacaatagaccaggggtgtgtttgagtagaaggagatcggggagattggaaagatacgcaaaacgaggtgagccattagcgcatgattaattgagtattaactattttaaatttcaaaaatagattaatatgattttttaaaacaacttttctatagaaattttttgcaaaaaatacactgtttagtagtttgggaagtgtgcgcgcgaaaaacgaggcgctttctcaccctatatcacacaaacgaaagcagcctaggagaccttatgcgataatacaagaaaaccagtctagcaatcaacgtgcaattttgtacaaatactctcctccaacccttgggctcaattagtggtaactgggctgggcctccgtgggccgcctatttcgcaacagtccagttagtctggtgtttcagcccattcagtaatacatgggccaaggcagattagagcagggtccaataaggtccataaagacccgagcaaacctagggtttatgagcacggagcgtataaaagcgagcctccacgccgccgtccctccctgcagccaccaccaccacccccacaccggagcacagcgaggcggcgccgcagccccatcttctccggtgagtcttcgtccctcaccctcgccttctcttacggaaccctaaaaccgtatgatctctactagtacgatggatggatggatagctcttagttttggtcagttcgatggcatttgctcgttctgctcgttgtctaatatcttctacgatcctatccggctgttggtccagtagtattactgcaagaactgtaagcttagttcgagatttttcttgtagacgatttgttacctacttagattttgtttactagcgggttatttgtttcgctcggttagatctggtaatataaaacgagccatgtagcgattttgatgtgtgggggcacgaactgttcttgtcacgagaaaggttgtaccccagatttcatttgcaatcgatgccaattctgggcaaatgttgcgttataataatcatatatatgggtcactttttcctgctgatcattagttacaggatcttacagtaggttgttggttttggttatgtaggcgaagcgaaatggcgacggttccggagcctttgatctgggagattgtcaagaagaacaactgcttcctggtgaagcagttcgggaatagcaatgccaaggtgcagttcaccaaggagcccaacaacctgtacaatgtccactcctacaagcactctggtcagtagtcgcttcttgcaacattgctggctttttgatggaaaccaagcatttcattcagcatctgcaaagtgctgacttgggtgatgatgtgttttgtaaggcttggcgaacaagaagaccgtgacgatccagccatcaggcgtgaaggacgcggccgtggtcctctccacaaccaagaccaagaagcagaatgccccagcgaagctctaccacaagtctgtgatgcgcaaggagttccgcaaaatggctaaggctgtcaagaaccaggtattagcacgtgaaactacttctttgcatagcttcttgtccttgttatgccttgcgatgctagaagctttaaatgcactgctatgaacataaagcatcctatattttggcttcattactcttttcttatttactgctgtgatgagccgtaacacataaggaggccaaccgatcaattggttcttcaatgaaatactcttgttacgcttggcttctgagcattttgtattgtcttgatatgttgaagtggctctcatttgtggggttcagacgttaggatggaactgtgagatcttcatacggaacaattaaaactcatacaatgttttttacagaagttggtataacttgctgttaaaaaaacagttaggtgtcaatgaactgcaagttagtttgtgagaattcctgtttttcgttttcagaaccatctttttttccctgtttttgttacattgctaattctaactgctgctgtgataagccgtaacacataagaaggccaaccgatcaattggttctttgatgaaatactcttgttacacttggcttctgagcgtcttatactggcatcatgcctttttgatatgttgaagtgcctgatctgtgaaaaccttcagattttcaaatggaacattttgatacttaaaacaccagttttagcagcagttgatacaactttatctgaaaattcaggtatttgacaatgaattgcaagttagattttaagtatttgctttttaataaccaagtttttgccctatctgagttaaattgataatgcaagatgcagctgtgatgagccgtaacacataaggaggccaaccgatcaattggttcttcaatgaaatactcttgttacgcttggcttctgagcattttgtattgtcttgatatgttgaagtggctctcatttgtggggttcagacgttaggatggaactgtgagatcttcatacggaacacttaaaactcatacaatgttttttacagaagttggtataacttgctgttaaaaaagcagttaggtgtcaatgaactgcaagttagtttgtgagaattcctgtttttcgttttcagaaccatctttttttccctgtttttgttacattgctaattctaactgctgctgtgatgagccgtaacacgtaagaaggccaaccgatcaattggttctttgatgaaatactcttgttacgcttggcttctgagcgacttatactggcatcctgcctttttgatatgttgaagtgcctgatctgtgaaaaccttcagattttcaaatggaacattttgatacttaaaacaccagttttagcagcagttgatacaactttatctgaaaattcaggtatttgacaatgaattgcaagttagattttaagtatttgctttttaataaccaagtttttgccctatctgagttaaattgataatgcaagatgcagctgtgatgagacgtaacacataagaaggccaaaccgatcaattggttcttcgatgaaatatatttgttacgcttggcttctgagctgaatctgcctctagtatttcttctctatacggcagctttcctttatgtaccttactgaacaatcatcagtagtttgttctttaatttgctgttattctgcccttcaggtgagtgacaactactacaggcctgacctgaccaagccggctcttgcgaggcttagctcagtgtaccgcagcctccaggtttccaagtctggtgccaagaagaagaacaggcagccaactaagctgtaaatcgcttaaagctcgcttttttttttgtcaaggggcctcgtggtgttcatgtttccagctacctctgttcgtaacagtgattgagacttgaattgatatctatgctagaattggatcaactatgctacaaatctactctagtttgtactcgctacaattttggtctgctgtgtcattgttcacgttgcacttgataatagcagctaagctaatgtcatcaaattgctggtgccgttttgctttgtacacatccccgtgtagcttctgcgaccagattacctatttttgatcaagctgtgtagggttgtggcatgatggcatcaatgtgctgttgccatttgacaaatcattctgcttattacatcaagcacttcatacgttagtgagagcggggcgaggatcttttaccatagggaaaattggttctatgccatcaaaagttttcaagttttgctttataccatcgaaagttccttttcaagttttgctttatacctcgaaagttcctggtgattttcctaccataatgttacatgggtcatatctttatactccctcgtatttgaccgttcgtcttattaaaaaaatttatgaaatatataaaactatatgtgtacttgaaattatatttaacaacgaatcaaatgatataaaaagaataaataattacttaaatttttttgaataagacgaatagtcaaacacgtactaaaaagtcaatagtgtcaaatattttgaagtatttgcaatgataatgttattatggtagagaatgtgaacccgtgagggagatgattttgcattgtgagtttctgacaagcggaagctctagaaagttctgccactctgtgagagtgcaaagctgttgtgatgttgcacttgcacctgctgctgctgctgaggcccgaagcgttgccggaccgagcggtacgccatgagcccgagcttgtgcgccttctcgtacatggtctccggccgcagcggcgcgacgtgcaggccgacggcgtcgagctgccggccgctcctcccccagaacccgacgatggcgccgccgtccaccgggaacgcgaacggcgtgccctccgccgcgccgccgcctaacggcccgtactccctccggttggtcctgaacgccagccacctgatcaccgccggcgcgccgccctgcgccaccgccgcgtagtgcccgctcaccgccgtcaggtactcctccgggaagcccagcttgatctacgtcccagccaaacagactcagggggtatttagatacatggatgtaaaatttttgcatgtctcatcggatatacggatacacatttgaagtattaaacgtataataataataaagcaaattacagatttcgtttgtaaaccgcgagacgaatttattaagcctaattaatccgtaattagtaaatatttattgtagcaccacattatctaataatgaaacaattagggttaaaagattcgtctcgcaatttacacgaaatttgtataattagttatttttttcgtttatatttaatacttcatacatgtgtttaaatatttgatgtgatatgttgaaaatttttgccagggatctaaacaggccctcagctatggctgtgccaagaacattacaaggtgcagatggtattgggtgtgcacctgggtggtctggttgccgccggcgccgccgtgccgctcgccggcgacggcgacgccgttccggtcatactcgacggcgatggagtcgatgcaccggtcgtacgacagggtgatgctacgaacgccggtgtgaccgccgtcgtcccaggggctccctccggtgccgccccatggcccaaccttcatgatcttcttggacacaaccatcttcttctgaggttgctgctcctgcaaaaaaaaaagggatatcctgtataattgaagtgtatgagttgctcactgaacttttggatagaaaaattcagatgatttttctgttctgcaagactgaaaatgaagtgcatgacttgcataccatgtttggttcagatatgttaagaactacaccaagtagtaaggtgagcagctaaacttattcagagaacaagtgcgctaacagataaaaatggatagggatttttttttgtttgcaggaaacaaccagatggaagaacagaaatattaggatatataggaaaaataccacacagtggcaattgggtgataagtgggaatcagaaccggatgctgtaatggcagtacgctgctttctggaaagctaagcatattgtacaggaagtttttgttctccaagagtccaagtataaattccggtaacatgatcctgccaatacctagttttcagttcaatgttaccactcctggtgattttttatttacatatcgcagagctttagtgtagtacaagttttttagggaaaagaaatcaaagtttgatattttggaaaataaagccttcatgttatttttgttcttcttcttatatggaaggatatgcagctctcctgtctattcgagaaaaaaaaagaaaaaatgccttcatgttgaatcatgaattgctcacttaaactccaagttcataagcatttgcacgttaacatcagataaagacctgaaacaaatgttgtacctcatgtcattacagtgctttgaaaaacagaaatgaagatgtagacagtggactcatactcataggtaactcctagaacttagttcgttccaaattcgtctgtccccagtccccactgaacaactcaatcctttgaattttctggaaataaactcagtccaaattggacgcatgaaattcgcataacacaatttatctcacatattattacatgcctattacgcagggttggtgcccagaaataccattcatggccagttgggattgagtactactactgctgaaccaatgttcaatacaaccttgtttgacagcatccagaaagtctgaaaacacaaccagcagttgtcgttttctaacttcagatgt

SEQ ID NO: 4864 - DNA, 22187 bp, Oryza sativa
  unsure (1)..(22187): unsure at all n locations
gcccacgctttatccgcactgcgcggaagcgtgttgttggttcttccaccgtgttccgtttccgccacccagctcccccaccgccagcggcccgtgctgctgccggccctcgacaggtcccgccggtcccttcgcgccagccgatcgacgtttcttcaactgaggagccgactacaggaggcagccaggccgacgaggagtagaggaggcagtcttcagcagccgtccgtgtgataggccccttttgttccgccgccaactcttttggagtcgtggcgaggtagtgcgtgcgtgtgtttgttgtgggtgttgtttggtagtctggttctcctaggtggtgtgtgcacagtcaagctcggcgtagctctgtgacttgtccacacccgttgtatcaggtgtttttatgatttgaaaaatccagtttatgcctagtgtgtgctatctgagttgctatttgctttgctccttgccctcctaagtgcttatctgactcttaccccgccccttttctgggagtttagatggctagccgcccccgtcgtacagctcgtgcaccagcccgctttggttttgaagatggtagagttgaagcagaagcaaatcacgaaccagctaatgagcattctcaccacagcaaccgttcgcaccgtactgttccccgcaacgcagaggttgagcaacctcgccgcagtagccgctcgcatcgcacagtttcccgtgatgcagagctggagcagtctcaccgctctcaccgcactgccagtcacaattctggagaagaacgcctcccttccccacctcatgtggaaaacaacatgcaacacataatggcagttcagacacaaatcttgcaaggactaaccacagccatagccagctttcagcataatgcgcatggaaatggccaccctcacgtgggcaacaatagatccaagctgacagactttctgaggtcacgtccgccagagttctctcagaccgtcgagcccgtcgaggctgacgattggttgaaagatgttgatagaaaactcaacttagtgcagtgtactccggttgagaagacgctctacgcctctcaccagctaagaggacctgccgcagattggtgggagaattaccgcaatgcacaccctgaacccactaacattgcttgggatgagttcgctacggctttccgtgcagctcatgtgcccgaaagcactattgacatgaagaaagaagaattcaacagacttaaacaaggcaacaacagtgtcaatgagtacctaagtcagttcaacaagttggctcggtacgcccctgaggaagttgacttcctagccaaaccgatagtcctagactcgcaaagcttggacatcatcctagggatggattggttggctaagcataaaggacagatagattgtgccgaaaagtccatcaccttgcaaggacctggaggaaagcaagtccgctttacccctaacacccctaccgcaagtcggtctatcctaacctgtttgcaagtcacctccttggagtcggtgcccatagtctgtgaatatcccgacgtatttccggaagaattaacaagaatgccaccagaccgagagatcgagttcaccatagaactggctccaagcacagctccaattgcaaaaagaccctaccgaatggcagctaatgagttagcagaagtcaaaagacaaatcgaagagttagggagtaaaggttatgtgcgacctagctcatccctttggggagccccagtgctcctggttaagaaaaaggatggctctgagagaatggtaatcgactatagagccctgaatgaagtaactataaagaacaagtacccgttgccacggattgacgacttattcgatcaacttaaaggagcaagagtcttctcaaaaattgacttgaggtcaggttaccaccaactgaaaatcagatctgaagatattccgaagaccgctttctcgacgcgttatggtctatatgagttcacagtaatgtccttcggactcaccaatgctccagcattcttcatgaacttaatgaacaaaatctttatggaatacctggaccagtttgtcgtggtattcatcgatgacatcctgatatactctaagaacgaggaagaacatgctgaacacctgaggctgataatggaaaagctcagagatcatcaactattcgctaaattctcgaagtgtgaattctggttggaccgagtagcatttcttggacacgtgatctcctccaacggtgtcgaagtagatcccagcaaggttgaagctgtacttgcttggaacccgcccaagaatgtgtcagagattcgcagcttccttggcttagcgggatattatcgaagattcattgaaggattctctaagctagccagacctatgaccgagctgttaaagaaggaaaagaaatttcaatggtctgtagcctgtgaagacagctttcaagaaatgaagaaaaggctgaccactgccccagttcttaccttgccagatatccgaaaagatttcgagatcttctgtgacgcatcaagacaaggcttaggatgtgtcctaatgcaagaacgtaaggttgtggcctacgcatccaggcagctcaggcctcatgaagtcaattatcccacccatgatctcgagttggcagccgtggttcatgctcttaagatctggaggcactatttaatcgggaacagatgtgaagtatacaccgatcacaaaagtcttaaatatatcttcacacagaccgagttaaatatgaggcagagaagatggttggaactaatcaaggattacgatcttggaatccactatcatcctggtaaagccaacgtggtcgctgatgcgctaagtcgcaaggcctattgcaatgtagctcaaatacggcctgaccaagatcatctgtgcagagaattggagaagttaaggctgaccgtggtacagtcaggagtcccagccagcttgacagtacagcctaccctagagtcgcaaatccgggaggcccagaaagacgacgaaggggtaaaagaattaataaaaagaatacagttgcttttagaaaagagttcaaataaaatcaattgcaaaaacaacagcctttccttgaagcctgcattaaacacttatttcccctggcttgctgagtactcccgtactcacccttgctctatataaatatctccccccccagttgctgaagaagatgaagcggatcctgctgatgaggagttcttccaggagcaagtcggctacgatgagttttagggtttcggcctagttcccaagtcgcgcctgtgattgtttggtccaagtcctggcttccgctttccttttgtaatgcagttgtgagctcgggatctgtccacagcccaacatgactgtacttctactctataataaagaggcttctgttgctgtgatattctgtctccctgtgataccagcactgtttcctgggactggtatcgattaacaggttaatttggagcgtcacgggttagttccggtcgggactaattcggggcgtgacacatagatagaaagagttttcattcatcataggcatctgccttgcccaatggccgagagttcaagccaccaaagttgacgggactatgggcaagcgaccaaaatatgacaaagagcaatcttccattacatccgtaggatgataggcttgcggccccattttttcgcttatacttatacttattagccaaaatttaaattttcaactttaaatttggagttgattttggggtttaatcattgtagtttacttttctgcttttgcttttatatcgttaaaaacacgtgtataaaagttttttcataaattattttttatttgtaaatatgttgttttgcttattcctctcaacagccaaacgatggggctgttttcttcggtggttgatctactatcactattgaattcatggtttgtccaaaataccaggttgtattgggtttttcgccggccccatgtcttgttattatcataacatgcatgattataaatggacaatttgtgactaatgatatatatgtcaacattttaaattgttgaagtcccgagaatcttgttatgagataagaaataatctagtgccaagcagttagctcgaattttatcatacagaggtagagataaggttctaagctgtaggttcagtactatactacaattatgcattttgggtgcaaacaaataagttagagacaaagcaggtaacccaatttgggtgcaggaaaatgagtagagaggtgacagaagagctaatcacatggaagtatgagcatctttaggtattgtctactgggctgtacacatgccaatgctggaagcctggaatccttgaactacaccatagaccagaggtcgtcctctggtcttaaagaaaaaccatttcgacaacagaagtgcagtttcagccactataaatgctaatgttcccaaacctttaatttcttcatccatgtaccaatcgatctacaacaagctaagagcacattcagctattagctttcattttgctctccttgcatagtattctcgatcggccatggacagatcactgtctacttcactgcttcttgtcctcgcccatttcatcatcatctttgctcatcttttggatgcacgaacactaggtaggcaacacaacagcacgcagaattgcattggttcctttcagtcgcattgatcatgtgaaaaagaatggttttgattgctaatctggcctagaatagtgggttactgggtttgatagctagtaatttgtcattcaccgagaaaatttcttgtgctgtttctgtccatccaggagacgcataccaaccacacgtacatgcgtcgtcgtcgtcggcggcggcgttgcggctgtggagcagcgcggatgccgacggtggcgcgctggcgaagtcgtcgccgcgcgctccgccgccgccgaggtcatcacattcgccaacgccgcgctggcatgacggagatggcgcgccggcgaggtggccggcggcggctgctcctcctcctccgtttgcaggagatgtcgttggccaacctgtgctctccccaagccgcccggcagtgtacacggcttagttacgaggtcgtaatctttgatcaattcgaggtgttgtactgctcgctgacatatgagcacgagatcatatgttattaatgtcaatgattagtactccactgcactgagtccaaccttgatgtttacgagtcacagagtcactgtttcatttcctgatcacaagcccgttttcttatgttgtgtactcatgtgtgaactatcgaccgttcttttgtgtgtgtgctcgtgttaactatcaaaactgttaccataaactcaatttttaactatcaatccattgtccatcaggcttgtttagttcacgaacagattttagatgtcacatcgaacgtttgaccagatgtcggaaaagattttcggacacgaataaaaaaactaatttcataactcgcctggaaaccgcgaaacgaatttattaagcttaattaatctatcattagcacttgtggttagtgtagcacttatgactaatcatggactaattagtctcaaaagattcgtctcgcgatttccatgtaaactgtgcgattagtttttcattttatttatatttaatgcttcatgcatgtgtccagagattctatggctctatttttttcttcaaacttccaacttttccgtcacatcaaacttttctacacacaaattttcaacatttccgtcatatcgtttcaattttttcaaacttctaattttaacatggaactaaacacaaacacagtttatgtgatgttttggggaaaaaaattggaaactaaacaaggccagtacttcaaaacgaacgtgtgtgtaacgtcacgacaaacatatacttacagttttgcactccttaatttcctaaaagaaaaaataaaacaccctttcacaccagcgtgaaagcgttggtttgacagtccggccatgtacgcgttaataattgacgatgatatgaccgaaacacgcggcggacatacatagacaaaattccgaattcaatctaaaacaatatacttcctccatctcaaaatatttgatgccgctgatttttttttaaatgtttgaccgttcatcttattaaaaaaaataagtaattattaattcttttcctatcatttgatttattgttaaatataccttaatgtatacatatagttttacatatttcacaaaagttttgaataaaacaaacggtcaaatatgtttaaaaaagttaatgacgtcaaatatttagaaaaggagcaagtatgttctcagaaaatctaaaacgatatatgaattatgaaacttccagttcatctcaatgtctcgatgcatgtgtggtcgtcgatatatcccatggttgccgtcgattcctcgtcgtccgtaactccgtatgtcttggtgtttgtgtcctacgtgcactggcagcggagcgatggtggtgcgggtagaatacgatgtaattaattttgaaaatatattatttctttcttcaattttttttggttagaaatatacctcgctatcacataaccaccgcacgagaatgacgtggagtaacgacgcgccaaggttttgcaagggaattccacgaaagcgtacggtctcgcacaaccaatacgcgagaccgcacggcatggctgaatgattaatgttttaatcacattgattagcaactaattaatcttagttatcattaaataataactaattatggtaattaatcactaattttggaccagagattcggtatgctgtttcttatgcgatactgttcggtattgctgtttcgttatgtctcgcgcaacgattatgtgaggtcgatgtatatttctaccaataagcttgcatcctgaatatttttaagaaaaaacaaattaacagtatattttgaaatttatttcgaatacaatgcacgtcgtcctacatataccacaggaatacgacgtggaaaaaaatcaaaaatactttacagatctatcatgctttaagattggtgaggatacatgtacgtgtacgcgtacgtggcacccatttagccagctaggtaggatggtgctccacttggtgcggtttagggcggaggcttcacaccccggactactttcgccgttctaaaaaaacataacctataaacgaaatatgatataatataatacaataaatttaaaaaacatttagatagaaattcatcccattttaggtgtttttttatacagttcctgttccttccgtgtcaaaccattaacttgtttttccttccgtgtcaaaccattaacaaatcaatccgagcattttctttcttttgatggattaattaggcaaaaaaccgttgactcagtcatcacacatgcacaccacgcgagtccacgacgaccacacgagcgccgtaccaaatcctgcctatataacagagctcatgtgggtgtggctagctgcagcctagtagcttgcatcagagtttcatctcatctatcgatcggctaatttctagcttaattagcttgtgatccctttccttcccgccatggaggcctcgtcgtctccttgcaagcttcttcttcttcttcttcttcacgtcgtcctgctcgcgttcgcgccgctgctccaagcacggccactcggtcatcaggtggtggtggcgccgctaatgttgccgagcgacggcggcgaggtcgtcggaggtgtcgggcggccggaggatcacatcccaccgtcaccttttgcgcctggcgggccgatcacgctcgccggcggatggctggtggggaggccggtcggccccactccgccgcctccttcgcaccccgttgtgccgactccgacgcagctcgccgccgacgatgacggcggattgctgaggaggccgggcggccccactccgccgtctccttggcaccccggtgtgccgacgcagacgcagctcgccggcggcgacgacggcggcgtcggcggattgcttgggaggccgtggcctaaggctcccccgccgcctgacccgaacacgccgccggtgcagccgctctccaactacggcgtgtcgcggtgttgcggccggccaggacccgctccgccgacgccggccggaaacccgccgggtgaaaccaacgtcgccgtcgcgctcgcgccgccgatcccctgcgccgcttttctccgggtgatccgcgacgccgtgcagtacatggtcggcggcggactcggagcctgaaacgatcgagagctcgacaccgagaagaagagatatatacgagagagttgtacttgtacgtgtatatttgtacgcatacagaagcaaagctataggcaagtatgtatacggtataacgactgtataatcgtatatattgtatagtcgttttttatttaattataagtgtcgtagcagagtctaggtaagtagacaccagctgagcaaaaagactagctggctagtagctgcacgttgttgcgtcgctcaactacgaaaaatggagatgcagtaattataatctctctgtggccaattggcgcagtatatgcatatatatatacacggtggtgaatccggctgaaatcagaggatagatttaaagtctaaatcttttttgttaaaaaaaaagataaaaatacatcctctgtatcaacccaccatatttggtttgcaattgaaatttcaaacattagttacaggggacaacaccggatactttttgcaccacggatccataaagcatcaagaaaaaaatagatgaaatcccacgtgttgctgctagaattttatatgatattagtagaaataacatgtgacagtggattttaaagtcttcggcaaacattcctttgttgtttttatgccattcaaatagttatgaaaaaaattaaaaaaattgagaagatgtactaatatgtgatatatcacccccacaaacatgcaatttaaaaatccaactaatacaagttaaaaatccaactaatacaagttaaaaaaaaattaaactacaactagttaacatatattcacagccaatttttttttaaagttacagaccttacatgcttgtgaagtaatctatcacgtactacactaaatagggagtagtaatccatcttatcatttttttctagaatatatagtttcccttaactacactagataaactttatagatatatatatgatgttccacggtaccagagacactgacaaatgagcgttggatggtttgacatcatcgatacatcgaaaataaaaatattaaatagatacagaatatatatatttgatttagaataaaactaaaacgatttacatatttacagtataaaacgaagaaaggtgtgccgcacatcaggatcatatcccctggcaggtgcaaggtgtgcacttgatcaggccactaaaataagagacatccaaatctattagtcctacaatttatctaagctaattaacaaggaaaagaaaaaaaagaaaagaaaaacagcacaagtatgaaaggcccaggcagccaaacacactagcttggccgggctccatgttgccatcacggtttctctccgtgaacaaaagttgttttgactcacgcggtggctgttgtctgtcgcggttgtttcttgtctgttgaatggtcaactttgaccgcaaccttagctcgtagcgaaaatcttcgcccggtagcggttccaacagctagctatttgcagcaactaactgacgatttacgcacatttatacactgctattcgtgttcttttcaagttaaatattggctctgtttggggaacttgttccagctgcagcttttcctaaaagctgcttctgctagaagctgccccaaacagtatacagcttctgagaatctgtaggtacaggttctgaaaaatgaactaagaagccagaagctgggtttcagagcttttccagattctcagaagctggctaccaaacaactgcttctcagaatataaaactccaccaaacagacccattaactagtatatcgaagattctttttgaaaatgctactatcctattcgaacgggataatatctcaggggtatcacctgatatataaaaatcaatagatatgtatcacttagagatattatccagtttaaatagttataaaccgatatctaacacgtatcatatcagataatagcttagaaatatcatatcgttcgaatgggatattgtcatgtagcattttatggattaagaagaaacagttgacttgtcaactttctagccgtcataagcaattctaatctttgcctatatatataagagctcacgcggccatgtcgttcttcgcgcgcgctgccgcttgcaacatctcgaattctcgatcgatcgattcattgcttttccttcccgccatggcgggttcgtcttcgtcttctccaaagctgctgctgctgcttcttcttcccgtcgtcctcctcgctccgctgctcgaagcacggcgtctgcacgtgctgccgccgctgatgttgccgagcgacggcgtggtcgtcggaggcgccgtcgaggtcgagggcggcaggtcgggtaacgccccgccatcgcctcgtccgcatggccgggtgacgccgctcgccgacggcggcggcggcggcgtgctgaggaggccgccaggacgcggtccgccgccacctggtccaggtggccatgtggggccgctctccggcggcgtgtcgtcgtcggccgggagatcgtcgacgaggccgctgatgatctccgacgacgacggcggcgtgtcggggaggcagtggcctgctcccccgccgccgcctgacccgaacaccccggtgcagccgctctccggcggcgacgggcggccgcggcagctcgcgccgccgccgccgatgggaaacccgccgcccaacacccaccgtcgacgcaccgatcgtcctccccgccggctgccggcggacgacgacatggccggtttgctactccgcgtgatccgcgacgccgtcgaatacatggtcggcgaactcggagcctgatatccatcgagaccgagaagaagatacgagagatccgagaattatacgtatatttgatttgtacgcatgctgaagaaaggcaagtacttacgtattaattaacgtataccaactgtatagtcgtatactcgtatgtatgtattattgtatttgtattagtatacagtgtacagttgtaagcctagctaagaggctagctgagtaaacgagatcagacagttgcatgcatgttggtagctactcaagctgttgaattcgtcggtctggttgtggttcacactgaagtttgaaagtttggttaaaattgatacgatgtgatagaaaagttacgtgtgtatgaaaggtttgatgtgatgaaaagtttgaagtttagaaaaaaaaactttgaaactaaactgggcctctgacgtgtatatttggaccctaattaattaacagtgagtttttttttcaattacatggtagaaacatgcgcacacgcaactactcacactccgtgaatgtgtcagctaacatatgctctaataaacggaaattaatgatatatcaccgatctcattgattttctattgaaactccaccagtatatacgtaatattcatgaacaacaggacacttgtaatggagtagtatttaaattataattacacagcatcataatctttgcaaaaaactgtttctgatctatctgcccaggccattcaagataacaagaccggacagtttctagccggaaaaagctctaaccgatacaaaacaggatccaggggggaaaaataaaatcataaacagcaatcatgcgctgtagtgtacttatataatgaacaaagcacataaattaaccaaaccctgtaacaacgaaaggctaacaaccataagaattcagaagggagtggttcacaaaaatctgccggtatggtatagctctagcactactaattatttttaactaattatccgtgcttgccattagcatattaccggttatatataaattataagtatatactagtaataattaatcaacaaattcaactcaagacgagttttgaaaaactgtcctagtactccatgtcatacgacgatccttgacttttaattgacgacgtgtctttgtttagagtccactaattaattatagcttgcagccaaaagttaggcctaccaatcgaacatccgagttcataatatatgataatgagtacagacaaacgcatcttagataagctgagagcgcccattaactgtaatctatcaatatttgtccatcatttgatatagttaacgtctgtccatgttaaatattggtcagaaaaagaagaccttcgagaagatagatttgattactactgacacgcttggtgctgatatatgagttagaaccgccccataaaagtttcggcctaattaagataagtttacttggtgaaaaatcaaggttttcaatggacctttaattttatcccaggccccagacctggcctagctttgctcggggcctggatttgcccccgctaccggaattcatctaccgacaaaacatcagacaggagcaactaacatactcatgatatgatggatacacacttcggagaagtcgaaagtttgaatgtcatcagtggaacaagccaaaccaaactcgaattaattcatatacggccaaatatccatcaaatagtcgctcaagttttgatggttgttgatatagcgtttgataatcatcatttttagcaagcagttttgcgctacggcagactcctccaccagctcatcgtacacacaacacacatgcagctagtcatcgtcgtcaaggacgctccggcgcctctgaatctgcgaaataaaacatagtaaaaagaatcagttgtgtattggatgctttcccttcacagactagcctatattagcatcattttctcttcctttttttgatgatgtacaatcagtgacttggaaagaatcacaacaaacgagaatctttacaaaccaaactaaattagttgtagtgaagctacccaaaaccactattggaagcatggtaggtttgtttagttaagtgcacatggtatgtcaaaaactgatagaagtttccacgtttatcataccgtaactttcgtctgtttgctagtgtgggtattgatttgctccagaagtgagataagcctttcttcagacacctgaaagccagaaaattccccccaaagaaagtcagctttcagataaacctttcttctgagtctcttgacacagtaaagattatgctacccgcctctattaccttttcagatattccaccggactgagcagctctcagaagaacatcctctacccctcttgctttatcaggtttgaccaaagctatgcgagagactgaaaactccagagagtaaaaaattacatcattatagaaccttttcatcaccttaacctcaagtgagattaacggtatgactttttcatagaatcatccttattcagagcatttgattctgataagcaaactatgcattatgtatccatgcaattgtttgccagtttggtccagcctactgcataacatatgttcggagctgtggagattttgaagtgtgcacacagtgccccttcctagttcatacggttttcatccttcagaagcctcatctttttgttccattggtttgtaataatgaagcctgcctagtgctttgctattgttcagttccttacgatacagtatacactggcttgtgaatatatccaatgatactgtttgagcattggtatcgtatggatagctcattagttttagttttgaacggaagtgaaataactgaagtgatgaagtttattgtgatgaacagcaagttaaaggttgggcattatagtggtataaattaaatgtgtagggtggtaaaaaaattcacatgcttacgttagtgattaaatacttcagttttgctcttcttgtttgactgtgtcttatgatgctatcttgatcgatcagaaccattatatgttcaccggatgagcagctacctttttggaagggaacggaaagttgcagacatccccatagatcatccctcctgcagtaaacaacatgcagttcttcaatataggtaagcatagcaatcttattgttatttgcctttattagcatattgcctgtgcgtggcaacaagattttaaataaagaaaattatcattaactcattattattatcattttctgtgtatatcgccccttaatttatgtatatatttgttactgacatgtgcactgtccttttcttctcacaaaaagtaggaagttggtggtaggggtggttgacatgtaggccccccttttctattaaaaaaactagggagctggtggtggggtggtggnanatncaccactcaccatcaccactactcccttttacaagaagtatatattgagaaataatattgtgattcacccatctctttgccttttcagacttgtagagaaggagcagccagatggcatgatgtcaaagcaagtgaggtactccttgctagtaatgcatataattttttttaataacaagtactaataattcatgattatcttagttctgtatgctactctagattatgatgttttttgctgctttgtttgataggccttatctgatggatcttggtagtaccaatggaactttcattaatgtaagtcctccaatgatacttttactactaatcagatacactagtcgcgtttctaataatattttctacccagtcaatatttatgttttgatttttttttcaggagaatcgtattgagcccagccgttactatgaactctttgaaaaggataccattaagtttggcaatagtaggtatgatcattgaaattgaagagtaactttccccctctactgtttaagataactttgcttgcttcatgccctcatcatatcaattaaagaaagcatcacttttttgtttatttattgctcaatgtatatgcatctttggtatgtgatgacttaaattaacaacttattatgaaagtgacagtctggcttttggcattctctttagttagagattttattttgatttgtggtactcttgggataaacattttttctccaataatctaagtaatatctttgtaaactacgcctaattgtttttctcaatacaatttccaaatgaatctttaggtggtatattaatgtttataaatatcaaggaatctcaaaatatctacattatggaaacataattttcctttatggagccttgacttgcaagctcaatcatgtataaatgtataacatatattcagagctgtggagattttgaagtttgcccatagtgccccttcctagttcatacggttttcatccttcagaagcctcatctttttgttcttagatggatggtactatttctaatccagatttagggtccttttgagtccagttgcccaaaagtaaataatataatgatgtgatgcctccgcttctatatgcctccttactaaccccgttcatctaaaatatgacaaatgttttattgtatttttgcagccgggagtatgttttgcttcatgaaaattcgaaagaatgaggattgaaattgctggaaactttgctacattgttacttgagattttgacgtccctctgctgcttgttgtttgtactatggtttcagtcgcctgaatatttttcaagaatgcctgaaggaacatagcagaggccggtaatcttccgttacatttataggattctagagcctagacatgttttatccagtggttgatctagtaccgctacatacttcatggttttgtcaaataccatgtcatattgtcactgccatatcataattataatctgcaatttgtgactattgaaatgttggcactctaatctatttgaaatctgcgaatcttgacacgagatgagcaataatctagatatagcgaagcactgaagcagttctgttggttccaattttatcatttagaggtagccagctggtagggatattctagcttcattactattctacagttaaacaggcatcgagaaacaaagcaggtagccactttgggccccccaaaaaaaatgagagcatctttagttgtgtccactcggctgtgcacatggtagattgctaatgtatctctgtaagtgaaggcagtgtttggctaacgagaaaaggaaatgattttccacccaccaaaagatatttttaaatcctaaccgtttattttccctcttccatttaatcctaactcttcattcattttccaatctcaatcccaatcccacctcccatttcccattatccaaacacacccgaaaagttttcctcacaatgcttctagggtgagccacgtcatcaagtgaaatatgaccgttggattcataggtgaaaccaatatcaaccgttggatgaaatgtgatggtgaagaaaggatatagaaatggaaaggaggaatccggaaccttcatgtggcttaggttggaaggattcatcggatattgagagaaatgagaaaaacaaaagcggctaaaaagataaagatgtaatgaccctttgcaatatttattttacaaagtaaaaatttatttacaaatagatccatagattcacacatatttttaaatgagtgtttaacaaataaacatattttaatttacctaaattcacataagtataatacatataaaatgtatctagacttacataagtataagtatagtaaaaataagtatgttctaataaatatgctactccctccgtatttgaatgtacgacgtcgttgactttttgactaacgtttaaccatttattttattcaaaatatttatgtaattatcatttattttattataacttgatttgtcatcaaatattatttaagcatgatataaatatttttatatttgcacaaaaaatttaaataagacgaatagttaaacgttgataaaaagtcaacgacgtcacacgttaaaatatggagggagtataagacatgatggaaaactgacaaatttcaatggaatacgatctacatgttaaattaaaggtcattttgaatgtataatccttgcaataatttaatggagaataaatatattaatccagtaatcctacaaaaatcatgcattttctttagaggctctttatcactaatgcatgggctacaaagaggggctaaagagtttgtgtcaacaagaggtatagggtgtactcttttaccataatggaatagaacatatatatgcattttttttaagaaaaatgctacatctgactttcttttctttaaataccatttatgtatttttcatccatgggttcctcgaatcattaaactttcaaccttccatattccatctgattcagccttataaaataacacgcctaaacctaaacagaacatgtttacacctatgaggaaattcgaccaagggtggctactcatggccatgtaagtaacttagcataatttatcgcaaactttatattaccatgtcagtctattacatagttttaagtgagtagttgttacaaatttaaactaattactactctctccatctacttttgatagtcatatttcatcttgacacacagaccaagaataagtaattgtacctatcatccatttaaatatactactagttatttctcgtaaagaagcgatttatgaatatttacatttctcgatgtccatgtagctaatcttatgtggaagaatagagagtcatgcattaaattctagaaaatcattaagaggataggttgttggattgaaatatgcttatcaaaaataaatttttcagatttagaaaatatgcctatcaaaaatagatggagggagtacaatataacgtgtaaaagtatttaataaagatggtggttacagtcgcctgaaaacgcgacttaatagactagtaatgcttgaaagttgaaacctcgacagctcgtcaactacacaaggtcggtggtctctagccgctatatatactgccagtgttcccaaaacctttcttcatccgtgtaccgattgatctacagcaagcttcagcttgctcctgcatctatcgatcatggatagatcaccgtctcatagtcttctccttctcctctgcttcttcctcctcttcgctcagctgttgcaagcacggatgctaggtaggcaacatagacgctttcactcgcatggatcacgtgaaaatagagagaaacagagaagagtgcatttcatttggtagctaatttgtcattcactgacgaaacgcatcacgcattgaccatgtgaaaatattataacaatggtttgatagctaatttgtctgtcctacactgacgaaatttctcctgctgttttctcgcttcaggagaagcctactactcctatccacatcggatccggattaaatgcagtagtagtatggactgcaacttaagcagttgtagctgctacgttggatctaaatccaacggtaaggattaggccggttactgtagcaaaagtaccacggcgtaaaatattgttcagggtactgtagcacgagtactgtagcagttgatctggactgttgatcacaaaaatgaatggctgaaaatgcatgcagtccctaagactgcacccgatctcaatccatccacatcttcgtgcgtcggcgtggcggagcagcgtcagcacggatgacggtggtgcgctggtgaggccgtcctcgtacaccccgccgtcgccgaagcacccggggccgcctcaccagcacggcggaggtggtgcgccgcccgccgatgtggtggccggttgctgttgctccgccgttggcaggacacaatggccggccaaccaagcccggcagtgtacacggcttagttattcgtaaccttgatgttacaaggtagccaactctgccattcgtgtgattggaagcccgtttgtttggggaatttgagagccatccggtgagaatatggaaaaactaaatcctacgtttcttaaaatctaagtaaaaggttagactatttgaagacccgaagattctaggaaaaaactgtagttacaataagctcccttaaacatgatttgattatgttgtcaattatcaggctggtttggtttgtgtcataaattgattttaccaattttcgtccatgtctaattttagcaagttttagcatggctgatcttagtaaggtaaagttgtgtttgaattaaagctaaaatagcctaaattaactattgaagtgacctatttttcttaggtttgctaaaatttggcttcaaaccaaatagacactaagtactactccctccgttccagaatataagtatttttagagttggacacggttattaagaaagtagatagaatttaatagaggaaggttgtgattggacaagaagtggatgtaggtgaaaaatttaaatggtggaggattgtgattgattgagaagagaatgttggtgtagaaattgttatattttgggataaattctagaggctaaaagttgttatattttgggacgaatgcagtattaaaattatcaaatattggtaatatcaatatagaccacagaccaaaccagcccatcaaaactccagctcctcaccatcaggcttccaagacctgctagtgactggttgtagcaagttccaaggactccaaagccttccagtccctccggagctgttcaagggctccggaggaagccagggcttcaagagcccaagccctgggcgtaagatgggtgatcggatgtgtagtgggacgccataaatacgcactacgcatctgccaaccacctctgacgccgctgacgagggcagacaacgcacgctattacccagagcacgcctttactcgggtaatagcaggcgcctttgggaatcgacgtcgctcccttaatgggcgcaaccctcctgtcaccgaggagctgaccaaagagccctaaagatggcccagcagccagccgcctagataattcagcgattaaggtagcgatgtaaattccccttgtacatccttgtataaatatgtaaacattgctcacagctaggcatattgaatacagaagtgatacacatacgcttgttggattttgtcccaacatttggcgcaatccatggggacgaaagaagcaagcaggcaaagaattttcataagaaaaaaatcaaacgacttatgatatgaaacaaaggtagtaaaaagaaggtttttcggacaggacgcggggtcgggagatttgtttgatgttgttcttctcgatgtcgatcatcctatgatagaacgtagccatatgcgcattggactcgcggaaagcgggcttatcctcctctctgaagcagtgagcctcatcgctcatgtccaagctgtccgcgagaagctcctcccatgtcatgggcccctttatcaggcaaggatgaggtagtgtgcgagggatgagggatcctcctccaactcctaggcgtcctcttcctccttgtcggggcctcgcctgaccccgccgccggcacggaggtggaggaattagcccccgattgcgacagcagcggcgacagagagtccagccactcctacgctgtgatcgggacggtggatccctgatgaaactggaacatcgagtaggtcgcaaatttctcttctatggtgggccttctcatctccgtctgccgaatcgcaatctagggttaggattcttcctcctcgtgaacacgatgggagaaagaaagtggttagggctgaggagaggtgacacgacgcgtccctgatatatatatgatgcagcacctaccggagccatccaccctaggagaatgaccggaggcatctactgatttaggctccggagctagctcgggagccaacacgggtcctcggagccacctaggggctccggggtcatccaaggccttcggagccatctaatggctccggggccgatcaaggccaccagagctgttcgtgggctccggagccatccaaggactccaaagccttccaggccctccgaagctgttcaagggctccagaggaagctagggcttgaagagccctgggcataagatgggtgatcggatgcgtagtggcacgccataaatacgcactacgcatctgccaaccacctctgacgccgctgacgagggcagacagcgcacgctattacccagagcacgcctttacccgagtaatagcaggcgccttcgggaatcggcgccgctcccttaatgggcgcagccctcctgtcaccgaggagctgaccaaagagccctaaagctggcccgctagccagccgcctagataaatcagcgattagggtagcgatgtaatttccccttgtacatccttgtataaatatgtaaacattgctcacagctgggcatattgaatacagaagtgatacacatacgcttgttgaattttgtcccaacatttggcgtcatccgtggggacgaaagaagcaagcaggcaaggaattttcattaagaaaaaaaaaatcaaacggcttatgatatgaaacaaaggtagcaaaaagaaggtgtatcagacaggacgcggggtcaggagatttgtttgatgttgttcttctcgatgtcgatcatcctctgatagaacctggccatatgcgccttggactcacggaaagcgggcttatcctcctctctgaagcagtgagcctcatcgctcatgtccaagctgtccgcgagaagctcctcccatgtcatgggcctctttctcaggcaaggatgaggtagtgtgcgagggatcctcctccatctcccagatgttcgcttcctcctcgctgggccttgcctgaccccgccgccggcaggtaggtggaggaattagcccccgattgcaacggcggcggcggaagagagtccagccactcccgcgcggttatcaggacggtggatccctgacgaacctagaacatagagtaggtcaccaatttctcttctgtggtgggccttctcatctccgtcttctgaatcgcaatctagggttaggattcttcctcctcgtgaacacgatatatatatatatatatatatatatatatatgtatgtatgtatgtatgtatgtatgtatgtatgtatgtatgtatgtatgtatgtatgtatgtatgtat

SEQ ID NO: 4865 - DNA, 11836 bp, Oryza sativa
tccggggtcatccaaggccttaggagccatctaagggctctggggccgatcaaggcctccggagctgtccgtgggctccggagccatccaaggactccaaagccttctagaccctccggagctgttcaagggctctgaaggaagccagggcttcaagagccttggacgtaagatgggtgatcggatcgtagtgggacgccataaatacgcactacacatctgccaaccacctctgacgctgttgatgagggcataccgcgcacgctattacccagatacccgggtaatagccggcgccctcgggaatcggcgccactcccttaatgggcgcagccctcctatcaccgaggagctgaccgaagagccctaaagctggcccaccagccaaccggctagataaattagctattagggtagcgatgtaatttccccttgtacatccttgtataaatatgtaaacattgctcacatttgggcataatgaatacagaagtgatacacatacgcttgttggattttgtcccaacatttggcgccgtccgtggggacgaaagaagcaagcaggcaaagaattttcattaagaaaaaaaatcaaactacttatgatatgaaacaatggtagtaaaaagaaggggtttaattaacacacggtgtatcggacaggacgcggggtcgggagatttgtttgatgttgttcttctcgatgtcgatcatcctccgatagaacctggccatatgcgccttgcactcgcggaaagcgggcttatcctcctcactaaagcagtgagcctcatcgctcatgtccaagctgtccgcgagaagctcctcccatgtcatgagcctctttctcaggcaaggatgaggtagcgtgcgagggatccttctccatctcccaggcgtcctcttcctcctcgctggggcctcgcctgaccctgccgtgggcagggagtccagccactcccgcgcggtgatcaggacggtggatccctaacgaacctggaacatcgagtaggtcgccaatttctcttctatggtgggccttctcatctccgcttgccgaatcacaatctagggttaggattcttcctcctcgcgaactcgatgggtgaaagaaagtggtcaggactgaggagaggcgacgtggcgcgtccctgatatatatatgttgggggaatggctccgggtagcggagccagcctccgtcatgtgatgcaacacctaccggagccattcaccccaggagaatgaccggaggcatctactgatttaggctccggagctaaccagaggctccggagccaacctaggccttcggagccacctaggggctccggggtcatccaaggccttcgaggtcatctaagtgctctggggccgatcaaggcctccgaagctgtccgtgggctccgaagccatccatagcaacccgtttgcggtgcgtgcaggagaatcgtcgaatgctcgtatggtttgatggattcgtactctcatttcacgcctaactgttagccaaaatatcagctattcacggccagatcgatcgagtgagcgcagaaggctgtgtttagttgctgaaaaaagttggaagtttggggaaagttaaaagtttgaaaaaaaagttaaaagtttatgtgtgtaggaaagttttggatatgatataatgtgatgaaaagttggaagtttagggtagctgaggtgaactaaacacggccgaagtttgacactccggccatgcacgcagcctgatgcacgcgctggtttaattacctggttttcgctgttgcttcctggagtagctgttgaacaggtgctagcgaaaaattgcgtcgggtagctttcgctgtttaattacctggttttcgctgtttgcgtcgtgttcctttccagtttaaacattaattaggctgcgttcgatatcaggagttcctaactccccctgtttttcgcgtgtacgcttttgaaactaataaacggtgtgtttttaaaaggtttatatatgaaagttgcttaaaaaaattatattatctttttttaaaaaaatagctaataattaattaatcacgcgttaatagaccattgtgttttccgtgcgtgaatgatgggttcccaacccccaccacccaacacagccaagtcattagccgtcctatttttaatactccatgatttaggaagaaataaaccgttgactgccactcgatcgccatacacacgtacaagagcagatgcaataatcctagtcagcaggctccaaaagctattatattgtttttttttattagatggagggaagagaatcgatgagagagaacggagcgggagctaatctggcgcccggcgatagcacgcgttttcacgcgcactcacgattaaaaacatattttgtgggtcccacggtcacttatccgatcccgtgcgcatcctccttcgttccaccctccggtgcttcgtcgaccgacggacggcgtcttccactagcgtaatctgagtatttctcgtcggcgagcgagaaaactccatcgcccccacagatcacgtaggcccatcctccatcctgaaccacgcacgctcatcctcgattcctcatcctcgtccaggaagtcttggcggcggaattgcagccgaccagaagcatctcatacgggcgtcggatcctgtacgcggcgaggtacgtagcgatgactgtgctcgtcttgtgcttttgcataggctgatcaatcatcattgatgaagacccgggaggatcgatgtacagatggagctaatccatcgcgagcttgctccgctatgatcaaccaccggctagctgcaaaaccgttttcctttgctgttttttcccttccttgcattttcatgcttccatgtgaatggagatggataacaggataaacaatctatcattatcttttagttgctatttctgttgtcgattttaggcagggtgactgttgcgatttcgcctaggaagaagaagagaggggaaactcgaagaagaaagatgagccagcatgcacaaaaccaaacgttttctttttctttgatgtgttcaccttcatagttcatatcacagcaatggccacaaaaataggatccacttatgatcatacatgtcaacacgtgcatacataattaattgtttgatataaaattatactgtagtcagctccctccgtctcacaatataagtattttgagtttttccttgtaacatttgaccactcgtcttattcaatttttttttgcaaatataaaaaatgaaaagttgtgcttaaaatactgtagataataaagtaagtcacaaataaaataaataataattttaaaatttttttaataagacgagtggtcaaacgttgcaaacagaaactcaaaatcccttatattatgggagggagtacaaaatatggttagagccggcagtcggcggcactattgaccttgctcacgtaatcctgcccatataaagagctcacgtggccacacatagttcgtcgatcgatcggctcccttcccgccatggagggttcgtctcgatctccttgcgtttgcatgctgctgctgctgcttcacgtcgtcctgctcgctccggtgctccaagcacggctgctcggactcggacatggacgtcgtctgctggtggcgccgccgctaataatgctgccggtctcgattctattgccgaagcggagacggcaggcgtaacaaaaaaaaaaaaaaacgcaatgcacttgtcgtgtccgaccttttttttttcggaaaaagtatacttcgactccttcaactatgacccgagtatgattcatgacctccaatcacaaaaccttgactcctccaactatcaaaaccaatacaaactatatccctcggtggttttggaagcggttttcgctgacgtggcacttacgtggcagtgttgacccggtcttcgtcccacgtgtcgcttatgtggcattagagtaaaaaaatattgtgggaccaacatgtcattcaaaaaaaaaagtaggacccaccgacatatgggccccacataattatcctcagctctccccctctttctttcatcttttctactcccctcaccttcctccatcactagagacggggcggcggcgacggtgacagtgacggcgcacgggggaggagctcgccggccgtccacgcgagggggaggagcccgctagccatcccgcgagctcgccgcccatccgcgcacagagggaggaggtcgccggccgtccgcgcgctgggaaggaggtcgccggcgtccgcgcgggagaaggtctccggccgtccgcgcacagagggaggaggtcgccggccgtccgtgcgcgggcgaggaggtcgccggcgtccgcgcgccgggaagaaggtcgccggcgtccgcgcgccggggagaaggtccccagccgtccacgcgcgggggaggaggtcgccgtctgtccgcgcgcgggggacgaggtcgccggcgtccgcgcacggggtagaagctcgccgccggccgtccgcgcgctggggacgaggtcgccggaatccgcgcacgggggaggagctcgcggaccatccgtgtgccaccgcgacgccatcgtcacctctccccggccggccattgtcacctctcctcttcgtgcttcgttgcttcggccagccgcctctagtgatggaaggtgagaggcgtggaaaagatgaaagagagagggggagagatgacgatgacatgtggggcccacgtgtcggtgggtcccacatttttttttgaatgacatgtcggtcccacaatttttttaactctaatgccacgtaagggacacgtcgacgacacgtgggacgaagagcgggtcaacactgccacgtaggcgccacatcagccaaaaccgcttccaaaaccaccaaaggatatagtttgcatcggttttgatagttggaggagtctatatacctggttttgtggttcgaggatatgaatcatactagttgagggagtcaaagtataatttttcctttttttttcccaccgggccacggcgcccatgggccaggcccaggcgaggcatcctattccgtgacgtggataaatttctttttcgtctcccctgatcgcttctttccccatcgagagttcgccagaaggaagaaacctaaccctaagattgcgattcggcggcagcgacgaggcgcgggcggagatgaggaggcccaccatagaagagaaactggcgacctactccatgttccaggttcgtcagggatccaccgtcccgatcaccgcgcgggagtggctggactctgtgatggctggagttggctcgatctctctggcggtgcggggtgctggctcgatctcggcggcggcaggagcgggagatggggcttgctcgagctcagtggcggtggcggggactggctcgatctcggcggcgggagcggcagatgggccttcctcaagctcagtggcggtggcggggactggcttgatctcggcggcgggagcggcagatggggcttgctcgagctcagtggcggtggcggggactggctcgatctcggcggcgcgagcgggagatgggcctttctcgagctcagtggcgggggcgggggctggctccatctcggcgacggcgggagcgggacatggagctgggtcgagctcagttgcggcggcggggtcaggcgaagccccggcgaggaggaagaggacgcctgggagatggaggaggatccctcgcacgctacctcatccttgcctgagaaagaggcccatgacatgggaggagcttctcgcggacagcttggacatgagcgatgaggttcactgcttcagagaggaggataagcccgctttccgcaagtccaaggcgcatatggccaggttctatcagaggatgatcgacatcgagaagaacaacatcaaacaaatctcctgaccccgcgtcctgtctgatacaccttctttttgctacctttgtttcatatcataagccgtttgattttttttttcttaatgaaaattccttgcctgcttgcttctttcgtccccacggatgacgccaaatgttgggacaaaattcaacaagcgtatgtgtatcacttctgtattcaatatgcccagctgtgagcaatgtttacatatttatacaaggatgtacaaggggaaattacatcgctaccctaatcgctgatttatctaggcggctggctagcgggccagctttagggctctttggtcagctcctcggtgacaggagggctgcgcccattaagggagcggcgccgattcccgaaggcgcctgctattactcgggtaaaggcgtgctctgggtaatagcgtgcgctgtctgccctcgtcagcggcgtcagaggtggttggcagatgcgtagtgcgtatttatggcgtgccactacgcatccgatcacccatcttatgcccagggctcttcaagccctagcttcctctggagcccttgaacagcttcggagggcctggaaggctttggagtccttggatggctccggagcccacgaacagctctggtggccttgatcggccccggagccattagatggctccgaaggccttggatgaccccggagcccctaggtggctccgaggacccgtgttggctcccgagctagctccggagcctaaatcagtagatgcctccggtcattctcctagggtggatggctccggtaggtgctgcatcatatatatatcagggacgcgtcgtgtcacctctcctcagccctaaccactttctttctcccatcgtgttcacgaggaggaagaatcctaaccctagattgcgattcggcagacggagatgagaaggcccaccatagaagagaaatttgcgacctactcgatgttccagtttcatcagggatccaccgtcccgatcacagcgcaggagtggctggactctctgtcgccgctgctgtcgcaatcgggggctaattcctccacctccgtgccggcggcggggtcaggcgaggccccgacgaggaggaagaggacgcctaggagttggaggaggatccctcatccctcgcacactacctcatccttgcctaataaaggggcccatgacatgggaggagcttctcgcggacagcttggacatgagcgatgaggctcactgcttcagagaggaggataagcccgctttccgcgagtccaatgcgcatatggctacgttctatcataggatgatcgacatcgagaagaacaacatcaaacaaatctcccgaccccgcgtcctgtccgaaaaaccttctttttactacctttgtttcatatcataagtcgtttgatttttttcttatgaatattctttgcctgcttgcttctttcgtccccacggattgcgccaaatgttgggacaaaatccaacaagcgtatgtgtatcacttctgtattcaatatgcctagctgtgagcaatgtttacatatttatacaaggatgtacaaggggaatttacatcgctaccttaatcgctgaattatctaggcggctggctgctgggccatctttagggctctttggtcagctcctcggtgacaggagggttgcgcccattaagggagcgacgtcgattcccaaaggcgcctgctattacccgagtaaaggcgtgctctgggtaatagcgtgcgttgtctgccctcgtcagcggcgtcagaggtggttggcagatgcgtagtgcgtatttatggcgtcccactacacatccgatcacccatcttacgcccagggcttgggctcttgaagccctggcttcctccggagcccttgaacagctccggagggactggaaggctttggagtccttggaacttgctacaaccagtcactagcaggtcttggaagcctgatggtgaggagctgaagttttgatgggctggtttggtctgtggtctatattgatattaccaatatttgataattttaatactgcattcgtcccaaaatataacaacttttagcctctagaatttatcccaaaatataacaatttctacaccaacattctcttctcaatcaatcacaatcctccaccatttaaatttttcacctacatccacttcttgtccaatcacaaccttcctctattaaattctatctactttcttaataaccgtgtccaactctaaaaatacttatattctggaacggagggagtagtacttagtgtctatttggtttgaagccaaattttagcaaacctaagaaaaataggtcacttcaatagttaatttaggctattttagctttaattcaaacacaactttaccttactaagatcagccatgctaaaacttgctaaaattagacatggacgaaaattggtaaaatcaatttatgacacaaaccaaaccagcctgataattgacaacataatcaaatcatgtttaagggagcttattgtaactacagttttttcctagaatcttcgggtcttcaaatagtctaaccttttacttagattttaagaaacgtaggatttagtttttccatattctcaccggatggctctcaaattccccaaacaaacgggcttccaatcacacgaatggcagagttggctaccttgtaacatcaaggttacgaataactaagccgtgtacactgccgggcttggttggccggccattgtgtcctgccaacggcggagcaacagcaaccggccaccacatcggcgggcggcgcaccacctccgccgtgctggtgaggcggccccgggtgcttcggcgacggcggggtgtacgaggacggcctcaccagcgcaccaccgtcatccgtgctgacgctgctccgccacgccgacgcacgaagatgtggatggattgagatcgggtgcagtcttagggactgcatgcattttcagccattcatttttgtgatcaacagtccagatcaactgctacagtactcgtgctacagtaccctgaacaatattttacgccgtggtacttttgctacagtaaccggcctaatccttaccgttggatttagatccaacgtagcagctacaactgcttaagttgcagtccatactactactgcatttaatccggatccgatgtggataggagtagtaggcttctcctgaagcgagaaaacagcaggagaaatttcgtcagtgtaggacagacaaattagctatcaaaccattgttataatattttcacatggtcaatgcgtgatgcgtttcgtcagtgaatgacaaattagctaccaaatgaaatgcactcttctctgtttctctctattttcacgtgatccatgcgagtgaaagcgtctatgttgcctacctagcatccgtgcttgcaacagctgagcgaagaggaggaagaagcagaggagaaggagaagactatgagacggtgatctatccatgatcgatagatgcaggagcaagctgaagcttgctgtagatcaatcggtacacggatgaagaaaggttttgggaacactggcagtatatatagcggctagagaccaccgaccttgtgtagttgacgagctgtcgaggtttcaactttcaagcattactagtctattaagtcgcgttttcaggcgactgtaaccaccatctttattaaatacttttacacgttatattgtactccctccatctatttttgataggcatattttctaaatctgaaaaatttatttttgataagcatatttcaatccaacaacctatcctcttaatgattttctagaatttaatgcatgactctctattcttccacataagattagctacatggacatcgagaaatgtaaatattcataaatcgcttctttacgagaaataactagtagtatatttaaatggatgataggtacaattacttattcttggtctgtgtgtcaagatgaaatatgactatcaaaagtagatggagagagtagtaattagtttaaatttgtaacaactactcacttaaaactatgtaatagactgacatggtaatataaagtttgcgataaattatgctaagttacttacatggccatgagtagccacccttggtcgaatttcctcataggtgtaaacatgttctgtttaggtttaggcgtgttattttataaggctgaatcagatggaatatggaaggttgaaagtttaatgattcgaggaacccatggatgaaaaatacataaatggtatttaaagaaaagaaagtcagatgtagcatttttcttaaaaaaaatgcatatatatgttctattccattatggtaaaagagtacaccctatacctcttgttgacacaaactctttagcccctctttgtagcccatgcattagtgataaagagcctctaaagaaaatgcatgatttttgtaggattactggattaatatatttattctccattaaattattgcaaggattatacattcaaaatgacctttaatttaacatgtagatcgtattccattgaaatttgtcagttttccatcatgtcttatactccctccatattttaacgtgtgacgtcgttgactttttatcaacgtttaactattcgtcttatttaaattttttgtgcaaatataaaaatatttatatcatgcttaaataatatttgatgacaaatcaagttataataaaataaatgataattacataaatattttgaataaaataaatggttaaacgttagtcaaaaagtcaacgacgtcgtacattcaaatacggagggagtagcatatttattagaacatacttatttttactatacttatacttatgtaagtctagatacattttatatgtattatacttatgtgaatttaggtaaattaaaatatgtttatttgttaaacactcatttaaaaatatgtgtgaatctatggatctatttgtaaataaatttttactttgtaaaataaatattgcaaagggtcattacatctttatctttttagccgcttttgtttttctcatttctctcaatatccgatgaatccttccaacctaagccacatgaaggttccggattcctcctttccatttctatatcctttcttcaccatcacatttcatccaacggttgatattggtttcacctatgaatccaacggtcatatttcacttgatgacgtggctcaccctagaagcattgtgaggaaaacttttcgggtgtgtttggataatgggaaatgggaggtgggattgggattgagattggaaaatgaatgaagagttaggattaaatggaagagggaaaataaacggttaggatttaaaaatatcttttggtgggtggaaaatcatttccttttctcgttagccaaacactgccttcacttacagagatacattagcaatctaccatgtgcacagccgagtggacacaactaaagatgctctcattttttttggggggcccaaagtggctacctgctttgtttctcgatgcctgtttaactgtagaatagtaatgaagctagaatatccctaccagctggctacctctaaatgataaaattggaaccaacagaactgcttcagtgcttcgctatatctagattattgctcatctcgtgtcaagattcgcagatttcaaatagattagagtgccaacatttcaatagtcacaaattgcagattataattatgatatggcagtgacaatatgacatggtatttgacaaaaccatgaagtatgtagcggtactagatcaaccactggataaaacatgtctaggctctagaatcctataaatgtaacggaagattaccggcctctgttttgttccttcaggcattcttgaaaaatattcaggcgactgaaccatagtacaaacaacaagccgcagagg

SEQ ID NO: 4866 - DNA, 40559 bp, Oryza sativa
attccccgtcttgtgatgcagcacctaccggagccatccaccccaggagaatgaccggaggcatctactgatttaggctccggagctaactagaggcgctggagccaacccgagccttcggagccacctaggtgctccggggtcatccaaggccttcggagccatctaagggctctggggccgatcaaggcctccggagctgtccgtgggctccagagccatccaaggactccaaagccttctagaccctctggagctgttcaagggctccgaaggaagccagggcttcaagagccttggacgtaagatgggtgatcggatcgtagtgggacgccataaatacgcactacacatctgccaaccacctctgacgctgttgatgagggcataccgcgcacgctattacccagatacccgggtaatagccggcgccctcgggaatcggcgccactcccttaatgggcgcagccctcctatcaccgaggagctgaccgaagagccctaaagctggcccaccagccaaccggctagataaattagctattagggtagcgatgtaatttccccttgtacatccttgtataaatatgtaaacattgctcacatttgggcataatgaatacagaagtgatacacatacgcttgttggattttgtcccaacatttggcgccgtctgtggggacgaaagaagcaagcaggcaaagaattttcattaagaaaaaaaaatcaaactacttatgatatgaaacaatggtagtaaaaagaaggggtttaattaacacacggtgtatcggacaggacgcggggtcgggagatttgtttgatgttgttcttctcgatgtcgatcatcctccgatagaacctggccatatgcaccttgcactcgcggaaagcgggcttatcctcctcactaaagcagtgagcctcatcgcttatgtccaagctgtccgcgagaagctcctcccatgtcatgagcctctttctcaggcaaggatgaggtagcgtgcgagggatccttctccatctcccaggcgtcctcttcctcctcactggggcctcgcctgaccccgccgtgggcagggaggtggcagaattagcccccgattgcgacggcggcggtggcagagagtccagccactcccgcgcggtgatcaggacggtggatccctaacgaacctggaacatcgagtaggtcgccaatttctcttctatggtgggccttctcatctccgcttgccgaatcacaatctagggttaggattcttcctcctcgcgactcgatgggtgaaagaaagtggtcaggactgaggagaggcgacgtggcgcgtccctaatatatatatgttgggggaatggctccgggtagcggagccagcctccgtcatgtgatgcaacacctaccggagccattcaccccaggagaatgaccggaggcatctactgatttaggctccggagccaacccaggccttcggagccacctaggggctccggggtcatccaaggccttcgaggtcatctaagtgctctggggccgatcaaggcctccgaagctgtccgtgggctccgaagccatccatagcaacccgtttgcggtgcgtgcaggagaatcgtcgaatgctcgtatggtttgatggattcgtactctcatttcacgcctaactgttagccaaaatatcagctattcacggccagatcgatcgagtgagcgcagaaggctgtgtttagttgctgaaaaaagttggaagtttggggaaagttaaaagtttgaaaaaaaagttaaaagtttatgtgtgtaggaaagttttggatatgatataatgtgatgaaaagttggaagtttagggtagctgaggtgaactaaacacggccgaagtttgacactccggccatgcacgcagcctgatgcacgcgctggtttaattacctggttttcgctgttgcttcctggagtagctgttgaacaggtgctagcgaaaaattgcgtcgggtagctttcgctgtttaattacctggttttcgctgtttgcgtcgtgttcctttccagtttaaacattaattaggctgcgttcgatatcaggagttcctaactccccctgtttttcgcgtgtacgcttttgaaactaataaacggtgtgtttttaaaaggtttatatatgaaagttgcttaaaaaaattatattatctttttttaaaaaaatagctaataattaattaatcacgcgttaatagaccattgtgttttccgtgcgtgaatgatgggttcccaacccccaccacccaacacagccaagtcattagccgtcctatttttaatactccatgatttaggaagaaataaaccgttgactgccactcgatcgccatacacacgtacaagagcagatgcaataatcctagtcagcaggctccaaaagctattatattgtttttttttattagatggagggaagagaatcgatgagagagaacggagcgggagctaatctggcgcccggcgatagcacgcgttttcacgcgcactcacgattaaaaacatattttgtgggtcccacggtcacttatccgatcccgtgcgcatcctccttcgttccaccctccggtgcttcgtcgaccgacggacggcgtcttccactagcgtaatctgagtatttctcgtcggcgagcgagaaaactccatcgcccccacagatcacgtaggcccatcctccatcctgaaccacgcacgctcatcctcgattcctcatcctcgtccaggaagtcttggcggcggaattgcagccgaccagaagcatctcatacgggcgtcggatcctgtacgcggcgaggtacgtagcgatgactgtgctcgtcttgtgcttttgcataggctgatcaatcatcattgatgaagacccgggaggatcgatgtacagatggagctaatccatcgcgagcttgctccgctatgatcaaccaccggctagctgcaaaaccgttttcctttgctgttttttcccttccttgcattttcatgcttccatgtgaatggagatggataacaggataaacaatctatcattatcttttagttgctatttctgttgtcgattttaggcagggtgactgttgcgatttcgcctaggaagaagaagagaggggaaactcgaagaagaaagatgagccagcatgcacaaaaccaaacgttttctttttctttgatgtgttcaccttcatagttcatatcacagcaatggccacaaaaataggatccacttatgatcatacatgtcaacacgtgcatacataattaattgtttgatataaaattatactgtagtcagctccctccgtctcacaatataagtattttgagtttttccttgtaacatttgaccactcgtcttattcaatttttttttgcaaatataaaaaatgaaaagttgtgcttaaaatactgtagataataaagtaagtcacaaataaaataaataataattttaaaatttttttaataagacgagtggtcaaacgttgcaaacagaaactcaaaatcccttatattatgggagggagtacaaaatatggttagagccggcagtcggcggcactattgaccttgctcacgtaatcctgcccatataaagagctcacgtggccacacatagttcgtcgatcgatcggctcccttcccgccatggagggttcgtctcgatctccttgcgtttgcatgctgctgctgctgcttcacgtcgtcctgctcgctccggtgctccaagcacggctgctcggactcggacatggacgtcgtctgctggtggcgccgccgctaataatgctgccggtctcgattctattgccgaagcggagacggcaggcgtaacaaaaaaaaaaaaaaacgcaatgcacttgtcgtgtccgaccttttttttttcggaaaaagtatacttcgactccttcaactatgacccgagtatgattcatgacctccaatcacaaaaccttgactcctccaactatcaaaaccaatacaaactatatccctcggtggttttggaagcggttttcgctgacgtggcacttacgtggcagtgttgacccggtcttcgtcccacgtgtcgcttatgtggcattagagtaaaaaaatattgtgggaccaacatgtcattcaaaaaaaaaagtaggacccaccgacatatgggccccacataattatcctcagctctccccctctttctttcatcttttctactcccctcaccttcctccatcactagagacggggcggcggcgacggtgacagtgacggcgcacgggggaggagctcgccggccgtccacgcgagggggaggagcccgctagccatcccgcgagctcgccgcccatccgcgcacagagggaggaggtcgccggccgtccgcgcgctggggaggaggtcgccggcgtccgcgcgggaggaggtctccggccgtccgcgcacagagggaggaggtcgccggccgtccgtgcgcgggcgaggaggtcgccggcgtccgcgcgccggggaggaggtcgccggcgtccgcgcgccggggaggaggtcgccagccgtccacgcgcgggggaggaggtcgccggccgtccgcgcgcgggggacgaggtcgccggcgtccgcgcacgggggaggagctcgccgccggccgtccgcgcgctggggacgaggtcgccggaatccgcgcacgggggaggagctcgcggaccatccgtgtgccaccgcgacgccatcgtcacctctccccggccggccattgtcacctctcctcttcgtgcttcgttgcttcggccagccgcctctagtgatggaaggtgagaggcgtggaaaagatgaaagagagagggggagagatgacgatgacatgtggggcccacgtgtcggtgggtcccacatttttttttgaatgacatgtcggtcccacaatttttttaactctaatgccacgtaagcgacacgtcgacgacacgtgggacgaagagcgggtcaacactgccacgtaggcgccacatcagccaaaaccgcttccaaaaccaccaaaggatatagtttgcatcggttttgatagttggaggagtctatatacctggttttgtggttcgaggatatgaatcatactagttgagggagtcaaagtataatttttcctttttttttcccaccgggccacggcgcccatgggccaggcccaggcgaggcatcctattccgtgacgtggataaatttctttttcgtctcccctgatcgcttctttccccatcgagagttcgccagaaggaagaaacctaaccctaagattgcgattcggcggcagcgacgaggcgcgggcggagatgaggaggcccaccatagaagagaaactggcgacctactccatgttccaggttcgtcagggatccaccgtcccgatcaccgcgcgggagtggctggactctgtgatggctggagttggctcgatctctctggcggtgcggggtgctggctcgatctcggcggcggcaggagcgggagatggggcttgctcgagctcagtggcggtggcggggactggctcgatctcggcggcgcgagcgggagatgggcctttctcgagctcagtggcgggggcgggggctggctccatctcggcgacggcgggagcgggacatggagctgggtcgagctcagttgcggcggcggggtcaggcgaagccccggcgaggaggaagaggacgcctgggagatggaggaggatccctcgcacgctacctcatccttgcctgagaaagaggcccatgacatgggaggagcttctcgcggacagcttggacatgagcgatgaggttcactgcttcagagaggaggataagcccgctttccgcaagtccaaggcgcagatggccaggttctatcagaggatgatcgacatcgagaataacaagatcaaacaaatcttccgaccccgcgtcccatccgatacacagtatgttaaaccccttcttctttctttcttttttttttctcatgggtatgtcaactacaccactaagaaaacatcatacaaatagaactttcctttcgtagatcctaacacacgtgaaatagcacacccattatattcctcattacaaagttcatgtgaaaaactatcattgtttttatcacttataaaacagtagtgaccgcaaacaagacatcgataattcagcttagaatagatctcctaaggacacaaggaagaggtggagacagaaaagccaaagttacttaatttggagacgaattctgtacaatcctttaaatgggtaaactgacattacaacttgcaaccattttaattaataagaaatgtggattttttaagctgcatttccattcttggtcactgaaacagttaaattataaaacttcagttgattcatttagctagtggtaagagatagaacatattaacaattgaactcttgtatatgcaacggatgtaatagttgaagtacgctatcgtcatagtattttaactcatcagatgcatcatgttcctgtgcaaacataggtggccatcttttatacagtctagcaactctttggtacttggccaaccttcacaaaaggtgcttgcatttataaattgaacaatcaaaggtcagatatgcgacagcaacagtgaatctgaaagaatgtcaggtactaacttctagagttagtttgaccatctcagcatcccaggatcaaataaaaattttcaggatggtttaagaatgtgcagtccaacttaggagttgccattagtcaattctctgagtttgaaaacaacactaaaatctgagctaattttaaaggaatgatccatcctgtgtgctgcactaatattcaataattatgttccaatctggatggcagacacaatctggatgggcttgaccaaggtttcatgcatgttgggtaatgaatattcccggggacaaaattaagcttgggtatgggtattcactattgatgcccgccatgcccaattgtcatccctatctatattcctgacaaaattaagtgaatacctaaaattggttttgtccaacacactgttgaatctattactcttttgaatatattgcagcgagcaacatttgaccgcagaagagatggaggcagagttcgctggcaagaaagtttcttcccaagcttgtcactttgccaatttagcaattaaccactacaacaatattgaggagaacattgtaatagcccttttccttgtttgctttccatgacatcatgagtctcaatgttgtaaactaataaacctttctatttttgtctgttcaggttaagattgagctttgtactgttcttttatcaaattgttttcatgagatctgtgggtccacatacgcccatgtcaactttactgccagggctgaggatgatgatcaggctaagaagagactatactttgcagagctcaagttgaatccggatcttctggcaaagaggagggaacgctttgtagagttgagccttgatccaaatattgttggatgtgctgatgatatcgagcccatgtgtgtcgtctctatacacaatcttcagggttcttgttttggtatgtttattactatcgacttatttactgtattctcaatttactgtgttctgattaatatgcttgcttatttgtaattactgtaaggtctctatttatgtttgtaagtgtgatagtaggacctcagcgatttattcgatatgttgatgttgcttttgtaggtggatgccatgagatcaacaggagaattgattatgtaatgatcaggaatcaggactacgagcgttgtcacgcatgtagcgatcgtatcaagcatccatacgggacagaatttattgcagggcatgatagttccaagattccgtattacactgcaggctgatgtaataataatatgattagagctatgacttggagtattgttagaatttagactctttatttatgctttgacatctatgtgcgcgagtgatctcttctaatgcgcaaatattacctgatgaagtagccaggatctttaatgaagcctctatggtatgtctactgtaaccaggatcattaatgctctattcagttgctccctctgggctagtattattagtggatgaagaaaattgtcgtttgaacgttctttttagttatgggacgagatataaatcataactacatgctttaaatcatctataaatcatctatagtgaattcaatactctctccatcccaaaaatataagggcatgtacaaaggtaaagtctaatatggtctcttagttagtacataatattatttagagactatactactgccatagttgagacaccaatcactctttaataattaatgcaccaaaatattattttactactacctttcattccttttctccactctcataacaaaatttcttttaataaatgtttagagtcaactctgagctgttatatgcatagcaatcatacttttcttttctctcctctctcttccacatttttcttctctcctctctctttcacatcatcaaatttacttgtatggcaataaagagagactgctattatacacggttgtacatgctctaaggcacaaccactcctgacacaaagagcaagaaagaatttaatcacctccttaattgaatcacatccgtacatgcaagtaatgtgattgggagacttaatggtacatgaattaaaataaaccaaatttaaagaaccaagagatgataattaatgtatgcatgcacgccttatattatgagacataataaaaaagtggttgtgtcttatattttaggatggagggagtagctaatacatacaatagttacctataaacatatactacactattgatacatggtcccacttgccctacacatattgcatcttgcagtccgtgctacggctggctataaatctgtagcccgctgcttgtttctctccccgatatgtgtttatagctgacttatagtctggtatcactggtggagaagtagtttttactcccggttcgtaaccccctttagtctcggttttccaaccgggactacgaatccgggactaaagatcgctatctttagtcccgggtgaaataaccgggagtaaaaatctatctttagtcctggttggtgttaccaatcgggactaaagatggagcatgccaaccgggactaaagatagagccaggctgatccctggctgctcctttattatattcttttcttcattgtttttaatatattgatttcactccatccccatccccaaaatcccaaatcaattatcacctccaaatccttaaatcgatcatctccaaatacatcacaaaatctttaaaaaaaaattacatcacaacttctacaaaattcatcacaaatacatcacatattcatatcacacacaaatcaaatacatctcaaatccggatcataaattctcaaaaaaaaaaaacaaaacaagccgccatcttccacctgccgcccagccgccaccttccgccttctgccagccagtgccgcgcgccggccgctgcttgttaatggctgcaataatggctgcaatctaggaaactaaataatggctgcaatgcagcatgcaagacactcatctatagatagccaaaaggcctgaggcccgacgcttggcccacggcacagcattttggcccggcccaagcacggcacgacccaaacggggtcgggcccgtgccggtccggcccaatcaccgggcgtgcctggcccctccaccggcacgttgggccggggcggcacggcacgatgggccgcaggccaggcccgacacataaacaacagggagtaaaaatagacattatatgccacggtcgaagaatagggacgtcaaatagacttatttaactatatatatgtcagcccaacgaggagggagggacaatagatttattttagctatatatatgtcacaacccaaagagaagggagggaaaatagacttattttaaaaaaggcacggtgggccacccgtgccttcgggctagcccggcatggcccgactactagtgggccgtgcctgggccagaggtgcagcccataggccggcacagcccgactactagcaagtgccgaccaggtcgtgcctgtgccgaaccgtgccgggcaggccttttggccatctatacagtcatgccgtgcagggcttgcgagcgtgacatcatgtatgacgaggagtctttgaccagcgactccctggatgaggccaacgagagagtgcatgtggtcctggactccatggacgctgccggcgatgaagtgctcgtggtcgtcgactccatggacgatagagccggcgaggaagtgtttgtgaacaacgagggtgatggttgaccaccgactccatggacaacacggccggcgaggaattgcacgtacgtgatcgccgactccatggacgatggctggctagtgactccatcaaaagtgcaatctccatttgcatcaaattttgaacaagtaagcacttaagaacattttagggatgctatcactggtggagaagtgctttttactcccggttcgtaaccccctgtagtcacggttttccaaccggaaaaccgggactacgaatccgggactaaagatcgctatctttagtcccggttcaaataaccgggattaaagatgaatccgggattaaatatccctatttttagtcctagttagtgttaccaaccgggagtaaagagagaatagtggtagtcccagttagtccccttttcttttttttttattttctcccaaatcaagtgggaagcatatccccaaatcaaagtaacatcctaaatccacatcataaataaagtaacatcacaaatcttaaagttacatatacacacaaatcaaatacatcacaaatcctaaaaagttacacacaaatcaaatatatcacaggtcatctcagatccatccaataaatcacaaaattatacatgtgaatcacaaattaaaaaaacagaaaacaacgccgttgccgctgtccgccacggccgccggcccgccgccgcctgccacggtcgccggcccgccaccgggcacggccccgccggccgccgcctgccggatgggaaggggaggatgggcaggaaaggggagaggagaaggtataggaaggggaggggatgaggaaggggaagaggtggaggggaagggaggatgggcaggaagggaggggagaggggaggggatcggatgaggaaggggaggaggtggaggggatgaggttgtaggaaacggaggaagaagggaaagaaggggagagattcgatctgtggaggagaggataagggatagggattatattgggaacaccaaccggatccggttggtgacaccaaccgggactaaagatcctcggccccctgacatcaatctgacaggggatgaaccgggactaaagatgatttttagttcggttggtaagaatgcctctgtggttttcaaccgggactaaagattatttttagtcccggttctttttggaaccaggattattgtggttttgggtcgatccagcaaagattatttctccaccagtgtattcttgcttctaacacgtacgtgtaggttctccttcatttgcacgcaaagaatatttctcagatttcctagtaaatagaaccaattttcatcaacaaaaacaacatcaaacatgcaggcccttaaaccctggatcaagcatggatacgcaccattgcaaccttgctttcttgtttgcatctatcaagtgtgactttatagcattcgaatgacatctactgagaccttctcgtattattctttgcaccttgtacttactcaaatgtaatgtaatggagcacaaagatctcaaagcgttgtttgttccttgaaaggaatgccatccagggttttatattttggaaagcaagaaaatttcggtgggcaccgaaatttcgaaaaaaaaatttgggatatttgcgaacgaatgttttgaaatttaaatatatttttactgaatttgaacaaattataaccaaattcataaatatttgaaaaaattcaaaaatttcactcgaaatatttgcttgccggtgggaaggcgaaattcccgaaatttccatccctgatgccatctagcacaaataaatctacttgaactcgcttgcggccaaagttgcatattctattattaacattaacatcaaccgtaatgcattgatcaaaataacttttaccttgcttctaaatacgttgaactgatcgaatgcgaacgttgaataactctgcaacttccctcgtcacatggcgctccagttttccatttgtgcttcttaatgcattagatatttgttttcgtgttgtacttggcacatctttcgtgcctgcgagaaaaaaaggctttttgacatttcgtttatgagtgcattattccttattccaggagtcaagatacaaggtggccaaacgggccgggccaaacaggcggcccggggcacggccgaacctgtagcaggcacggcccggcacggcctgctacagtaacgggccgtgccggcacggcacgagtagccgtgccgtgcttgggccgctggccgagcccgcgggccggcacggcacggcacggctactgtagcggcacggcacggcacggcccgtttcgccggcggcccgtcaggcgcggacagggcgggcggcggtcgaatgggaaggcgccacgtggcactaacggctatttgaccgttcaaatttgaaaataaccgttgggaggctaaaaaattcataaaaatttcgaaaaaattccaaaaaatctcaaatttcgccctataaatagggcatgaaccccagccatttctcctcatcccacactcctcatcttgtgctctcaagtgttttaagtgctctctttgttctcaagtgtgcattttttttgattttgacaaaatttgctcaaattttgtcaaaaatcaaaattagtttcgtagttcaacagtttgatcgcagaggtttgaagagctcgcggttggaaagatgtaagtaatattcaaatttgtgtattatttgtattgtgtttgtgaattcaataaatattcgaaaatttgtttatgtcggtttaaattttcagaatggatccgaactttccataccagtcgccgtcgttcaccttgggtgatttcgaccccaactacatgtcggggtttgacggtacctccggatcggctccaactccaccatctgtggaggaggtaccggttcatacggctgtcgttgaggaggtaccggttcaggcggcgacagcttcggaaggattttccggaaccgcgagcggaagtgtttcgacacacaccggctcgaagagatcgagaacctccgttgtgtggcaaaacttcgacgagataaaggaaacatgccccgacggaagggaggtatcgaaagcccgttgtagaatatgtaggcaaattttatctgctcgttcttctggtggtacaggtcacctcaagcgccatgcggagtcgtgtgccaagaagcaaggaatacaactccggcagcagcaacttatggtaaacccagacggtacggtacgcagttgggagtacgatcccatggttgctcgggaatctcttgtccggttaatcgccaggcaagatttacccctgaactttggggagtcccctgcttttgaacattacattcagcaatctcataaccctaggtttaaagctgtgagtaggcaaacatcaactagagatttagagaatgtttatcacaaggaagcaactgcacttaaggaactgtttagtacatgtactttctctgttagtgttacttcagatatatggagtagtagagctagagaggattatcttagcgtagttgttcattttgttgatgatgattggcaattacaaaagagagttttagggcttaggttaatagatgtctcacatacaggagaaaacatagctgaaagaattagggaagtaattaatgaatttaatcttgctgataaaatatttgctgtcaccctagataatgcatctgctaattctagggctattgaaatattgcaacctttattttgtgtgtatgctcaatcttttctactccatcagcgttgtgcatgtcatataattaatttgattgttaagactggcatgaagagggtaggtgaccacatcgatgctgttcgtcaagcaatcgcgtggttaactgcttctaacccgcggattgctgtatggaagaggttttgcaatgcggccggtgtgaaagctcgtaagtttgccaccgatgcagagcatcgcgtggaatgcaacgtatttaatgttaaaagttgttttaccttatagtagtttactttctgattttgttcagtcacgtggtggcccaagaaacagtgacgggtcttcagtactgaacgagcatgtttgggcaattgtccaaaaatttcaccaatttctagaaactttttatgattgtactctaactttgtcacaagtttattatccaactgctaatataattttgcacaaccttcttgaaattgctactttatttaaagaatacgaaaatgatgacgttctaactgaacctgtctttcacatgaaacaaaaatatttgaaatattggaaaaatatacctatgttatatgcttttgcttttgttttagatcctaggtgtaaattaaggggattgtctgctattttatcacttgttggagatactataggtgtagattatagttctttttatactgaggttagacgtaaattatatgaggtttttggaagatatgaagtaaagtttcaggaagttcgccagcagagaccccctcctatccccactacaggtaagaagaagatacagtggggtaggatttggggtggatcgtcttcaatccaaggtggtggcagttcgtcggctacaagtggagacgcctcttcgcatgttgtggccgaagagttgtccggttatttggacaacgacgccatccaccacgaagcacaagatttcaacgtcctcgggtggtggaatgaccacaagataacatatcatgtgctttcaaaactagcacgggatgtgttgacggtgcccgtgtcgacggtgtcctccgaatcggccttcagtctatgcggccgaatcatcgaagaccggaggatgactctgcgcagcgaccacgtcgaaatgctactaagcgttaaagactgggagcttgctcgacaacatgcccaatacactgcggacaaccaagaattggccgcccagttcgagcaactctacctggatccagaccaaccccagtagaattttgttagaaatagttctgacctttgagctgtactcttttctttgtcatggttttctcattttccactatgagtttttacatgacaaagtttttaacgaggcagcatgtatcattgtatcctgtaatgatataaacatcaataaaggtcattactatttttaacaaattcttttgcaatattttcgcaagtgtggatttatctttaaattatttcaaaataatgaatcacaatctatatttttaaatttttcaacacaacaaaaaataccattttttcttttttttaacattagcaaatcattacttttttaaaaaacttttatttccattttttaaataccattttttcattttttaacattagtaaatcattactttttttaaacattttggatccatttttaattttttttttccttatacatttcctttgcttttttttttaaaaaaaaacactgtgcactggcggcctggcggcctggcggccagtgcagctcagctgccggcctgccttcacgggccgccgtgccccgaacggcccgtgggccgcaggcgtgccgtgccggcacgggcacggcccggccatccacgggccgtgcttgggccggcggctcggcacgtgggccggcacggcacggcccgtttcatcagccgtgcctaacgggccgtgccgaaacgggccgtgccggacccgtgcccgtgccgggccgggccgtgccgcccgtttggacacctatacagatacacttaacatagtggataattaaataacatagtttagtaatatgcccatgctaaacgctacggtgaaattctatgtctttaattaaactttaaaatggattcggatgccgtgaatagaaaagttatatagagtacaagaaaatatattttccgcatgtcacgaatacagatgttccattccattttttgttatgtgtgctttttgaacaaaattaatacaccctgttcaattcacaaatggtaatcatcatcgatcaataacacccctaaccgtacgaattttctcgttttttttggaattttttcggctcctcaaaaaggttaagcgtggttggctatttttgcaaaaagctcctcgtgtttgtagaaaatatcgcacagatgcttaaatcgactaacaacccaccatattttatccggaaaaccccttatcttctagtgaaatacaatgtgaagaagagaaaattccgctgtaaacatggtaaggggtatttatgcaaaacatccatcccctacggcctacccccaatccccaaaccatcccccgatccggaaccagatccctctacgttagagggacgtcctcgcacgatcgccgttcatcccgcatccaacgctggcatcggctctgcggccgtccgtcgtcctcccgctgccgccgccgcgcgcgtcggagccgacgccatcgccggcgctacccgccacccccccggccccgccggccgtgagcgacgcgggcgtcgtagccggtgcctgcgctggcgctccctccccccttgttctcctcccactccgcccgccggcaacggggcttgaggtgccggcgaatccgaccgcgcacgggcaccccgccaccgccgcccgtcagatccagcggggagaggctggccgtgccccccgcgcctccacgaggggatctgcgttgagggggaggacgaggaggctgcggagaaggaagacgaggacgaggaaggccccagcgctcgtcgtcgtgcctgccttcttcgctcgttgtcgctcttctgccccatctccggctaccgccgtcgccgtcgccccccgggtccccggcatcgtcgccgctgtcgtggcctccttgagcccttgacgaggaggggcccttcacctgaggccgcgacgagaacaaggacgaggacgatacgccgcttcggctgatgggtcgtggcggagccagatccaaacgccttcgactcctccacccttgccgtcggcttccaggcggcgggcagcagcaggcatcggaggtgacccgggcaccgagcaggagttgttcttagcgtgcctcctacaacgcgccgtcgcccgcgacgtgctggtcccgtcatcagcgcggcggcgacgccgaggtatgggagccgcgcgctggtggtggccagatccgtgcgtcacctgcgcgcacaggcgcacaggcggcgcaacagctgacgcagcacgggaacatcgggtatgtgcttcgcacactcatctccatggataagaagcctgcgaggaatctcaccgcctgccttgccgccattgctggcgctgtcgtgaataacagcaatggcggaaagttgcctggtctgtcacggaagctgttccagaaggcgccgtcggaacacaagaagaacgcactgacggaggtcaagagcggtggcaacacgcgggcgctcgccatggtgctgcgcggcgagtgggtggacgagatcgctgcactccgcctccagttcgagcagaaggacattgaggtacacacacagacatatccacctcttccccactcctctgtgccctctgtggatgccaacgtgaccttactgcgattgcggcgttcaggttgagcgcctcaaggacctgtgcctgtggcagcgggaggagatctggacgctcaagggcgccgtgttcttcccggctacacaaccggaccacaacctcacgggacagatccaataccttgctgaaaagatcgcggtggcacgttttcttttcttttcttttcttttctttaacgtttttcaatgcagacacttcactaactctattgattacccacctaatcacctaatcttccgtctgcaatcgtttcactatgtacaggttaaaaccaagaaacatatgccaagatcatgcatgttttgatgacgaatactgctgttccccaagtactgtacgctggtgcttaatgagaatgctttctcactggtaattttcacatgctccaccattcgtctgctacaagtacgattttcaaaatccagatggaccatttgactgctactgtcaactgcttatatgtgctccttcataaattgccttcaaatcaatctttttaaatccaaagttcgtgctaccaagtttgcagtatgcattttcttctcaaacttgatagtctgctatgcaaaggtagttcagtggttcatttcttaataccagttttgaaagtctctttctcctgttgttgtttgtccttacagttgttctcccatggcgatgaaccacttagctatgattctcaccgtaaatttcttgcaaactattgatcaattaattagatggtttgatatttagttaaatattgatcagtcgcttaattttcttaatagttacatgatctatattccaatcagttacttagttttactataaatttcttatttcttgatcgataacttagttttggtacatgatctgcaatatgtaatcgatcttgacaccttgtaatcaacgttgctagctcccaagtctctcgatctttcgattctccccaatatctctttatcgttttgccatgcacactttgatgtggtaaagataaattacctacttaattaaccttccattaaatctttagattagtacctggtccacttttgaagtgccttctaatatttgtgttttaaatcgttagatcgaatggaatcaactgatctcgtttttccaaccataacataaaaatctccttttgtgcaatcacaaagtggaggtataagtagccattttacgtcttctgtgcacatcaaatgttagatgtgccttgtaaattctttaagttatttttcaggtagatgcttttccattttttgctgggccatcagtatcttagtctttgttcctgacaggcactatcgatcggctagatgttcttgaactcttgaatgcctgatgcttgatcagtgtgtcctaccaggcatgatatctccagagttcagatttgcttcttgtgaatactggctaagtaaaactggtaactattggcaattcggcatacatactactgaaaggacggtccttccaggcgtgacatctccatgttccagaatttttttgtgtgttttcactaacaaaggcggttattctttagacatttggtgctttcccattcaccaccgcatggatcttttgatatactatgcaggtaactaacagcacaggcaattatattctgctctttcaagattttagaatgatcatgtcctttagtttgtattttttgcatgtaccatacgattgatcaggctaaaaaagcatacccctttgtaattgagaacatattctgtaatagttcttttaggattgcgaacttcatttgtgttatattctctgttaaggaatgtgctaatcagcagaagaatgacaatagagatttttgttcccttcaatgaaccaccaccacatttgcagtccagcagaaattgaaaatagttgttctccagttgatggtgtaacaaacaagaagcttgtaaggttccccaacctatacaatatattctcaaccgcatacggcagcagtcaaattgtcctccgatatcaatatctggcgttctaatacccgaattttttttatccaagcacaagcaacacagtattttcaaatgtgagcacgccaaacccacatttttatttataggcaagatgcaacagtgattctattcaatcgaatgtcaacaagctaattggattagggatggcaattgtgcccgtttacccgtgggtaaaaaccctattaggattgggtttgttctccattttatatctatgggtatcttattgggttaaaagctacccatgcccgctttgcccgtttacccgtgaaatctaacttatatgtaggctaggagcaaaatccattagaatacataagccatgttctttgttttctacggtttctcttttatttcccttattatttctctccctttactctatcgccgccagaggagagacacgataccgaggcggagaatatttgatgttttaagttcgattcgaacttagaaacttgtagattttttgttccactgctcttgttgtggcgggaaaacaggcacgcccgcgggtataaggcgcccgcgggcaatgggcatgggcaaccatccttacccgttatgtagtaatgggtatacccacgggcacaaataatctcacgggtataggtatgggtaggtactacccgtgcccgtcgcgcccaattgccatccctaaattggatgctgaattgagttgagtacgtgcgcttatagaccaacagcccacctcctattagccagttagtgtttgatttagatattggaacaacatagtaggtgtaacatttttctactgttcaaatctaattcatccacgaggatcatcatcaaaaacgtaatttgtgctaataatcttcatttgttttgcaaagcagttttacatatcagttgttacaaataattgtagcatgcatataaattttttagtgtaatctgaataaagctaagtaaggtaccaacacgatagtcacgaagaagagagttatcgaggctgctgatttctagatgtttttgctagtaacaaggcagaaaaggcctattcatctatcgtggacatttactcaaactattctgttcatcataagattactcagattgacttgattacatgggcatgttgtttagaaatagaaattcaaatatcgtgtgctcacatttgtaattaacaggttgcatgtgcttatataccaaaaaaatggaatacccgaattttttttattcccagccgattatgataggtctgatcgttgctacgatggttaatacatgggcatgctcaagaacttattgtttttcttgcttattgaatgtatttttgtgtgctgatttttcccacaaattagttgtttcctcaagtataattctcaacgtttacaggttctctgtaaaaactaaatccttacgttgtttaaataaatgttgaaataatatttttattataaaattagcaattaagtttcaaaaattaatcatggagaatttaataaaaaataaatataaccatgttgttttatttttacacttaccttacctgtaaattaatttaattataaaaaatatccaagtatttcaagaaatttatattttaattagttacatataatgtaaatatttgttcactttttcttaattttctcatattttcttcccgttgcaacgcacgggcactttttctagttaggttctaaggaagtatagaggctggtctttggtgatgtggcgctgacgtggcacctaaagttagaaaaaagaaataaaatatggcgggaccgacaaaaaaaaacaggtctcacccaccgagtttcctaattagcgcagacgcgctagatatcaatctgacgcgtgtttccggcccatttctgttttgtccatgtattccggcccacttctgttttttcggtgtaaagaaacgtcgggaaagacggcgtgtcgtgcgccggcgttagatttggagaaaaaacaggattagttccgtaattagtttccgataattatgttttcaattaatcttgcctttttttcacaaggttgttttctttttttaactaaagattttaaaattttatacgtgaaatttaaaactttctatagaagaaaattgaaagtcacaatcataatttaaaacaactcaaaatttcaactttcaattcaaattttgaaaactttcaactcaaaatttaaactttcaagtcaattttgaaaactttcatcccaaattttaaaaactttcaactcgaattggaaaactttcaacccagatttgaaaactttcaagtcgaatttaaaaactttcaactcaaattgaaaaactttcaacttaaattttaaaaactttcaactcaaatttgaaaacttttaaggtaagatttaaaaactttcaattctacgtttgtaaagaggtataggaaaaattgaaaaaaaatcgggaaaaaaagagcgaaaaaaggaagaaaaacccgcctgtagacaccgaaatcgggaaaaaaaataataacagaaaaaaaaggtggggcaggggggctaggcttgctggtgcgtacgcgcgcattagccgcccccctcacccacgcctacgatcgcgtacctccggtcggtcacccacgccgcgtccgcgctcacccgctttgagatcggcgagccgctcccaatgttcgaccacggcccgcccgccgggattgtccaccgcccggcctgtcgtcgcaccctccatcgagcaacagcaacggcgcgcgcaggaggaggaaggcgctgttgtggatgatcatcttgttggcgacgtggctggggcgccgtcgatcggtcacgcgagaggaacgcggcggcggcggcggtgaggagatgaggatggtggtgaggaacagtagcctcgcggaggtcgcggcggggttggaggaatacttcctcaaggccagcgtcggctgcgtcgccggcgacgccatgtcgagccacctcgagtcgagcatgggttgcagaatagaagctttcatgccactgatcaccaccacatgaattgattttgttcatggtggaccgaacaacatcttggacgcgctttgctgcgtgtcagcgccatcagtggcgcacgaccacgtcgacagcatcaatggcgagcagaggcatacccccaccatgtagcagcagctagcctgggagaagaagctgtattgggaagtgaaggtgataacaacttaccaaaacaaagcctcaaactagccgtcgtaccgtattaccgtgcgtgttctatggccagtcgagtgatgcgatgttgcaatgcaggcgagagagcggctgcaggtccagaacgataagaagctggcggagctgagtgaccaggagtacagcaggaagattgacgtggatgtgttgaaggcttgaagctgaagaagaccgcgtggacctcgccaggggcagcatcgcgatgcgcgttggcgaggatccccgagctgccatcgggcgctgtgcccatcctcttgtagccggcctcgtctcccgcctcgccgaggagaggatggaactcctctgcgcacaccgcggacgctgctcctctccctgtctatagccggcccacgtgccctggaggctgggaagagaaggaagggaagagaggaatatgaagctgacacgtggggcttaggcactaaaaaacggtcgtgtttggaatcagccgttcccagattacatagctcacggaaaacgaaacggtccattaacgcgtgattaattaagtattagctaatatatttttttaaaaaagatcaatataattttttaagcaactttcgtatagaatttttttttttttgcaaaagaacacaccgtttagcggtttgaaaagcgtgtgcacggaatacgataaaatttcttgcgcggaatactgctctaggaccttatatgtactctggttttgtaagttgagggatgtgttatgtctgttattatggttgaaggatgtgatctaaactcgacgacaagatgagggacttgaagtgaacttattctggaagggagagaagagcggggacatggtgggccgaccgagcccagggagaggagggatgcaaatttgacttctgcagaaaaattgaattagagagaatttggatttgaattcaaattacatattcaaactcaagggatcaaggaggagtcaaggaaggaattcaaggtggtaattcgatgtttttggaactggaacaagtattagacaaggattaatcaaagggagagatttaacttcgaaatttgatttttgggggacttgattcagaatatggaatttcggggtgttgatttttgatgtcgaggagggggaacaagggaggatttaaattgatatccacaacatgacttggctgagtttgtttctaaaggttcccaacccatctccttagttttccacgcccacacttttcaaactgctaaacggtgcgttttttacaaaaagtttttatgcaaagttgttttaaaaaaatcatatcgatccatttcttaaaaaaatagttaatacttaattaatcacgcgctaatggattgctccgtttttcgtgcgggagggtagcgtttctaaccatgatgaacgaacacaggcttagaccctcactctataaagacagcaatgttcgatttttaaaggtgttgcatgggacagcaaagagaaatgagcgacgataggcaagcgagcttattatagatttactttatacctaatgtgtatatagggttacctccaatacaataaatgatagatatagcagcaagcgagtcaattatttacttgttttgaaaaaaaaatataaccatgtaaagaaaatgtacatagatatatcgctgctaagcgcgtaatcacgtgggccaccctagtagtacgtagttatgggaaattcgctattgaaaaagatcgttattatcggtgtcttttcctccaactagtgaattagctgctgattattgaagctgctttatgctaagagagagacgagcatgttttacttaatctgacgtgtatattgctatagcgtgtacatgtgcatcagtgcatgcctgcttagctcatgtcatattatcatcatgtcacatgtatagctcgccgccactactccagtattactggtggcaggtttggcgacaagctaactgcagcatactagtagcctaaccaatcagctctagtctctcgtccaaagtgaacaagatatacgcgcgcaaggacatgaatcgataaatcgaccgttttttatgcgagaactcagagctgtgtagcagtagtccacagtggccactggccagtgtatgcatgtgtgcatgatatatggtgatctgtgccaatctctgatgtgcagttgggcatgatactcgcaaggaaaaagaaagaagaacgcatgcatgatacatatatatcgatcagagaaattgagaagcgggtgcatgcctatatatgttaacagctagtagtagctagtggtatgtatacagtcagtacatgtgatacatcgtgtacgtggttcttcgtgtagacggccggtccggtcaatcgaggaaagatacgtcgtcatcgatctgatcagtcaagcatacgaggctggctacgactacgatacgagtggtacgcttctcttgctagccgcttgctttaatttggagcaatcgctccgcctgtctgaactaaagcaaccacattcacatacgtccaaaacttctttttttcaaaaagctatagctctttctatgctatgcaactgggacacctgtccacaccgatcgcttgatatacatatacacactgtcctgtgggtcaaaagaatctcgagcaaataaagcacacacacactgcgtcttgcgctgctctctcttctctatctacattaattggtggcttccgatcctgcgagggagagagaaggcagctgtgccctgtgatgtatatcaaggcaaaaaccctagaccaagcacacgtccgtctcatttctccccctttctgcttccaccatcaaacacaccgcagccgccgccgcctcctcctcctgctgctgctgtgagcctttgtgacacgcacacatctacattaatttacacatgtattattactacttgatcgaattcaatttgacagtaagctaggtggtggttctgcagagccaaccggatccaagatggaggcgtttgaaccagatcgatcctagctacgaccttcctgccctggaggatctgcacttcttcccagttctcacgaccaccgtagaccacagccaaggtaaaatatatagcatatctctgttattaccccccaccccacccaaacctaaaccctcttttatcgacgcttgcgagtgatcgatgttcttcactcatcttcctacttgtgcatttattttttatctgctcgatcggttgctcaaggggcacttcttgtctaccttaactaagatctcttttttttgttgccattattactcgatcggctgcctgcattggtggggaaatttaaagttcaaaaacctttcttttgattcggaccgctagttcgatcgattctttcatcctctcctgcagaggttaattggatccatgtcattgcaaaagtacatatttaaataaataccgttataattcgtctatttctaaccgtgtcattaaaattttacaaaattagaatcgtgccattgccgtcaagtttctatccatctccatcttttttttttccgtttcttctttttttttccctcccatcttctttgctttgcttggcggctgtgtatgatgtccggccgcgcgatcgcgggggttcagggcaccaacgccgccgtggccagcgcgttgatttctcctcctgccatgcgtggttggtggccagcgcacggcggcgtggcggcgggcgcagcaggcggggcaaggccgcactgcggccggcagcccggcacaaggcggcgctgcgggcgacggcgggcgcagggtggtgcggtggccggcgcaagcacggcgggcggctccctggcgaaagcgcggcggcctcgacgcggcttcggcgcaggctcggtgggcggcggccggggcacggcgcgagcaacggcgacgcacgcagtagctcgaccacactgtgctgatcgtcctgccaatctgccatccgttgtggtgttccttcaatccttctccttgccttgctcggatggtatctatggtggagcaacaagatgagccagaatggcaagaaaaagaagagcaagagctccaccatgaaagtgtacttgggccgtcagaagtcgccgtccagggacaggcggacgctgacaacgacggcggagatgacgacgacatcatcataccagcaggcatgccgacgaggtttagcttccaggagattacaacgatgacctccaatttcgcgacaaaggtgagaacaggcgggttcggcacagtgtacaaaggggagcttccaatggcgcggcgaggggctcatcgccgtgaaaaagctcgaggctatcgagctgaagggaagaagacgggagaaaacggaaaaacagagggatggatagaaacttatgatagtggcatgatcctaattttgtaaaatattaatggcatggttacgaatagataaataataatgacatttatctaaatatacacatttgcaaaggcatggatccaattattaataattgattgattgatcactcaattggtgggtttgtctctctctctctctcaacttgggcatgttaattggtggcctccgatcctgctattctttttaaaacatgggaaaattttaaaatccaccccataagtcacgtgacatactagggtgcatttgcaacaaaattacttatggttgctgttcgcaataacggaattaatggaaggcaaaattttaagttaaatatttgatatttgaatgcatgttcgttgaatttaaaaaatcttcatatatatatatagatgttcacaactccacgagattctttgtcacggcgttacgctgaagctgttagaaggatgacatggaaaaaaaaaatgggggtgaatgggatttgcaaggttgccccagttgtcaaaacacaagagggtggtaagaatttctcttgcttgtttaatctgacattaacatcaatgtgctatggtcttttggactaacaagaagtacatgcttttaatcgtatatcagggacctgtatttacaatgctatctgcagtactatggagtcccacctgaggcttaatggctactgcgtcaggctctccgtggaagacttgatcgagaaggagcaagcgctggtttgtgcagaagaagacaggacgctgcgctgcatcgaagtggctaagactctcggagtttgctcacaccgagattatcaggaggtgcgtgcgtacacatacgttatagttagacatttaggccgagttgagtttctaatttttttttcaaactttcaacttttccaccacgttaaaattttcctacagagacaaacttctaacttttctgttacatcgtttcaattttaaccaaacatccaattttaacatgaactaaacacatacttaattatctgttaatgctaattgtctgtttcttaattagagcaagcgcaagggcaccggccggaatgggagcacattcaagatcctctcgatcagggcctttctcaagctgaatgccgatgcttttgcggatgccattgaaagctgggggactaatggaccacttctagctgagatcgatgtggacgaaacattcatgcagtatataattaagttcgagcaagcgggtatcctgtcatatgaagcttacaatgagatcaacatgagagtccatgcagcgtgtgttctcgcgctgggcgtggagaatgtggtaccgttctgggagttcatcaattcgtacggcaagcttgggaagactaagggctacggcagagtggtaccccataacgtgagacgcctatttgagatcgtcgttgaggttccgaagaagagggtgaggggcatattcgagaatacgccgagcgactccatcgacacccaagacttgcggccttccaaggggagacctcctgtgactgatacgggagatgtcgttgttcctgttctcatgggcgcagccgctgccgctgggaatccattccccacacataccatggactgggctttctctgaccctccagatggttatggttcatctgccaagccggagcgcctccatatgatggatatagattaattagcggctttttctgaccctctagttctagttcctctgtaatgcgcttcttatgtgatcaacaactttatgttctgttctgagtatcagatgctgtgcaccgtgagaaacttaaaatactagtactccacaacaagcaagcgagaatctacttatccaaatccaacttgtcacggtttccatgttaatagtaattaataaagggagccacgcaacccaaccgtaccacaaaactgctccaacgacacattgcaacacttcttttaataagttttgagagtagcgggactgaccgatcatatgtgactgaccgatcggcctactaataaacaatggaataacgactgcctcataggggagtaattgcagatgcaggtgtgacaacaacaacaaaagaacaaccgtaacagcattccagaatgaacaagtagtcaacaacataaagaagacgctagctagctaatcttccaatcgtcgtggagcattccaagccatgcattcagttgacacttgatacttgatagattcttcccccacatacagcagcgtcacctctcctccagtcgtcagcaattctcgtctttcaagtctctctcttctttccggacctataaaaagcacactgcccaagtcaacgtgaaattgcacgaataattccagttggatcaccaacaaccttgtcctaaaggcaaatgatcactcccagacacacaattatacccaatttccttgggaagtgcacagaaaacaaaagggaccacagaagaaataaattttaaacacattctatagtccttattatgtaatgtggtcaacattacttgtcaatgccttcggagagactgggaactgagctatattattgtcatctttgtgtcaggtaaggttgttactctgcacagcgcatcgctagacctacttgggaaaacactgagctttgaacagaaacctaagttttggacctatgaaacagtgactatgtggttcctacatatgcaaggatagccagtgtgtcttgtcgatgcattgtgaaattcactgctgcactattagatctaatttgatttacacgaactaatggaatgatcccgtgaaatttcaaaagttctaatccagcattaaggcctattaataaattgtcaatttttttatcctaagaatgaaaaagctacaactccgtaatgatcgacgtacctcaagcatcagcatgttagcgtgattaatggtcagcccctcaggcaatgctcctacgtagccaacaaatccaccgtcctttggatgcctgattccaccccagcaatgggcacagatatcaacggaacctggaggtgacaacccttaattcattgattgtttcagagaaaaaaccatgaacttcagcacaaggttcaatatattgtttgaggcatttgtatcaggggggactgaaacgacagaaatttccgaaaattcggtccgaaattatttgattttttgaacaaaatttggtcaaatttaaacaaatattgccaaattcacagaaatatgaaataatatggtattaggggggggggtccaatagaaacaaaatttcgttccagaattttgaaccctgcttcagcacatgcatgtcaaaatgaatattcagcggcataacatttatcgattactccaatgataatttacaatgagggaagggaggaaacatggagtccaagtgcttaccattgtatttatcgacaatcttgcacattgtgacctcatttggtttttcttccccccttaattcagcaaaaaagggtgttgaacagccagcaacagtggctctaaagtacacgtgccagaaacattgtttgtcagcaagcctcaagataaacatgtggctatccttggctactcccttggttgctttattggctggctgaaaatgagaggaagggaacaatacaaggaaaaaaagaacagaaaatataatgaattaaaaaggtaactgactcaatcttaacaaactgattacaaatatatgaagtaagcagaatacttcagaatactaatcagatgatctccaaaagctaccttatatctaatacacacattaccatctgaggtaaaatataataacaaagataaatcacataaggtaaggtccaagataacatcagtacacacattttccaagttgtagtagtgcattgctagacgggtgcaaacacgtgtctggtgacattgacttgtatttttatgttcttgccaattcaatggtcccggcagcttgctgcggtcccttgaaattgcatccggctgtagcatgcggtgatgaaaaaattcttcagcagcactttcatattgccaaagaacaaaatgaagattagaaatgtgatgcacatctagcaaagcaaagtaactttatgtatgtgttccagatgttatttacgtaagtgcagatgctttggattgcttgccatgatttgctataaaatataccatttctaatgtacagatagctgtatgtagcagtcactgttgctaccagttgaaaaataatcttacatgtataaatatttaatttatatgcacatcatgtatggcctaaaagaaattagtatacataatcaagccttgtgcattaatggaagttacttcctacccatttcacccaaattattattatgttttggagaaacatataaaacacatgagaaaaagaaacatactcagggggacctttcttttcgggcttttgggacgccattcttgatagctcaaaaggagatgcccttaaagttttcctgcatatgtgaaagttaacattgaacttgatgcaggtgcttaacaaacacagattaccgaatagctaaagtaatacaaggataagcatctattgaatgagagctgcaatattcaacataaatataatggtatgttacaataacaaattatttaattcatctagcaaaaactatcatagacatcctattactatctttaatacactaaaaatacaatagaatctaattgggtgcacaactaattgggtccactcatactgaggtagtttaaccatgatgcatttcacctggtccaccactagggtgtgcactacattttcttccccataaaaggttgctttccccccttcgttttctcaaatgagctgaaggagagctatgcaattgatttttttttaaagagagcactgtgcaattgaggcttgtcaagtatcaacattttccaatctggctgattgcagttagatctagtttgcaaaatcttaagtcctaagtactaactaaatctagttaaatccaaatcaatttccacaaaatttgttaactgtaaatcaaatttacccaaaatttgttaactgaaaaacctgaagagacttcagtgactggaaaaaaaaaacctaaagagactttaggcatagataatccgaagtatgagggacaagaagatgagcatcaagcaaaactgctccttaactagtaaagacaaagaccgaacgaaaacacatgccatttaacagaaaaatatggcacgaatactttttaggtaagaaccgaaccacgaaaatatttgggaagcccgggattcagactatgagataaagaaagcggagaaacattaccagatgtatagggtggcgggcgagaatgattgagccgacggcgcgtgggaatggggtacgggacgacacgggaaagggtttagccggcggcgaagaaacgcaaaggcgtggccgcgtgagtgaggaagagagccgaggcttgagctgagagcctgagagtggtggtgccgtggtggagactggaaaaccctagtgggcgaatgctcgcgaacgcaggctttcttccgtttctggcccaggcggccgcgccttttccttttccttttcctgtgtggaataagttcactttagatccctccatttgtcattgagtcttaaattccccaacttacaaaactgtgcaaacgagatccctcggtagtattatctccggttttgactgacatagcgcctatgtggctcctttgactaggtcttcatcccacgtggcattgacatggacttacaaggcaattcgattcggaaaaataataaaacccatggacccacatgtcagtttcacacacaaaataataaaaaatagtggggctatatggtcccacatgtcatcctcactgctcccctcttctctctatcctctctctagtagtaagttgtttcatctcatagatgctctaatggcttcacttagtgacggtggagcgggatgggcgttggtcggagcggcggcgaccggagcatgccagtggtgcagagcggaccgtcattgtcaaccgctgtcacaccgccacagctgtcgtgctcaccagcaactgcttgagctcctcctccggccacctccgccgttgttgccccctccaccgcccgaccactccatcccacccgtcgcccgcttcggcagccgcctaccccgctccgctggttggagagagagggggatagagagaagaggggagagagaggggggatagagagtaggggatagtgaggatgacatgtggggccccatgggcccaccatttttttttgtgtgtaattgatatgtgggcctcacgtgttttattattttttccggatcgaattgccatgtaagtacaacgttaatgccacgtgagacgaagacctagttaaagcctcaaaggagccaagtatgcaccatgtcatccaaatccaggacagtactgctgagggatctcgtttgcactgattttgtaagttgagagatgtgttgtgcctcgacggatgaatttcgaactcagtgacaaaggagggacctaaagtgaacttattcctttctgtgtgaggccttgcggcttttcttgacgtggtgtgttatgcgcgtacactaacgtgatttggagtaatacgaagtagtgaagtagggttagaggggtgggacagtttggtctttggtgtgttattctcacgctgcacgcagtaggggacacagaggaagacgacagcgtcttttaaagtataaataagtagactttgttaaattcattttaaatttatatgtataaagtttctttactcaaagtttctattagagatagtttccatgcataaatttgtgctttaactcgtataaagtttgtacatttttaattttctttcaaattcatatgcataaaatttctgcggaatgtttctaaaaaaaaatctacgtatatagtttgcatgtagcaagtttggactttaattgtatacgttttgtatatatactgtattcgtttaaaaaatgagctttgtatattgcctcggaatactagatatcttaaacgtcctagattcgccgcgagctcagccgatccacgccattgaattttgcagaaaacccctcgttgtttcggtatttcggattaggttcagctgatcagagccgttctttctcacgcgtgtacgaaatctagccgttcattccctacgtacggccttgcctggtcgtggaatcggtggccggtcctctccccacgccgcctcctctctccccccctctctggctctctcccccgtctccccgatcccctttctctctcccttctccggcgccgctttcctcgccgccgtccctcttccccttcgggtgcgccgctccccctcccctacatcccgacctccgcctccaccgccctgccgtctctgccaccgccaccgccgtggcgactcgctcccgcccgcctaagcccactgccgccgctcccgagagtggaggcgggcggatccgcgtgctgccggcgctcccgttcctgccaggccgctcccaaggacgacggccgctggattcgtgcgtcaccgtcgctaccgaggacgggggacgacgaatccgcatcggtttcttcctgccccgcctcctcacggcgtgggtctgtcggtgggatggaggttcttgcgcggcggcgcgggccggggagcgaaaggtgaggactttgtgtgtgttctcttggtgcgtttcttgctgtgatttcttgggggagctgttcgtggtttctccacctgcggccgtggacgagattctccatctctgcttcgggggatttcttgtgggtttcttcccttcctcttcctctctctcctgtggcaaggtgtgggaggacggccatggtctggaactctggatcttctctcttactgattttcctccagcacagacgagcaccacgcggaacctgcggctcgccgtcgacggcgccggcaccaacaaccaaactcgaacgtggaggggcttttggaaagttaagaatggggattttcattttttgttttgttttgaagctttcgctaatttattggtgctgaccatctagagtgagttgatgccttgcaattggctactgagctcagcatttgctttacttgatagtgctcagtttggcaattggaatatacccatcacatgatgcaaataattctagattactagcactgctttgttctatttgattatttttttactcatcagattatgtcagtgcatgtcaaaaagaccagtcagatgatgccaagtgatcaaaagatataaatactgtcgaatgatactaacctttgtactcattttattacaacatgaacaaacccttctttcttcaaccaaattctaccatcaaagcatgggatagctagggccatctcagtgccggtgagctggggacgtggtaatttcccggagttttcaatttattactattcagtttcttgatgtatgagtgcaacaagttagtaaaacaagctacaatttataatcgggtagtcctgtccatgtataacatggttatctttgtttatttcttatcttatatgctaagatatttcttctcatttttgcagggtggaagatctttcgatttgtgaagttacaccaatttactaactttgtgatattgcactaaatttaggctgtatgtatcagttatttcttccagattgttttactcacagaatagatatgtttttcatgttatcaatgcacatccttttagctagaaatatagccttggtgtttgcatgtcaactggagaagcatgtcgactgaaattggttctatttgttccaggacaatcatgtgttcttcagttcctgggttagcattgcttaacaccagcataagcaaatcttggagcgatgaggaacttgtgcgattcttggcagagaggaaagcagcagactctttgccggagaatgtagtggtggggatgaacttttctctcattgatccatggaattcaggttagtgtccaatctatacagaaatttattatgacgtattcctggtggtataaccagtcttgcattctgaattaatggtattctccaacaagactatgtcatgtaatatctgtggtctgcttttcataattcagtcgttatagaccatgaaggcttctttgttttgtcctttttgagttgttatatatatttactttactacagtttattatacgattcggtagtatagcagcattttaattcttaaatgataactaaagaaagggaatcctacatagaattgataactatttagggttaaaaggcatggaccattatgcaaaaccagaaagaaatatcttgggctctgatgaaagtccagagttaagtgcacgaacgcatacttcagccccattgattatggcaaaaattgcctgcatgaagtgctcataaactaaagtgggatgttatatgagaaatactttggcacttcacattaccctgagcatttctttttcatttttctttgtagcctgtgcaccagttgcttgcatgttttcactagaaaattctgaattacgctatttgacgattaaattatgttcaatgtgttgctcggctaggatcctttaactttcacatcctcaccagagtttgctattatgagaggtcattgtttgccagttaaactttaagttttggagatgtcataatgcactatatgccattggttattatcaacttttgtttttagatactgtacaagcagatcatgtgctaagattttggggcttcagttcacttttagcattaaaatgtgcacataagaggagcggtagcagcagcaggaggataggagatgtaatgaggcaagagtgaacttgtgagctttcttaaaaactgtttattgcccagcaacggcgatgcgatgtacacagtcatgacagagcagatgaggtgggacttaaattttattaatcagagtatatgataatgttgtcatctgaatgtttgtaatattcaagaccttaattgctttgttttgatctaatttttttaatctttgaaagaattaacgtcgctataaatagaatgattctgaattttacatggagaaaatggtattcgtacccataactgctgcgatataacattatcttctgttaaaatgagttatcgcattaatagttttcttccattagggctgccaatgttctgaacttttgattaaatttgggtccagttgtttaaatgatgacaaaagtaacagttgctcacgagctctcattctctcctacaagtgtgttctattcatctatctatttttactgttttctagcatgccactgctttgtcgtccataactccaagcaaaaagcaaaatgttcggcttaagattgaaacaaaagcaaaatgttcggcttaagattgaaacaagctttgcagaacaagctttgcagaattgtcggacacaagttacttgggagggttctcaccatacaggtgcagacttgcgcccttttctggagtttgtaggttattagctttacaagagatttgtgctgcttttaatgaaattattatatagtccaacttacgaaaccatttgtaccgtggtgcttgcattgtgttgtggcttaaaacaaaattaataaggcatggatttgcaacaatgaattagtttttgtgtgtccacgggctctgtatgtcaaaaaaaaaaaaacttgtttgcccttgccttcttgctatgaaatattgtactgtcatgtaactaatgaatcgtcatttacatgtaaaagaattgcttctctaatcttacattcttctgtttcccgtaatttagtggccgcgccgcatagcgcgcgaaacctttctagtaaattcaatgtgggctgcctgataagctaggccatacgagaattcatgtctacatttgagtcgacacatacgttggccgcattcacgtggccccgtccgagcaagccttcgcgcaacaacaaccgcaagcaagctaagctttgtgtgcatccttgaataaaaggtccactttccagtcctcaaagcaagggtgcagatggtgtcaaaaggaaaaaaaaagtaagggataatttgatccgtgctattgtaaatgtgtcaattcaaataaatgatattacaattcatttattcatagtcatgccatccaaattttataaaatttaaaattataaccatgccatcgccgttatgttttgggtcccacatcctaggagatgaaaaaacataacggcgatcaggggcggtcacggggcatagacatgggggtacagttgtaccccccaaaatttttttgcaaaaagaacagtatacatagggtatattacatacatgcaccaaaagtggattaaaatgaatattgtcgacgtttgatatcgcgattccggtatttgcatagtatggggatcattggtactaggatatatgcgagactgaggtaaaagagacggggacgaggatttttatatagattcaggcctctgaattgtcaggtaatagccctacatcctattggccgaagccggtcgttgctcttattcaccataatcacaccagtacaatatttgaggtagcctatctaattgttgtcgacatggcggtctgaagttctgactcgtagtcgacaacagggttgacttcctcctcgaatccgtgcccggcgagatcagagatagcgctttcgtctctcctgacagtatccggagacactgtagggaactagccgttcttatccctgaagtcgatatccggcgtcttgtcttggcgtatgttagcttgtatgttgtggcttctgttgttccgtatattgtggtgggtgtatcggcggtgagattcgatgccccaggcccttcccggggggtcttgtatttatacccataagtgcccccttgtccaagtagaactagggaaaccaatatggatacaatgtgagtagtccttgtcgtttccatgtagaactctggttgtctttccttatctagaactccgtccatatccaatgtcaatttccgtataagacatggtatgtggtgggtcctgccgagatgtagtcgactactattaggtatgtggtattcataatcctgacagtagcccccgacttcaatgtaaatgaacgaattcatattcttgaccgctgaccatggagtaactgttatcgagctcaagtgaccgttctcggtgagttcagagataacgttagacttcctttatcagcctcgtgcgggcacctatagggtttgtctgagtcaatctccgatgtcaaccaagaaagtacatagcatacaactaggtctcccgtcttgctgtaatcgagaatttggattgaagtcaagaaattttatctaggcgggtacaccatctcttcattttgtattccttgtcgagatccaccaaccgttctcgagcgatcgagaaggcgtagaatctgcgacgaagccttgtcaacatttgtcgtactcgccttagtcgatcttggtgtagaaccatagagacgtgaagtcttcgacaatgtcaaatagaattttcctgaaatcaatacttagaaaacaatattagatagaaatagcccccgagcgagcgatcaaagggtgacatgttataatatgtatgaaaaactgaaaataaattaaatttacaaaccaatgttttgtatatgagtgtcttctcttttaccgacttcgatcagtcagtttgttgagtcatacactctccctagcccccaagccttgtcgtcggagaatcgttctcagaggataaggctcttggacccttgacctgcctcggttgaaaaaagcactgaccctagcccccagccgtgaagttgaaaaactcaatttccgattacacggcttggttaatacgcacggcgagaactcttacatgaccagatcttacatggtattttgtctctacaggatccgacaaggccttatcggctccgggcgtccccagccgaagtttccttaggttcctcggaggccttgtcaagacgacgtaaagggacagtaggataggtttcaacgctaggtgtcgtcgtggtaagggatctctgggtaaaacacttggcaatattgtgtaccttataccaattttgctggagtagaggtagtgggagaatcgctacacctctggtcaaaaaccagttgtagccccactcgaccacttgaagtaaaggtagtgg

SEQ ID NO: 4867 - DNA, 17886 bp, Oryza sativa
  unsure (1)..(17886): unsure at all n locations
attatgaactgctaattatagctttggtatgcatgattaagtgattaacagttagcagtctcctgtctttaagctatggttagaatccacttattgttgcaaatctacaatgagctgtctgatttgaatgtggggcccacagccagtctcctcctctcctatataaaggcacacactctcctctaacccctctcacaaatttctcttcaaatttcaaagcacacaaatttttctttctcttgcagtattattattactaccatggcatccaggatcttgtacgcagccgccgtcgtcgcggccgtcgccgtgtcgtccctcgccggcgtcgcctacgccgccgacgccccggcgccgagcccgacctccggcgcggccgccgtctcgtcgtcgctcgtcgccgccgtcctctgccccgccgtcgcgctcctcctcggcaacctccgccaatgagcttgaagatcatagttgaatcgaatgctgctgtcaaacatgcgtaatgtgctacgcatcgcgtgatatcttcttcttcttgttcttcttctgtttgagattgctcgttttctgacctgtgtggcatgtatttttatcgattcagttaagccaattcttccaccagcattcatccattttaatccagaatttattggtttcagcactaagagcttgactgatcatttgttttgatggtgatacatgttgcttttggagtgatgtttctttcatgagaaaatttttggcgtacccagagatgtaaaaaataaaataaaataatattttaagttaccaaaattttcactagagaatgttatacctactgataaaaaacgtaaaatcactttctttcatagttaatcagtagtggcgtattatttcaaagaaaaaaaagagagaaaaaactgtagtgtcgtagtctgctttgctctttctgtttggacaaagcacatatcacttccttttctttctttttttttggtattttctcatacaatttacatcccattcctagagagaaaaggtgaagctttagttgggatagaaaggggttaacaaatgggataaagcgtaaaagcagatcagtaaagcagccatctcatggctgtaaagcagcaggcgtacacgtacatgttggaattcctttcgaattgtttaacatatatgctggcaaaaggaaatgtatataccatagttgcagatttgcaagtgacatgcgttgcaattctgacatgaatcggatgtcggatttttcatcggatctccagtttcctacgttgcaaatgtacaggatttagcagttcagaagtactccagtacattttagggcctgtttagatttcctggtaaaatttgtcaccctatcacatcaaatgtttggacacatgcatagagtattaaatataaacgaaaaaaataattaattatacagattgcatgtaaattgcgaaacgaatcttttaagcctaattgctccatgattcgacaatgtgatgctacagtaaacatttgctaataatggattaattaggcttaataaattcgtctcgcagtttataggcgaaatctctaatttgttttgttattagtctatatttatatccgatgtgatacgccaaaactttacacccatagataaacacccccttactgtgaaagcgagcgatgaaattgcaatgacacgaatgcgacatgaagaattagctcgacgtagagctgtcagtcggtttcagaccacaatggaatacaatggccattcaaatcgaaacgttcgacagttttgtctgctctgaattacaacagaagatttacgcctggcattatctcactctctgaatttacagcaccaggtgataaaaatattgaagactatcagattcgtgttaactgctattgtcatgcacagggcaagctacacatcgatcaaactggactggcctgagcagtgtgcttcacattttaggtagcaagacgtatacatgagaaacttggaaaacattcagagccgcgttgctggtaggcagacagcagacagtgttcagagcaaacatatttcctgcagcctctgtgttcttctgtgcagcttccaaattacgacagtccagtcatcttgatctcctcaaattaagcgcgagaagcggcgagcccgtgattgttccatcagaaagctgaaaaatcttcagctaaatgggtatgcgcaattatctcctttctaatgttcagctgcttcgtgttcagtgatcctattattcagagtcgctgtccatgttgtgcattgctttcaaccccctggggcgctgtgaaaccagaaaacaatcaaggaggctcatttaatcgaggatgtcatctagggagttgcaagactgaaattgattttagcatgttactaatccaatccaactcacctttttagaaaccttcttctctcggacttcgtatctttccagtgtcaagtcgcaaagccatgttccagggcatacaagctgccaaagatgaacagaacttagggaagaataatatggtgacggggttatatgcaacctcaagagaatcatatcgacaaaacaatagatatcaatggttgtctgactcataacttaagcctgcgtaggacacaactaactaatcattgatctgccatatattagaaatggaactcaactgaaacagcacagcacttcctggcaaattgcctgccagatcagctcattgatacagaaactgtaatgtagtcacaagatgaaaagtatggcaattcgtttggctgcttcaatgaaggaaggtaaggatcacactcaatggtagggaccgtacagatcaagcattgaggtggcaatcaaatggaaatcacaatcagcttttaatctgtcttatgtttgcttcagacagaagcataccgaattatggacacctctaggcaaacaaatttaataaatgaagcatccactgcatatcagtattatatttgcacgtcttgtttggttaaggagcaaggcaagcagcgtgcgcagaggtggccctatgttccatgtgatctcatgtcatctatttaaaatttttaaaaaaatgcatagccagtatgtcatggcaaattcttgtgttactgaactatagcacagtaagttaggagctgacaactacaggctaatagcatgttgcaataatgagtttagaatctctgtgcaacaagcaaggaacatatacacaattatttaccatatcatatgcaccaagggcctgtttagttcacgaaaaggaaactttntggtgtcacattggacgtttgaccgaatgttagaagaggtttttagacacgaataaaaaagctaatttcataactcgcatggaaaccgcgagacgaatcttttgagcctaattaatctgtcattagtacatgtgagttactgtagcacttatggctaatcatggactaattaggctcaaaagattcatctcacgatttcccctataactgtgcaattagtttttttaaaaatcaatatattaatgctccatgcatgtatccaaatattcgatgtgatgttttgggaactaaacatgccccaagataagaatcctatgcgcattgatgtgaactggaatgcattgaatttaatgagatataaagctaagatgaaaggtgcatacattcactgtcctctggatgactttggctctcttcttgggcctctgaggaagcttggatcctttgaacacccagaagtcctcttctttctctttgttcgtcagggcgactgcaaatttgggccagatcgacccctcgctccctgacgacgaacccttcttgtcatctggggaggtcggcggacctccattgttgttgatgatgttgctgccccttgcagggcgttctctttcaggtgaggcgactgcccggatcccgttcatctgatgctgctgcgctgaagatctcattgctccagactcctctgaattcctaccaatccagaacaccggctattataagtgatgcagaaaaaatggcaacgtgctaatgttatcttttgattttggtttggttgtggttgcaagcaaccaatgttagattctgaagcttgtctggccgaaaaggagaacatagagccaaaaatgattattttttttagaggaaaaacttggctggagctctgcctattcatccgaggagtagtagaattagacaaaccgaacactttgacaaaattgtgcatttaattctcttcataaaaaggttgtgtacatctaacctccattaagcacagtaactgtatgtttaatcttcagtaggcagtcctgtgtttttcttattagtcaagcaaaataaggtgacagataatctattgctagaaacaaaatgaacattcaacaacagtgactgatttcgcggtgaaaactggataaatagatttttatctctaaatcttcttacagcaaatcattcttagattctcacatagggagaaatggagcaccaaaaatgcatgattcatcacattttgggggaagggacaagtaagcaggcaataaatttcagcaattacctatgtcatgtttcatcatctccagataagaaacaaagtattacaggaagaaagagaacgtcacaatgaatgaacaagttgtcaccatccaccttacgagtggttgtgactgacttgagataaatatggtgttcccccctcaagccaaaattagtcgacagaaaattagctgagactagcatccaaaggcagaccgaatgtaattatgataagctattagcgtcaacctcatacacagttgtttcgcaaagaacatcgttgtagcaaagccgcatacactggatgaggcaaccgaaacggaagcagccttcacaattggcagttccgtttcagaaaagaactcttaataattcacatatggccctgacctagatagagatcgacagccaaaccaagtcagctaagttggaaccttggagatagattgaccaaaaaattcagcaagtaccatcttgcttgttattgaaagaacatatccctcaaattgtccaatattttagcctttcaaagacccaatttgagcataaaaagtaacacaatcacccataaaaagtaaaaccagtatctagcacaccagaatcaaacaaagaaaattagtgtcaagaccacaaaaacatcatggtcttcatttcacatcccgtagacaaacccaacgattttggacaccataatcatctcccgttacaaaccaaaaccatcaattcattgcttataatgtgtgcctacatcaatatataaaccactatttgtgcttagtaacctctgcatcatacagtcacaacggcaatgacacccaaagtgaaaccgaatcagatcaagaacactaacgctgctcgatgtcacgtgcccggggcagccaatcacgtgacggccagttgttctttcaacgcaacagttactccaaatcttatcgcattagtttaactgacgcttaacaacaaagcagtcagagagcacacgcaacgggcacggcaacatcgcaaataccaaaaatgatttttaaacaaaaaaaaaagaaataaaaagagagagaaaatggctacctgacagcgcggtggtgggcgtggccggcggttgtgtggtggcggtggtggtgagccgccgcggcggcggccgcacggcgctggctagccgcggccttctcggcggccacggtggcggcggcgtcgacgtcgcggcggtgcaccttgacgcagcgcagccgcttccggttgccccactgcaggagcaggtcgcgctccgccgccgttccgccgccgccgccgccgccgcgggtggagccccgcgtgtggtagtgattcctcgcctccttctccattgccggaccagagctcgccctgcacgtgtcacagcaacaaaaaaaaaaagaaaagaaaaaaaaaacacagaaattcagcagcagaagggaaggaagaaagattcatggtgggaagggaaattgctagaatttcaatcagattggaatagtgaagaattgcagaggaaattgctttgaggacagatcagctattcagctcagaccaattggtctaaaaataatctcaagattttattacaaatcttccgctttaattctccgtacgaactaggagaagggcaagttcaacaaactttagctcaatttcaccctccacccaaaagtaaaaaaaaaaaaaatcttctcagctgcccgatcaaatgaccggaacaagatgagacaccactaaaatgcaactcaattttaaggggccgaggaaatcagccagataaagttgcaaacttttgggagttttgcgaccactttgctttcaaaaattcagactgaaaccttaaaaaaaattcagactgaacgaactcaaaatcgggcaagaatcagacaaattaacagatcgaatttaagatgaaggtagatattcagttcaatttaactcatctattctggaaagaaaaagcaacctagataaaggggagaaaaaacagaacgatacaattttcggtaatcctacagtagagaaccaatattgaaaattcaacacagaaatggacagtgaaaaagttagaaagaggggacaacaaatcggacaaaatttgagacgagaacaagaaaacggcgagcagacgaacaagccaatttgggagcagaaaaaacaagagtaaaatgtgctaacttggtgaggtatacaaaatcatcaacacgagagaagcaaaacacaggggatgacccaaatcattaccagcatcctacctaaggaaaatcagctccctctttccaatcgacctactacaaggaaaaccaaattaaaactgacaagatttgtgacgaaatcaagtcgatcccaatcagaacccccaaccgcgcaaatcccaagttaggcagctcagatatgaagcacacttgatgcaactaatgcgtcttggcgaaattggattcaaattacccagtctgaatcatccctcactccattcccaatcgcagacagaggcgcagacaacggcagaagaattccagcacaggaaaaagcagccgcaaaaaggaatttaatcccgggggaataaagagggaactgaatcttccagatcaaacaaccaattagcaagaaccgaagaatccagaattcgaacaaaccacaagccagaactcacaacaattcagaagggaaaatttatccatcactgtgaaagtaaaacttttccaactccaatccccaccaaaaattttaccaaacaaaacaccacagagacaaccaaaaacgcagcgaatcaaactgttaagggcagtacctgcgaacacctcgctccaattcacctgacaaagccaaagattcctcactcctctcctcctcctcctcaagaacaccgacagatcaagagaagaaccgacaaaatggattcctcaggctgcggtgagaagagtacggaacccagagagagaaaatcgggacgcctttgtggccggccgtgttcttcctgttcctcccccccaccaccagaagccagagccagaggaagaagaagaagatgaagcccattttatatgccatctcctcccctctctctctctcccccacttctcgacccgtctcgggatgagcacaccaaatccggatcctatcagcgcctcgctggcccgtcctcagccgttgatctacagatcgacggtccagatcgccccaccgcgctcctctccgcggtaaaacgtgcaattgcctcgctcccactaatgggctgggccgctacatggcccgtagaatgtgggccgtggaccatgggccgtatgacgtgggccgagtaccgtgggcctgccgtgatccaattcccggccgtttccgatgcgattcggccactcgatttcatgattccgatcggaatcggaatcgcgcctctgcggaatccatatatattcgccggctcgccgccgctctctccaccgaccaccatggctaggatgaagaagaagggcgcgctctctcgcctccggacggcgacgtcgcgcgcggccaccgtggctaggcggaagggtgtcgtcgtcgtcggtcgcgccggggactgcggcggcggcggcgaggaccgcatcagcgacctcccggacgacctgctgcgcctcgtcctgcgccggctcgacacccgcacggcgctcgccacgggggcgctctccaggcgctgggcctccctctgtcgcggtctcgacgccctcgacttcctcgtcagcgacgtgctcccgccgcgctaccaccggtgccgcgaccacctcctcctccaccacccccacgccactaaaggcatcgacgccgacgatgccaaggttgtcgccggcaggtacgagcgcctctccatgcggaaaatggtggcctccatcgacagcttcctcgacgcggcgccggacgacgacgaccccgatcgacggaggaggatcactaggctgaggctggagttcatcatcaatcaccactccgacagcatcaaccgcttgatcgccacggccattgatgcttggggggtcaaggatctcgagattcttgctgggacgcccgcgcatcagctacggccgctggaccgcctccacatcttccctcaccaaggtatctgctctgatccccgcagctccactctgacaagcctgacgctggctaactgcacgatcccgccattgcaagggttccaagctctgaggatcctcgtcttgcagcatctgccaagctccacgcgtccagcagactacgaatcggtgttcacttcttgcacacagctgcgagtgctgcacctcaaatcctgcatgttcgatggcgttctacgggtaaacgctccgtgttcatcgatcgagcagcttgtgttcgaccactgcggcggtggcctgatcattctctacgctcttccaaagctcgaggagatggccgtggtgcagacctgcgtatggttccagcgtggctccatgccatgcctcaaacgcctgaacctcatctttcgatacaagcatgatcatcactccacctccatgccttggggcatgaacctgatgcagattgctgagtacaccccagaaataacagagctgttcctggagttcaccggacgcggggcggcgacgatggatgcgccgccatcatcgccattgccgtcgctgccaaacctccgaaagctcgtggtcgtcgtgccatcgtcgtgggacgtctcatggccgcgcctcctcttggaggtggcgccatgccttgagatcctccacgtccatgtcgccgcctgcgaggacgagccccgcggcgagatctcgtggcggcgatgcgagtcgcgacacaggaagctgaaggagttggggatgagtggcttcgaggggacgggaaggcaggtttactttgttaactttgtgatggaggtatcattagctctgaagtctgtgagtctgtgcaaatatgcaggtgtttactgggactacgacattgttcgtgaagatcgtcgttggagcagtgacgacagagctgatgtactgaagcagatcggtgagagagtttcttgcacagatattccggttcagttagtccgggagtgatttctcatgttgactagctagtaagtttaatagtgtagtcaactaatagctctaaatcatctattgctaatctaatagtctattcatataataattgtctgtaaatatatatattatattattaatatctggtcatatctctcatacacattaaaaaaacatctctcacatacacacaacgtattaaatttgtagtccgtttttattctctctcctatgttatctcctccacatatatgtttatagttagcttatagtatgctattatacttgtgctaacaagattgaattatgtttcttattaagttcttaggtataactttttataggctttgcacccatcaatgttaattttattatatgtgaaatagatttgtaagtttcaaacaattaatgtaagatgtaagttttggtacttgcattactgaaattaatagtgaagagatgtatgcgattaggacccgtattgaaccctaagttgcatacatgtggtgaattaattccttagccttgcaaaataatagatacatatgttcttgtttagtcttccgaattttccttcccaatatgcatggttaacaaaatgacacttctcaatcactgtatgaaatgccagtaaccacaacttcgcaatgtacattttttttccaacattgtttatcagaaccaaataattatttgacactcaagcggtaacaaaaaaatagaataaataacaatacagttctcgtgagttctcacatcacatgtaagaaatgcagtaccatgtgacacaaactcttttctccatttctcttgttattttcaggagtccggttatctttccgagttagtccactgtgccctcccttttccctgtaaccccccaaagatcatagttgtaaaatcttttttttccttgctaatatatcgatgcgtaagatttttgcgcattcacagaagaaatgcagtatcatggattataagaagatgtgcagtctgccaggcaattcagtaatagacagttaaagcaaccaaaaaaataaatagacgggaaatggtcattatgtgattaaaaaccatcggaacaaccagaattgaacaggaaggcatagtgattccactcaggtttgtacatagtagttttttttttcgaacacgtaaaaactttgcatgtcatttgtattagaagctataaaaaaatcaatttacaaccaagcactgggggtgggaaagggagagaatacatacgccagctagcgactaagtaaagacgcggcccctgaaaaaagagggaaaacaaaggaggttgaggaaaagatcagaggggtggatctactcgcaaaagaccttagaatcttgtcagttcaagagctttcatgattgatgccatccacatcccgtggaaatttgtctcatactctcaccaggtaagaacatatttctgcaagcatctaaatatatgtaggaatccatcctctcagtagaatattattaaaaatatataagaacagaggaaggtattactttatcagttcattgaacaaattgtttcacatagcatggtttatgctattgcagcgggactctccatcttacctttgaaagaattgcttcagcagaagtttggacagaggatggcaaccaaaacaaaacaataatgctactaaaaccatggactcatttcagtcgcaacatttcaatttattaaaggcaaaactatatccacatcatgcatgtaatatacagtcgcttttcgacatctttcacatgtaactaacaaagtatagatgagaaggctttcccaaaactacttgaattagagtaattgagcactaaattctatcagaaatctggtattgctgcatcagtagtcatctcccaggctctatgaaccatgtatacatgctcactttttaacaaagcaacaagctacagtaccatcgatacttctactacaaaattaacaaactaaaacagtctttctgttccctcagatcctactatcatcaactctattagctgagcatgccaacttcaagggggcaatatggattcaagagactctctaggcatccatggtaaaaagacacagcagcggtcaaaagcctcctgaggttactaggtctgataacttaagctttggatacaaaacatgagagatcactcaagaaatacttgaactggagttgctgagcaagaaattttatcagcaagctgatccagtatttttgctctctcctcatcacaccaacggtgttgttgcctcacaatgttccagtcccagtaacctatttcctgaacacggccatactcaaggaaacaagctccagtaccattgacacttcaatgacaaagttaacaaagtaaatctgtctctctgttccttcaaaaccaatgatcaccaactcctttagccgtttgtgctgcaacttggatggctgccacaaaatatcattgcaagtctctccttcccaaggggtaatatggatatgaaggctctccagacatggcgctgcttctaggaggagtcggggccaagagatatcccatgatgaaggcacatcggcaatcagaagcctggtaagctttggtaacagcaacgaagggcacgaaggccgaaaccatctttcatatccggtgaatcgtataacctggtcagttatgtctggagtgaatccaagatgcggcttgagatccaagttcgcaggcaagcaaaagttaagtttatgcctgagaccatcgcgtttgaggttcaggcgcacgaggcgcgggaaggatccaagcttgtaccgtacccaggtctgcatgacaactatactctcaagcattggcagagcgtgcagctcaaacccagggacgccacaacactccagaacaagctgcctgatcattgacctgggggcatcaacgaaaacactactgccgcgcttgcaggggcaggacttgaggtgcacctcttgcaactgtaggcatgagctgaacacactgcttcgtaggctgccgcgggtgtggagtcccgcaagtcttgcaggaccagcttggtgagagcttggaacccctgcaatgggggaatcacacagtccaccagcttcaggcttcgcaaacgggatctgtgcgggtcattgcagagaccatggcgacggaagatgtgggcatcctgaaaatgatgccgccaatacgttgtcctaccaagaacctctagatcctcaactccccaagtatcaacagccttggcgaccaagcggttgatgcagtcgtggtagtgtgtggcgatgaactccacccgcagcctactgatcctcctccgtggagctccgccgccgccgtcgccatgggcaaaaccatcatcggcgtcgaggaagttgttgatggaggcgaccatgtttcgcatggcgaggcgctcgtgccgcctgatgctagcaacgatggttctgagctcgtcggcgccatcgaacacaccactggcggactcgtggagctggatgcaccggtggtagcgcggcgggaggatgtcgccgaccatgaaatcgagagcctcgaggcccgcgcgcgcgaggccggaccagcgcctggagagcgccgcggtggcgagcgcggagcgggtgtcgagcctccgcaggatgatcagcagcagatcgtccgtcaggtcgtcgatgcggttgtcgccgcaagccgcgggcgcccgccggcggcggcggcggcggcggcgataggacgaacctttcctcctcctagccatggcggagtcgcgcggcggcgtggggtttggcgcgcgcatctgatgccctgagatcgcaatggcgtccccgcggccgcgactagatagcatccgccgcgggccgcagctggaatccgaaccggaatcgcaccgaggccgcagctgctcatactattcggactcgattcgacgggtggctttggggatcgggggggaggggcgatgaggcggtgacgccgccggaatccagtggagccatgggaggaggaagataggaagcgaggccgccgaggctctggcgccggtggtttggcggatccagcggccggctccggcgccggtggcgagcggcgacggcgaggcggtagggaagaaggattaggcctaaaaaaataaataatagaaaatgtggaaggcccatgggtgaaacctggcaagatttcattgatgggcctaatagtgcgatatccagcccatctcacagtagatgggcctgatattgtgggctacccccaactcctccccctctccaagagcgagaagcccaagctctgtcatctatctgtaagatacaaataattagagcactgtgatttcatcttggttttccagtaacttctaactgagtttaaagaatcacagttaaaagcattgtttgtaagggattttgatagaatgaaccaatgggaaatttgcttagaacaagctcgttgttttttaatcactagtgtagtaggctgctagtgtgggcatacaaaatgttttatgcttccttcaaggagtatacgagtagcttgattcttatcagaaaattcgagtcacatgtgtaggggcgataatcggtcaagatatatggtttctttcacaaccctacctacctagtacttatataattttagtttaaattgctactttactttatctccatatatagacattcttccttaagatgtttttattctttatagagtatttcatgtcttaaaaataacaacttctagaatttaaatttcattctaaattttattaataaactgcatgtactaactatgggtatgttcggctgctctttgttgccacatgctgcacgtataaaatatcgtcgtataagctgcaacacagtgtaaataagggcagtcgaacaaaccctatagctttattatcatcctaaccaattccgggtctgctcccacccacacacccaccctgagagcaggtacaacagtgggctaatagcctgcttacataggatgatttttgtatatgtggctgagaaagaaaaattgtagagagaaaagcgagcgactatttagtcgccggctcttcgcgcgagcctatgcattttacctaccatgggcccacctgctctcacaacaaccaatggaaaaatgaatatggacgtgaaatactggctggttccttcggagtagacactagcttgattaaaaaaaataaagaagtgttgcctgttgttgtatacattgtagattagctgtctattgttggacgtggcactcggttgcagccagcagtcgccggtactattaaccttgctatgagaatgcaaacaagtccttctaacctcctccatgatatatacaagtgtcactatctaaaaattgctatatatgtttcgatacggatagtgtagattatattcttcatgaaccacgatgtgcacctagaagagcagcatatccagagtcctcataaacaggctctacatatataaagcatataaaaattggtacggatattataattaaatctactgtgacctttgcacagtgtacttgaaataaagtcttagccaacaatctaaaatagtgtattcaacagtacaaaacgtgaacagcttgctgtatatatacatcaagctagcttttgttaaaaaaaaatagcagtgtatatatatatcaggccatcagctatgtaacttagcatgtctgacaagaatatagtcgtactgatactctaagatactctgtatatttaaacgtaaccataacaaacacctacacagaacaaacagtatcaattaatatgctgtggagtttcatatatatatataaaaaaaattaacagttgtttaattttatcactctgatccaggtctgaatcagcagtgcgttttctccaacggacagaaataaataagtaaccaaaacaacgtaagccgatctgttcctgaaatttatagcaaagccgtttacaagcatcatcaaactgcccagccagccagccagccacacagctgcatctcccgtcacaagaatacatatacacacactcatgaacagctagccacgcccaaaattcagctctctgaattctgattcgatcgttccagtcaaaacagcccccttcaatttcttcgccggcctttaatttcgccatgacgccacgagtttgttacgcacagaaaaacgcggtgccggcagtgcatgatgcatgcgagtgatcaaaccatggaaacttgcatcgaactctcacctcatgtcaccacaaaaactgcaggtgaaagttcagacttcttcttcttcagagatagatagagagaagcatgaacaataatactcctcatacatttcaaagttcagacttcaaagtgcacctatacacggttgtagagatgttggtgatcggtcacacatagcgatggttggtttggtgtcgattcttttctcaagctgacgtatagaagacatcagttcgtggtgttgtgtttttttttcttttatgatttagcctattaggattataattttatattttttctactatagcaatatataaaacctcgtatttgtctcgtttggtgcggttggtttaaaagaaagaaaaggttcagacttcttcagagacaaagagatggaggggcatactgccattagcacacaggaatagaattgaagaatgctgctgcagcagcagctttggtcagtgcacagtggtggtgttctcaaggtagcaagctttggcagcaaacgaggtgtagtactccagaatggagagaggggacaggggtacactgccacacatgggggtcaggcccaaagggaatgtcttttggcattgggcagcccaaagcgtggtggtaccgatacaccaacaccaacatatgcattccgtttctcatcttgttattcccctagctaagctcaattagctaacccacacacacaaaaaaaagcgagctaaaggcgtgcaaatgcaagatgctacagtgccctgcagccggcaaaagatcaaagatttcgattccaattccaatggcacattggcacatttcaagcccagatgcatggtcgacagcaacaacacccaggaagagatgatcatgtcaaaagggacacaaagcatggatatgtacatgtcccaattgtgtctgatcaattcctgtccaattttctcacatcatatgtggcgtgattccaattcagagatgtgtaggggtggtagctatagtaatcaatcatcagaactatcatgattccaattttactttgtgttttctttgcttgcttgcgttgcatgcatgcattgcaaaaaaaggctgttaaattttagcaacaaaaggagcaggtctttctgatggttttttgcatcgtccaacatggaaaaagttcggcgatgtcaggcagacagaaagtgcatacacctttttctctctctcatttttacccttggaattgaagtacttgggcaaaaaagagatcactgattaatttactcatgtcaatgtcatgtactatacgttattactgcatcgatccatgcaaaacaaaatagcgtttagtacataattaattaaatattagctaacattaattagaaaaatatattaatatgattttttaaagtaactttcatatataatttttttttaaaaaaacacaccatttaataatttaaaaagcgtgcgtgtaaaatacgagggagatgagtcggaaaagtaaaataagaactcagccctagttacacactgttaatcatataaaatcctctcaatcgatcaaaaggtaaaaatgaagcattaatttttatcagcttgaacagcaagagatttgtctcatgcatgtataaaatatatatatgtcactcacacgaatacacaccttgcatgcatgcatgaatcatgcatggtacacagtactacaattgcaaattcctattggatttcacaaagccagcaagtccatctcgcccaaatgcaagtacagtgctattgctagaaccagtagcagcagtagcagtagcatttcttgatccagtgtagtagccatggtgcaacaggttgccgttgccattgccattccctagggtttccagcgcctcgagctgcgacttgaggaacttgaggtagctggcggcctcgtcgagcatggtggccgtgtccatcttgctgccgccggggaccagccgctgcagcacgcgcaggcgctcgctcacccgctcccgccgcagccgcgccgccaccgtctgcgggtcgctggagatgcgcacgttcttgcgccgcggccgctggggcggcggcggcgccgccgatgacgggtcggaggcggaggcggcgccgccgagggtgaccgggcgcatcgccgccgcgcggtagatcatctccttcacctgcg

SEQ ID NO: 4868 - DNA, 9625 bp, Oryza sativa
catggttttgctggtcgcacccatggcagttaaggaccggttcgcgggatgccctggaagaacttatcgtacttaccacaagccagcgtgggcaacggctgggcttgtagcgtagctttcctctagccgacgcatccaggcaagggtgggcgtgatggagtttggatgggccctgcgacggcctatgcggcttccggattcacctaggcacgagaggggactgcccgctgcattgcgaggagtgggggtgaaacctgaggtgtggtgtgcttggttagagggggttatgcgaagggtcctgtcacggcctctttccggtatgtcgtggtggcatgtcggcgcacggaaacgtgtcgtggggctgtgtcttgtgggtacagttgtacacctctgatcagagtaaaactattcgaatagccgtgcccgcggttatgggcggtcaaccagattcaccgtgattagtttcaccctagtgtaatcttttgaatttgtaagtttaggtggatggttgggcctgttgcaacgtgggatagcgttggacagtggatagttaatattaattaattattacaactgtttaaatctttcaacttctgtttataaatgctcgctttatgcaaatgaaccactctagctcttctgtgataattccctgcatcatacccctattccggtatgacttgctgagtacagtgggtagtactcagtcttgctctatttttcccaaccccagagtacgagtatgtgtcagatggaggtgtctctgaggagtaggcttcgtccgtgccgtcaaggatgcctgtggagtggtgttcccgctgcagttctagttaaggcttagctcctgttgcctttcttttcttctgctgcatttatgtaagacttttatgatgtttataagacgtggatctgaatgtcaacattgtcgtttgtgtaccccggccggtcctggacggggattttgatgcacattctgcttggaattctattcgggaatttctgggcgtgacaacagcattaaaagacacttagttgctcaaagctattttgtaagcacgatcctagagctatacgaggttattaatcaaggccgtgaacccacacgaacctgccttaacccaaggcctacgataattcagaccgaactggcaacccgaccctgggtcccagctcgtcccaagccaacccagaccaaccattctacattttagttgttaagcaggtattaagaattaaaacactaacttgggtacattgctcggcttgcccataaccgagggcgcggctattcgaataggttatactctgatcagaggtgtacatctttacccacaagacacatctttctcacgtgtaaccacgtgccacataccaccacggtatacggatggaagacgtgacatagtttccaacccatcctagccataaacaagagtaccgacccaaccccacctacggccggaacccccgggacaggtaggcaggactgagcccctagcagcaggacaccagccctgtaccatgacatctcgactaccgagccgcagctcgtgtagccttcatttgccctagagatgtccatcgacccccaacttcgtccatctccatccgtgtacttttgtttataaccagactgagccacaaactaagccttacccactagacatgtggaagtacggtagtgctttgcaacagaggcccgaagaccggtccttatatggccgaagtgctactatcaaaaccatgcaccccgagcccagcctaaaaccattttgagggttttgaatagagggggaggtgtgaatccaattccacaataattcaaccattccataatgtccaggtgatgagaatattcccaaagtctagagttgtaaaaccacctaatgttgcctaattaaccagcgaagcatctacctaaattcatactagtggtaccataaattgagtacccactagttggggttttgtttattctagggtgaacaaggtaataataacaataacaacaataataaggtcatacaaaggtaaatgggcatagctaaacaaaacagtgataacgcgggaatttaagtaaaacggtaatgtaataattttaaatcaaaataattttataaactgggattcaatatgttcaaggatgatgtgacttgccttgctcgctttcccaaacgtcggcttcaacctccacgaagagcggatctttcgaagctgcagcgtctacacgactaacagaaaaaaaaaagtcttttactctaataaactccatataacaagtaggaacaaagcacaaaaaagggtttttgacttcttaaggaaaaattagagacttgaacggtctaattccgagttcaaatggccaagttatggccatttgaagtttatatgctctttaaatgaatatttgcgaatttcttcatttaaattttaatttaaaaagggtttattgcgtcagccgagggggaggggcgcgcggaccgggtccatgggagtggggctcacgcggcagcctcacggtccacggtggaccgggcgcacccgggctcgcaccggccggcgccgcgggccccacgcgtcagccgcacccgagggcgcgggcggctcacggccgggccccacgcggcagccactcggcgggcccgaaggcggccatgccggcgcggccggcgggaggcggcgcccgcgcccctatggtcgtcggcggcggccataggcacggcggagcggcggccgagagaggggagggagagggggaaacgaggcggcggtccatggctcaccccgaggcgacggcggcgacggaggaggcgcccggagtggaggaaggcggcggcgcggctcgggtcgacggggacggcggcgctccggcggtcggcgagctcgatgagggggtggacggggacggcgacggtgcggcgaagccgaaggaggcggcgccgaggcgggaggcggtccggggcgacgacggcggcggaccggagctcggcggcggcggcggagagagagagcgacggcgtgagctcgattccggcgaggagaaggcgcggcaaatggtggaaacgggcgaaggaagtgcggggagggtttaaatagggttggaagggggagagagcggccggggaggaaggaaaccggcgcgggaggtccggccgccatcaatggcgccggcgagatttgcgggggcaaatccgcccgtttgaacacgagagagagagggaaaaatggggggaaagggagaggggatcacggggagtatttctccccactttattgcacgcggggacggcgggatgctgcagatttggcggcggcggcagcgcttggcgcgggcggggcggcgggaggacggggatgacaggtgggccccacccgtcagcgagggtggcaggcgggcccgcccgtcagcggcgcgcgcgcggggagggaggccgaatgggccgccggggagaggagagagagagagagggggaagagggagatgggccgagccggcccaagggagggaagggggactttttagggtttttctttttataaaacctttttaactttgtttatttcttaataattattatttgtgctctgaaaattccactaaaatttatttacacattttaggcttttaggaaatatacaaaaatcctctaagccttgattgacttttaactttgcacattttaatttttgaaggctttcacaaggattttaattattctaggcataatttaaaggatatattttagagtcgttttgggacgtgacatccgcgctggcatgatgagaggggaggggaagcgcgcccggagatcggacggcgcacggcagccgacgagttccggcgagcagcggcgaatcggagggggatgcgggcactggaggccagagggggtcgaggcggttccatccaccggctcggaagatggggaggcagcgcgacggcggccagcgaagacagtcatgcggcggcgggatgggtggcacggcgcgggcacgtgagggaaggccggcagccaaggcggcggttcggggagggccacgggagctccaagagggcagaggcgagaggaatcgacggggaatggccgacaacggcgcgcggttgtgcgcggcggcggtggaagcagagcggcggcgacggaaggggatgggaggccggcggctagaggaaagaggcggggcggccaaaggagggggggttgaaggggtctccgggagaccgacagtggggaaaacgtcaagaggaaccgtcggcgacgcatggccgagcggcggcgcagttcgcacggcggctcgcgcagtagcgccaagcggcggtggcgggagcgacatggcgcgagaaaaagaggggcgctgaaggggagggaggagccggggagctcaccggcagccatgaaggcatcagcggcggtggcgaggatgggaacgcccgcgggacggcgcggcaccgagtgagcacggccggggaagaagagagagggaggcgtggcgcccggagctcctcgtcacacgtccacgcacgcaacggcccctccggtgctcggcgacggcgagagcggggcgaccagcaacaatggcgcagcaacgtggagagtgaagcgggagggattgaggggaggggttcggctttataggcggccaggaagtcggttagggagagggaaccgttggcggtcaagggagctcagctggtgttcacgggcggcagcggcggtttcgggggcagtgcgaaagcggtgtggatgcgttggtcggcaaaggcggtggattggacggtgaaaaattgggtcacgagcgcgggaggagcagcgcggcatggtcaaagtgtgggtggcaagctggcgactggcgtcagcggctctgcctccggagcgcaagggcatggataggagagagagagatcgagtccgagagggaaaaagggggaaaaatggaggaataggggaggcttatccatgccgttctgggaggaggagagagaggggaacgcgagcacggtctcccaggtttggacgcatgcggcgtggagcagtagagctggcgtgggaaagagagagcgaggaagaagaagagagcgagcactctctcccgagcgcggcgcacgcgcgacgcacgtgcgaggggaggagaaagagcggctgagggagagaggtgggctgagggagagaagtgggccgaggggaggaaatccggcccacaaggatccgagggaggcaaaatagactttttgccgaggagatcgattccgaagggattgagatttggaatttgaatttcgaacttgatatttggactcataggaatatggtggagtcaaggaagggagatcaaagtgaaaactcaatattttcgaattggttttgtatctggagacccgaagaattatttggggaggtttccgaagaaagaggaaaaaggaggaatcttggaggttgaagctcaaggctgggatatgtttggatttacatccttggagttgggacaggaattcaaaggttgttagatagacagacgaaccgatggataaacatgtagatagatagatagatggatggataggtagatagatagatagatagatagatagatagatagatagatagatagatagatgaacaggtagatagatcgatagacagggagggattcaaggtagggatttgatattctcggaatcgagagaaatattggcaaggaatttcaaggacgggattgaatatcgatgtttgactttgaaagatgaatcgggattgacattttagaggtgggggattttgatggcgacgggagggaacaacgatggatttaaactgagatccacggcacgacttagactcgctcacaaggaacggaatttttgaaattaggatttttctgaattagtttttaacgcctcacgaaaagcggagcgttacaagacccctacatagcaaatgtttgtagttaacaaagttattgatgatgtaaatttatatgcaaaataagttaggcagaaaagaatacatttctgcctccattgcagctatatcttctgggttgccattcttacatgtgtaccggtgatggcctaacagatggcagattgggcactcatgtttttttgatgatttcttctggctgctgcttcctccctcaagtgctgacttcatcctattcttatgcctacctccagctgtggacttaagcaagggagggtgcatgaagaagtcatgagtagctttgggccacatgctcttgtctggtatgctagggatggaaccctcatatgcggctctaaatctattgacagagaagtagtcatccacatggtcttctagcttttcaccagcaatggatgtaatgaaagctatggcatgcttgcatgggatgcctgagccctgccaaactctacaagaacaggttctatcttttaggctgaccacatacctaaacctagagccattgctgccttttgcacacagttctgccacaccttctggagaggctatgatcacttcaatatccaggttgtagctctcttccttaagcctttgcaagatgtgaggtagaatttttccattgaacttcttggctaccttctttctttggttccattttatcaaaattttctgccttatagtgtccaacaagtcatccaagtgctttcccttctttagcttgatccagttattgaatgattcagccagattgttagtcacataatccacctttgatgcagtcctgtattggctcctggtccacaacttcttgtgagtttcctgcaaatacttcattgcttctggtttagctgcagccattgcttgatagtgcttctcaaacatgtatgggctccatgaataagaagaagcccataaatgatcattaaataccttcccactgtacctcttcttaaaattctaaactaagtggtacatacattctctatgttcagcacgtggaaaaacatcactaacccccttcatgattgcctgcccacaatctgtgctaaatgttaggccatctggggtacctattacttccttcaatctctccataaaccagatccaattctcatttgtctctgactcaatcactccaacagctactggatacatccagttgtgcccatctactgcacaagctatgcacaactgtcccctaaacctgcctgtcaagaaagtgctatctactgcaagatatggtctacagcctctaagaaaaccatcaacacatgctctcagtgcaaagaatagtctacaaaatctgattttcttgtttatggtgtgatggtcaataacaagaaaggatccaggactagattcttctaactgagccttaagcctatacaggttattgaaactcttgtccagggcccataaatcttatccatggcaagatatttacctttgtacactctcttgtagggcaccacaattttatggtgctccttcaacctcctctgcagttctgttgggccaatatttccatcttccttcagccaatcaatgacctgactgcacacccagaattgagtgaccccaacacatattccttgcctcctagtgctctgacatttgtgaggtaaggggacttttttcacctgcaaactagagaagcaacacatcaatgtcatagttcaatgaaaattgtgagcaatcaaagaaaacaatgcactacatcaccttcacagtgtttccattctttccagttgaggcatgaagtctccacttgcagccatcactcctttgtgcgcatttcaccctatatctccctgtatcactcttctcaatgtcatagttgaactcatgtttgatagcatggctagctaaagcaatcttaaaagcatccatatcagaataaacagttcctactgtcataggagggtcattcttatcataaaaagcatcaggcatattttctggctccttgtctttaatttcatcatctatgtctttgtagacccccgatttttggaaatcggaaatcttctgtgtttattcgtaccaatccctggatcagtagttggtacacacatacatagttggatcacaacatatcacgaatgaatctaggctaaaagagttaaatacttacattagggccaggtaggccaacaactatcagagaacaacagcggaagacaaaataatataagggcccggttaacatgccacaggcagtcgactggggaacgagacctagaaccagaccgcactccgatcatcttgtgggatacgcaagcgtaccgacaagggcttctcttcaacactctcctaaaagatatataaatagcaagggtgagtaccaaccgtactcagcaagccaccacaacaacaatgcgtatgatagaaggtatttcaaggaaaggcttcaggttcttttgcataaagctaattttgcaattcttttcataagcctaagacctagcatagactgatcaaattttagtaccagtgttcactttaaacaacgacggttctgtccaccatccattgtgatcccaaggatagcttcccgccgttgaatcgtcatggttttctaaggatgtccaccttccctcctctcgggatgtggctccatcagcataaaattcatcatgcaatatcccattccccacaagttaagaatttagagtctagccaagtgtaatacatgtcccggtgctcaataaccgcgagcacggctattcgaatagatttggtttactcacactgcagtggatgtacactttacccgcactccgcgactgcccaacacatgagcctcgtcccaacacatgagacgcgtcacggcaaagcttttcgataacctcgcattggcagtacccgctccatgaacttaaatcctcatgcactctaggcgtccatgtttctagcagtgagaggagttctggcgctcccgggaaagagaagtctcacacgcatattaaattatggttcaagttaagttctctctctcacacactcatggcagtcctaccaatggcgacaccgatgtagggcacgcctctcggccctacctcaacggttatcccattgtagcgcacctgcctcactcaggggtgaaccatctatgcagggatactgcctccgctcggctatctaatccgctaggtctatacccattcgagaagtacggttgtacgggggtcgtttcatgcttaacttcatggctcggtccttaattgaccggggacggtactagccttttccagataccacccaaatcctccgtccgccccagtcgaaaacagttgtttaattttatttctcctttcacaaatcatgtcatcaacatcatggcaatgtggcgctcatgtctccacatgccgcatctcaattaccttcccaaaggtaattgcccaagcatatagcatttgataaatatgagtatgcatgattctagaatagcatttctaagcaattgtcataattgactagggactcatacgtaatcatggttacaaggattttaagggtaaacaatcatcaaggcatggcataatcacaagtaggatgttcatcattgcatgcaattttatttgtaaacaaaacaatttcgccattaggatcaacatgttcaaggaatagtgatgacttgccttgctcaggataatccttattattgatatattcttgatcaacct

SEQ ID NO: 4869 - DNA, 12977 bp, Oryza sativa
aaggcagggtttttcaaactttcccttgatttaagtagtttgcctaagagcccgtgcattgcaatgaaaaacaaattaagtttctagcttattgaatcaatcaataaacacttatttagtctaagtaatactatgatttttcttattgaacaagtagataattttgaaatttggggggagccaatagtgaaatgggggaggatttgttgaaaggtggtgcaatagtatagattgtggggcccaattttagtggtaggggtggtgtgggaatagacaccaccactaccaacattttaactagtatagatatagaaaactttaatcagaaccagttaatatgagtatatgattgaaacaaaaagtttattaaactgttagttgctctttagctaataacattgtttgtttgcagcgtgctaatagagatgttgatagaccctttgttcctgatactgttgggtttgcaggtaatttggaaaaatacattttggtttgctttcttcttgcctcttcaatcttatcagggactacttatacttttttttgtttcatgttacctcaggtgagagagcaggcaagcgggaccacaagcggaaggtttgttctttctcatcctctctgtgatgatgttcttaatatagtttcatctttaatgtgtgtctgtgggacatcctgctgaccttctaaatatctagtttgaggggagacaaaattgaattgagacatagttcaactgctctgattttctgaaatctatccatttgtactttaccatcctgataggacatgcagacaggaactatatgttgattttacttatgtgtggcaataccatttaaaacatcaaacaagatgcttcagtgtgttggatcatccagtatcaaaatgaagtgcaatctctattgttaatggccattttggttgaagttgacagtcatattcttgctgtcctaaaatgtttgcattctggaatgctccatattttagaattcaatcagggacttgttttcttctataaaactatatgattacttttacttggttttatcatttacatctgtaacattttcgccagaccactggaagatttatagatgcacctccctcaccaccccagtccaagaggcctcggaagttgaaagcatctgattgatgagtttcagattgagctgcatagaatttcaacaagccaaaacccctggtatgccttactggcttgaattgaacttgcacttgaatacttgatcatttgttgctcgcttcatggttgacaactggaccttgtgtttcagatagtgctatggatcaactccattcttgcttggaagcttcccggcgtgcactttcaccaagagtttgctcccgtcggtagaagccgttcttggcttttgtctgtacagtgcatctgccctgagaaggttttcttcgtactcctcgttggaagatgagacgaatcaggtggaagcagctgctggcgtcactgagaagtgatcgccttgagcccttgacgtctccccctactcaacgaagagtgtaactgtttcttttgtttgtttgagctgtagctaccgtttgtaaaatgagttatctgacaataccgtgtttgttcaagtagaactgtaacacaactgtttacacccaatcaatcctgtaatcttggacaatttaacgaggaaccgcgatcccaatgcaaacctgagcctggtttccatgtgtggttggcgttatagcttatcaacagccttgtgcagttcaacacaaggtactccatctgtctcataaagaaccaacttagtactagatgtgatacattctactactataaatctggatgtatatctgtctagatttatcatactagaaatatgtcatatccaattctaaattcgttttttatggaacggagagagtactcttcgagtcttgataactcagccaacacagttgacggtgaacacacctggagaggagaaagcagaggtgtgcactgtatctgtgtatcaatcaggccgagaccgacgctttgtcctctcatatagacactgatcgacgtctcgagattgactctcgactttgccccgacatgcagtagagcgttgggcagtgacgtggcttaatctctggccgtccgtgtaccgatcgatggccacggatcggatagaatatgccggaacacatgtcgtcaggttggttggcatggatagaagatagattgtgtcacgtcgcggtaggcaaaattttcgcttctcgagtggtccagtggacgttgccacctgcgtgtgtggcacgcggctgagtggacggtttgtacaaggcgatttctacagttctactggctatggggcctatggccaattgaccatgagcagctggttggtgcccagttcaccggagccgccaatccaaacggcttgatgcgtcgcaactgtggagctttgcatgggtggagtcagatgtggagggtggttgttgaattcgttactactactactggtgcatgacaagttaaatcgggagagaaaaagaccttacaaaagaaattgtgagaaaaggtgagagacgtagccaaatacctgatgaactgtgacgtctgaatatatccgagtattctgcccgtttgacgtgtcataaatcttatataattattagtatatcccagtattctgttcacttgatagaatgatagcttacaaagacacaagtatttactatttgtgctgactagtcactcagtatgcaaaaatctgcaggtttggtagagacaacacatttaactttggacagcaactaatcctagcatcagattaatgctgagaatgagagctcagtttcatccatcttgggagtcatggcctcatgggtcacctgcatgggccaccgtgcccaagatcctaaacttgctcccaaatttatgagtagtttttttttccgaggtcagagaggcataatcacaattcacaaagatctcaatcccaaacgaaagagacgcccgacccacctctcctgttaacatcactgctcacttatctcatctcacctcttgatttgaagcagacaatgcatgatcctcagtcacaagataattctgttaaggcaaaaatcttgcaactatttcacagtttaattcattaacaccacatatataagaaatctcttgattgatttagcattgctaagtagtataattaacagggagcttagtgagcttgctgtgaaattgcaaggctcttgttgttcttggcgagtgtggctagctactgcttgctgctgccgcggttgagcatctccttgtagttgagcagcgagttgagcctctgaagctgcagttgctgcctgaatttgttgatgaagtcgtcggctctggcgtccacgccgccgtcgtcggcgtcctccgccgccgtgtccttcctcgcctccgagctcgacttggtcatcgtcttcgcctccgacgccgcctgcttcttcgccttcttgtcctgctcccgcgccggctccgaccgggtcctaccgtagtgcgcttgtgcgggcgttgccgccgccgctgcgtcggcggggatgtcgtcggtggcgaggtcgccggagcggaagctgtagagggtgaacgagcggaggcggtccaggacggacgacgtgcgcgcgagcggcgccggcgccggcgccgggggaggaacgtattcttgctggagcggcagatctcgctgctgcttcggtgtgaaatcgtcttcggccgtcgcgtccacggcggccgcggcctcctccgggaacgcctcgaccaccctcgccggagccctcacgacctctgccctcctcacctcggagctcgagttcctcagcctcgacgccgccttcctctcctcctgcgccggcgccgccgccggctccgaccggctcctcgcgtagtgcccttgcagcttcacctcatccaccggagacgaagacaccacctcctccgtgcgctggtggtggagttggctcgtcgccgccgccgcagcagtagcgtactcgggagggaagtcaccggagcggaagcggtagagtccgaacgagcggagccggtcaagaacggacgacgtccgcgcgagcggcgccggcgccggcggcggagcatacagcgtctcctgcatcatcatctgctggtgctcaccgccgccgtagtattgctgatgcagcagcggcggcggcggttgcaactggtcgtggtggagtatctccccgtcgtggtgatactggtacacctgccgccggcggcgctggtgcgtgcgggaggtgagcgcgatggtgccgatgacgatgttcacgacgaggaacagcgtcgccggcgtgaagtacccgcggatcgccgcccacgcgcccacccccggcgacgccgcctccgccacgtccatctatcacgcggaggctagcaggggaaagcgcggaaacggacgacgcgggcgagagctcggtgagcggctgtggtgtacaggtggggattagcgtttttggggcggtgtacgggggtttgtgtgggttggctagcacgagggcgtcgcggaggcgagcggttaaaatggcgggcgaggcgaggcgggcgggggcgacacgcggcgaggcggggtgggagatggctgacttggtgggtggaaaacgtgggaatccaagctgccgcccaagcaggcaagcagcagcagcgcggggagccgacccgccgggattgcagctgctgcatctgcatggcatcttccgccaaaaaaaagacggcctacgacgcgtacgctgacactgtagtatgtggtggactggagtacaagtcactgttgctactcggctactccagccgtcctatggcacgtgcatatacagtggtatgtacagttgacatttttccatggagcacacgacagaataatgatactacgagtacatgcgtacatgagatgctacaatatactcccttcgtttcaaaatgtttgacaccgttgacattttagcacatgtttgaccgttcgtcttattaaaaaaaatttatgaaatatgtaaaactatatgcgtacttgaaagtatatttaagaatgaatcaaacacgtactaaaaagtcaacggtgtcaaatattttgaaacggaggaagtatattgtacgataaagaaatgttaggtacacatggatatggagtatatcatgagtatatcatcgagcttggcacagaggatcttgtaagagttaagcgttgtcgttgctggtgcacattgacgcacagatgccctcacgtgttgctcgatcgattgatcagtccacgccctgctgcaagtcaacctgctcgcgtcgtggcgcggcgcccgtcagtccttgattagtgcattaaaccgacgttggggataaccgataacctgtccctaaatctccatgcttttcttcttcgatggtcgctttcagcggcagatatgataacgtatcaactccaaatgttccaatcacatctttgcttccaacgcaaccaaccatcatccaggcaggctccaccagatgacctttttaatttaccttcaccgtttaggtagtatgcaactttggaacgatctcttcagattagccatcttgagcttgtacgttatagaaaaaaccgtttttctgatggtgatttggtgacgcagatattctcgtggagtgacgagaggatgggactcactgatggagcagcgcagatcaggggttcagagtgacacacttgcacacacatttacatttttcctagagatggcaattgtgctacagaagttttcgtgtacagcgtttttatggattcagagtgacacgctggtggagcacacgacttggtgatttgagtccgattacagtcggcctggaacggcactgtgatgttaccttcagcccattctagttgggccagaaaggaagtacttaaatgtggccccattatacttgggcctgggagggaatacgagtagggatggcaatgggggggctacacctacaaggctacacccgtcggattttgctatcctgtcccgtccccgtagtagaaaaaaaatcccgtccccattcccatccccgcacgcgggggagtgttttcccctcccccgttcccgcccccgtgcgggtatggggcaccgtcgggtgcccacacccgacaatatctcaatagatttggtagcagcaaagcaagacaagaaatagccaaacaccagtgaataagcaccaaatcttaccgtaatccaagtatccaggctatcaacaacaacaattagcatgattgcataaggaccaaaggcatcatattaggtattcacgttcacatgcgtgtacatcaccacaacacaactacacatgcagtgaatatgcacgctattacagatcgatcggagtaggctgtggcggcagcggcgccgaagcgaggctgcttgctagttgctcccttggaggcggcggcgcgaagcgtctcgcacggcaaggacgacgagagctcaacgccgccttctcgcctggaggtgtggatgcggcgacgcatcagggaggccgagctcgtggcggcgcgcagggagggagtttgagctcgaaaacgaaaacaattttaacatataattaagtctttaattattactttctccgtcccataatataacgtacgagacactcctgcggtccagattcattatgccatgaagtgtctcatccaatactaggttgctatattattggacggagggagtacaaacttaacaaattaacatatttaatatgttaaaacaatttctatatagaaagttttcgtacgtaacaccgtttagtagttaaaaaaaactatgcaaataaaaaacgatgtaaaatccgaatcttaattagaaaataacaggattgaccagagtcgccaccacactcttagcccttggaggcttggagggtactccctccgtcccaaaaaaagacaaaccatggtttccgtgtccaacgtttgaccgtccgtcttatttaaaaaaattataaaaaaaaattaaaaagacaagtcacgtataaaatattaatcatgttttatcatctaacaacaatgaaaatacaaattataaaaaaatttcatataagacggacagtcaaagttggacacggaaatctagaggtggaacccaacgtaataatcttcaagctcctgaagggcgggaacatatatgtccggtccttgcagtcacactgtcgagtcaagttcgggtagtttcgttatatgttttaccatcagccatggtaggctatgctctctccattttaaaaaaaatcaatctaatatcggatgtgacacatcctaacactacgaatctggatatatatatatcgagatttatagtattagaatgtgtcacatctgattttaaatttgttttttatgcgttggagggagtagtggtcgtcgaagcccgagtccgctcagccgggagccgtgtccaactgcctcaggctcgacgagttttgattgaaaaactccattctggctagctcgtgtcgcctactcgccctctcgatcgtccgtgccacggtctcccatgcgatgcgatcccaccgtgtcgtgtccgccccgtcgtcggcaacgcgtactacaggagggaaagccgtcgtagtggacgcacagttcgtccactctccaggatccagatcgtgccgacgcacagttcgtcgtagtggacactggacacaaccaccacgccaccccacctctatctgcatgacatatgggcccacgatgtcgcggaccccacgcgccagcctctcctaacacgtcccccgagaaagccgtcgcctcctccccccttctccaagcccgagacgtccgagaaaaccacatcacacggccccacttgtcagcgacgccaaggtgggtcccacctttgccacttgtggcttcttctcgccgttcaaattttgaatccccacgcggccaccgctaattgaacggaacggaacggtttgctgcggagttcgcgtcgtcgtggacgaaaaagacaacggctaactccccctacccccaccacttctcctcctacttccattttgtctctcgccttggcttcttcttcttcctcctcgcgctgcccccacaggaggagtttgtgagctctctcagcgtcgatgggggcgtcggggaagtggatcaagtcgctggtgagcctcaaggcggcgccggaggggacgacgaaggggcggaggtggacccggctgtggcggagcagctcgtcggcgtcggcgtcggcgtcgaccgcgggggacgcgtcggagtcggcgtcgtcggaggccgacgcgttcagctcggtcgtcgccgccgtcgtccgcgcgccgcccagggacttccgcgtcatccgccaggagtgggccgccgtccgcgtccaggcggccttccgcgccttcttggtaagacacagatttttctgatgctgctcttgatgtggcgcggtggtggtgatgctgtgctttgcgtggtgtgtcaatggcgtgtggagttaggcgcggcgggcgttgaaggcgctgagaggcatcgtgcggctgcaggcgctggtgcgggggcggctggtgcggcggcagctcgccgtgacgctcaagtgcatgaacgcgctgctgcgggtgcaggagcgcgcgcgggagcggcgggcgcgctgctcggcggatggccgggactcgcaggacgcggtcggcgagcgcgacggccgcgccgacccgatcaaacaagcagaggtacatgggaacacagcctgacccgcgtgcttctcttacgattgatacgtgcagtgctatatccttcttgcgttaatttctgaatgcaaaaaattgcattggtggcgcttcctctgtgcagtggattaaagaatcgaaatacttgtgtagtggagtatatataaatggtaatctgcatgccatttctgcaaattcgatggcattgctccatttcttgggactttgggagtggaatttggtagagtcagattgaagtgtgccttccattttcctatatcggtatgtaagatgggcctctagctcaacactggtacgtctatggcccatgggctgtgtgagtgtgtggttgaattcactcccatgtaggctttaatattgcaactactccctccgtttcacaatgtaagtcattctaacatttctcacattcatattgatgtaacatcaatctagattcattaacatcaatatgaatgtgggaaatgctagaatgacttatattgtgaaaaaggaagtatttagaacaagatagagcttgcaccaatccaaatcaaagttataaagtaagattttgaattcagtcctcaaaatagttgtcttactgacatacaaaaatgatgtatttatttggagatcatttgaaggcttgaaaattgaaaattgttctttttagttaagttatactactaggtgttataatttgagaggtttgtactggtgccttaatttgattccttaagaagaaagtgatgtatgacttaatatggtgggggtacttttacctgaaaatgacttttcggactgataaggacaattaaggttccttttttagtaatgattgagtccattaagattgttgttttctctctcgtaatgacaacacatgtttgaatcgatcttggaagtgatcctgttaggtaagaagaggcaatgctgacaagaccgataacgccttttgcaattagttattgccaggcaaagttctaagctggaactgtgctggttcttttaaaaagtcctgaggccacacaggaatatattttttggtgttttaattagagagaaaaaaagcgaattttgctttaaaatgagatgtatatcgtattaacatgtcaaagattgtggcattgcaggaacaatggtgtgacagtcaaggatcggtttctgaagtaagatcgaaaatacacatgaggcatgatgctgtggctaagagggaaagggcaattgcttatgcgctttctcaccaggtatacttttgtatcattaagaggaactcttgcgctggacgacgcaagttgatataacatgctgctcacatccattttcctttcagcctaggagttcaaaacaaagtgcaaggccaagctctcctgctagatctctgaggaaccatgagtctaataggtgcaatcacgactggagctatattgaaggatggatggcaacaaagccttgggagagcaggctcatggagcaaagccatgctgaattgaagtgttccaagaacagtggcgaactgaacttagctggcgcccaactttcaaatgcaagctcagttaagatgagagggaacagggtggcagcaaagcctccttctgtactctcagcttcttcttcagacttcccgtgtgatgtgagctctgcatcgacatcgtcagcaactccagcaagatccgacggtggacatggtgaaggtccgagttacatgagcttgacgaagtctgcaaaagcaaggcagagctgcaacagtccattccagattcagagacagcgatctggaggcatgtcatcttacaaaagggttgcactctctccattagatgttcagagcaacgcctgttcagaattttcagtcacctccaggaagttaaacagtctgtctctgaaaggccgtagcatgacaaggagcttggacaaggagaatgacaatctgttctagcttgctgttctatggacaaattagctaatttgcatcttacatatatattatctgatccgttgttagcatttatacatccaagccaagctcaatgcctcattgcctctatcatgttttttgtatgcacaactgagattagtcattagttaaatgtctgaacctctttttatccctaaatgctgtgtagtagtattataaagagctgcagttctaattggagatggtgacagtttcttatgtttgaatatatatcaattatgaatgctagcttggggacaatgagaatgatgcaacgtttatcatcttccgtaaagatcacatgacatgccattgccgatcgtctgattgctcaaacaattgccataactctcgccgattggtcgctctcatcacaatcaccgggtaaacattttaggtttggtgcagcgatcgtccttgattggcttctttatttagtgtccttttgactaacgacgtgatcaattacaataatcctctcctcatttgcttttcaaaaaaaccctacgatttggtcatttgtaccagcatcagcgaccaatacgtggcgtcctgaaattaaaaggacgagagaaaaggattaaagaaaagaattcgaacacgacgagattgtgcagagcagcagcagctgcaactgtaccactccctggttggtcactgcacaagagagtgagagggacgtggtgaaagctatgccgaaaccgaccaccacattaaaccgcacatctaccaaaatccacgttttacatcagtgagagcactattttctgatgtcaaaaccagtctatgttggtttacagaaagccatcgaaagcagcccgtaaaaccaacgactttcggttaattcagtaagaagaagaatagctaaaaccgtttggtttttcataaactgcttctagcggttttatgaaaaccaagtgctttacaatcggtattaaaaaatatcatcaagtataaaaatgtttaatcgatgtcttaaacaaactatcttcggtttataagcgtaaattttgtccccttccgctacttcgatcacatgtctatggcttataatcgtacaactgccttttaagcagcaaatttaactatttgcctttgtcaaaaatattttttaaaactatttgcctctcttgttacaaagtgatatttgttgccactcaccctttcgaaatggcaaaagaaaaaaaagaagttaattacctccattcaagcaggctctctcggtctatctctacatatgctgaagcatgtttgtttagagaaaaaaaggggttaattatctccttttaagcatgcactctcggtttctctctaaatatgttgaagcatgtttttgtttcttaccgcagctggggttgttagtgtcactcacctgatagtaacttggccacccctcactttgtcgctaggaggaggaggaggcaattaattctggttgcgcaagcgacaccggcgcagacgtgccatcgtttcagcgacccaggagcggatggtccagggggggttagtgtggtacagtgccacgcatgccgttatccggagagaagaggaaagtgaattcttttattttcagaactttttttaactcttaatacttactacttgtctgctttgagttttttgtttaaaaaatttaatcattcgtcttattaaaaaaataaaattattatttattttatttatgacttactttattatttaagtattacttatcctttttatatttgtacacatttttcaaataaaacgaatgatcaaacgttgtaaggaaaaaatcaaaacgataactactataagacggaggtagtattttctagatttgtatctttttactaaaacaacgcgatcacatcggtttaaatggcgtgacaacgttattgacatcactctacaagccacgtcattttagctggtgtggcagaataaaatcgccacgtcctttgcgagtggcgtgatagtattattttgccacgtcaaatgttcagattttggaaatttttattttagatatttgttttcaaaatgaaaggtttcaaaaaaataataaaagaaacgaaaaatggagggagggttcagtggaccggagggaggagaggggcagaagaggcaggcgagattctcggagacagaccggtgagggggacaattcagagttacgggctttgaggacggggaggcgggggccccgcccccaccggcgtgtgcagcgccggtgattggcgtggcgtggcgtggcgtggcgcggtgtggtcaccgcgaaaatgacagcggcgacgagggggggggaggaggtggtggtggtggtgg

SEQ ID NO: 4870 - DNA, 40602 bp, Oryza sativa
ggcatggcatattcacaagtaggatgttcatcattgcatgcaattttatttgtaaacaaaacaatttcgcaattcgatcaacatgttcaaggaatagtgatgacttgccttgctcaggataatccttattattgatataatcttgatcaaccttcacctcctggaagttgcagacgttgcctcacgactaaccgatacacaaggtctataatacgcgagaaaaaccaatattcaaacaacaatcaaatatgcacaaacaaaatatatttgctgaggtcgaacctagggttgctcatattattcgcgcttgctaatggactctaatcaagctaagagctaaggtttcttagtctttctgttgtcatggtggttcagtctagctaatggctaaggaaggattatggttacacatgcatctatctaaatagaacggttatacactagaggttctgttgccggatggattttggatcggtcaaataattactgtgaatcatttgtattattattttattaatggaggctttattttaattatgtacatatttcacttgtcaaaataaattataaaaggttaacaattacccatgctttgtatgttggaattgtttaggttaatcatattatggttacggattatcccatcacctaattttacaatgaataatccaagtttacagttgatctgtaattatacgaggacaggatgtataactagtatttatctaatattcatgtttgtcatatactccctctaaattaatatatgcaacaagcaaattaatacgataccatatatctataacgggatgtacaatatatgcgtgcataatatcttaatatattgaatcatttatttgaatagtttctatttactgcttggttaactaagggttgctcaccttgcctactatatgctattttatgggatatgtcgttgattaatttcatataggtgatttaatcacactagctctgttattatttgccataaacaagcttatgaccgatctatgtgtatctatattttacttacctaacaattataaggctaactctatttaaataactaataagtcgtgggttttaattatatttggacatagattagtaaatggcactaatattttcctgtacacccattaatttgaaggattgattataactaatttatttagttgctacagtgacaagacatgttaaagataattatgccactgtacaatatccattttcgatttatacatcctaaactattttgcgggtataaatattttgttagcataagtttttaatttaatctacccgagcattatatccatataatagggtagaaattttctatcgcgagctaagtatcggacgaaatcctggaaatattgtacgaattaatttagtctatgactaaatgattaaatataatacaagggaaaaatccgaatttctaccgtgaattgattatttatagggattacccaaaaataatctataataatctataataattcatcttatttgtttagtaattaactacatctaaattattaccgcgaattgatttcttatagaaattgccaagaataatccataatttatattaaattttgcaattctacgactataattaatccataattaaattctaattattttaaatcttctaaacttccctaatcttcctctaatttctatttatttttttttccttctttttctctcctcttttctttcttttcttttctttttctctctttttctctcttttctctcctttctttttcctttctttctctcctctctctctttttccctttcttctctttctttcctccctcccggcttcttcctcccttcctctctctctctcggctcaggctacccggggcggcgacagcggcggaacgagggaaggggcggcggcttaccgacgacggcggcggcgacggcggcgcaaggcgaggcgacgctcggcacggcacacagcgcggtgtggcggcaccgagggcggcagcgcggcggcacgagggcggcagcgcagtggcacgagagcggcggtgcggtggagagggaagaggggaggaggagggaaatggagtgggggaaagtggagagggggtggggtatttatagggaagagggggagaaggagaggggaaagggcggcggcttaatggcgacgcgacagcggcgcacggggctcgggacgacggcgacgcgcgggcggcgacgcgatggccgcgcgggacggcgcgcggcagcacggggctcggggcttcgaaggcgcggcagcgcgaggggcgacggctcgcggcgcacggcgatggcgacgcgacggcgacggcgtgcggcgcggcacgatggcgacggcgatggcggctcggggctcaaggtgatggaatggcgatggcgcgacgagacggcgacagcgcggcagcggcggcacggggcgcaaggtgacgcgacgggcggcagtggcgacgcgacagcgggcggcgcggcgcggggtgcgatgacgcgacaacaacggtgatggcgacgcggcagcgacggcgatggcgcggcgtggcacggggctcggcgcgcggcgatggcgacagggcgacgcagggctcgagatgacggcgacatgacggacgcaacgcgcggcgtggggcgcatggcagcggcggcgcgcggcgcgaggcagagacggcgacggcaggcggcagagagagggggaaagaggagggctgggttaggggaccacgtcgagcacctagagtgcaatgaacagtgccattttctatttaacccgattttagtttatttcccatataaatttaattctataatttctaaatcttgcataaatgaagtttactcaatatttgtgttattctaaccaatggattcaccctagattaatattactcatattttatttttatataatttatttgagttttaattagggttaattcttattccatcgtacttaaatttaattgatccaaatatggtcgcgataatattttatttatttctatccacacctaatctttattttaatttgtatttactcctaagcatttgggtgaccatattaagtgttcaaatgtgaatttgcccaaaatttaatattgtccaatatttaaggtttattaaagattctataattttctaatgagaccgttattaacacaatagcacattagctcaatttatttatatgttagtttattttatatggagaggtttaatatatcaaatttcaatccctaaatgcaattagtaacttggtgcaatatcgatctacatatcgaattaaatactcccgtaattctattatatatacagagagctcagtttatttgaatgatcatcatttcatgtgtacacctattatggcacccacctacattatttaaatattttaatatttgataaaataggttaataataactttttcttttatttgattttaatatcttgtgcataattatttgtaggattaaatatattcccgtaaatcatatctattgcttaaatgtagttcttttctttattttcttggtgatcatttacggtttggcaagcaatagcaatcataacaaccagcatgatgcaaaagtttaaaaagttcgaaattttcgtgattttcattgtcttgaattttcaggatgttacagtcttcctcagatgattcataatcagagtcagtctcattgcaatcatcatcaccagaactttcaccttccctttcttcagtcccaccttggttctgaggattagtaggaggagggggctggtttggacccatatcaatgtacaaaccttcatcatcaacacccacatgctcatacattggatttgggttacaaaggtattcagtttcatcacaatagggttcagtagattggtgttcagcaaattgattgagtgtgccacttgttgcttcaactaagcttggacatgcaatagaaggggtgaatgggggttgagcagggttcacagtgctttgcttagaacaatcccaatcgggaatcacagaaggctcactacttgggctatgatacgcaacagtcaacaaacatgttcttatagccctatgttttgcaaacatttcaaccaaatcttggtcattgcaaactaggatgtgagatttagtctcagtgcagaaaaagaacaaactgactttgtcaccgtatttatgaggatacttctcgaccaaatcagcaagcaggtccctgaattgagtgcggtctgcatccaccacttggttcaacgaaaaccaccgcgcacgacaatttcgagcaacaatccggatttctaagttgaagctactgtctgggtccatcctacagatgaacaagtagcacgcaatcattaaaccctaacacggatcggaagcgcttggcactaagcatcaatgcatcatgggaggcaattggggcgaaatcagcgaaatcaaaggggaaagcaaagggggaagtaaagagggaagcaaagaactcactcgtctaggaaccaatccgagcggtcgtcggcgccgttccacaccatggctgctcctcccccttcctctggacgcattgtcttcccccttcctctcgatgcacggtcaaatccacgctcccatgcttctccaagcccccggatctgccgccgctagggtttccccgccacggagagaggggaattgagtgggaggaagagagagagagagcggacttcaccgcatcggtcaacggtaacccttatgccagcgactgaaagggcaagatggacaattttcctacccgggcccatatgtcggagctgtcaaacggctcaaccctaacagaatagcgacggaagggtgtgtagggcgcgataaagttcgacgatggcattctgggaggctcaaactttttagtggcacagatgcaggggccatcttttttaatggcacacaggtaaaaacctctgtttgaatgggcctaactctcaagaaagaaataaaaagaaataaaaacgcccgtagtggggaggggaaagcaaacaagccctagttccgccgatggagaggagcgccggcgaggaggttggccgtggcgtcgcttgcgattagggtggaggcgccggacagcaggagggtggaggcgccggacagcaggagggtggcgttccgatgggtacaatctgttgtctccgatgccggccaggagggcggcgttccgatgggtgggaggaggggcggtggtgaactggtgacgccggcgtcggccagaagggtggcgttccaacagaagatatcctagctgttccaggaagctcgcgagcactgcttctctcgcttctctctgatttcgagaagtatatgtcactcatctctacttctagttatctctatcgacatctgtacatcttctagttaccgaaatctgcacagattcaacaattttactctagacaatatatagagtaagaatggggaaatggtgtacctatctctatctgcactggttcatctcattaactaggatatatagaataagaatggggcgatgatgtttttacccaacttaatttggtgctcaatcatgattatgtcctcctttttcttactttgtgattttgtccctgtttttttttttttgcgaactgaagctaccttttgcccctagttcagacttatgataattacaaagtatatgcaatggttatttcagcgaaagacaatctttactaccatctctggtgccactgggcgacgttccgatgggtatgaggaggggcagtggtggcgctggcgctgaccaggagggcggcgttccgatgggtgggagtaggggcagtggcgatgccggcactaacaaggagcacggcgttccgatgggtgggaggaggggcagtggtggtgccggcgctgaccaggagggcggcattccgatgggtgggaggagtggcggtagtggtgccggcttcggcttggattgggtgtgggactggcgtaatcccaacaggtagaaaattcttccatcaacactgaaatgattattgttggtaccagtgaccaagcctgaaatgatatgattgattgcgcaggtctgtgccgccaccaccaacagaagatatcccagctgtcccaggaagctcaggagtactacctctctctaatctccagaggtatatatgtcactcatttctacttctagttatctctatcgacatatgtacatcttctagttaccactatctacgcagattcatctaatcaacaattttactctaacaatatatagagtaagaatggggcgatgttgtacctatctctatttgcacaggttcatctaatgaactaggttatatagaataagaatggggcgatgatgtttttacccaacataatttggtgctcaatcatgattatgtcctcctttttcttactttgtgattttgtccctgttttttttcaaatcgaagctaccttttgcccctagttcagacttatgttaattacgaagtactatatgaaatgtttattatcggtaccaacgacctgacctgaaatgattgattgcagcaaaagacaatatttagtatcatctctgatgctgctatcatctctgcctctctctgatctccagaggtatatatgtcactcatctctacttctagttatctctatcaacatctgtacatcttctagttaccactatctgcacagattcatctaataaactatcgtcctaacactatcgtagggtaagaacactaacaccctaacaagaataggagtccaatttcttttttttctttttgtaatttacactccctcgttgtatggtgtttagacaacaaatacatgcaatgcgcaccaagttatcaagttttaaaaataaggaaaaggattagttaattaattatgtgtatagttatttttcttttgtgcacacctatagtttcattggtgtgtatacttatagctttgcatttggttagtctaacattttaaaattctgttcaaattaggcattctgagaaattatctgatacacatggatcagataaggaagatgaagtggtggattcttcagacgatgattgtgatccatattttaactatttggttgatagctttatgactgcaactaaagctcaaccaaaacagttgtatggcaatattgatcttgttgcagctgcacaacgtcagtctaatgagtatgcaagtagtgctttggattactataacaaggatgaaaacaataaggtaaaattttgttccccttgattgatttgagatgatggttcgcgtacgtggatgcttaaattaaatctctgtctaattaaaattatatgtttacactatattaatacttggtccttagattatacactaatgtgatattgtaaccttatagtgattttaaatggtggtgtcacatatacggatgcttaattagatgagtggttttaaacttctagctaactaagatgctatattgcactatatcatcctcggacctcaatatatactctaggttataatagcattgtattgatactaggttgttgatgtgtgagagagaaaaagagattttctcgataaaaaaggttttaagaggagattttgatatatttgtttaatatatatgtcatgtagctaaaatcatcctatttatatgcaaaattataccagtttgcccaccttaggagaccatatcctaaagttagatgtctggtttcaaattttgtggtgctagatggacttccactttaggtgggtatattgactgtttccctttttaacatttgtactaaaatgtcttgctcgtttcacaagtatttgattcattttttgttatttgcaatgtgttagattcaatacagcttaatcaaagccttaaaaagcagtacaattagagagaagggtgagaaatatggacatgtcaacttcatagcatctttagattcaaaggaagagctatttttcgccgaagtttgttgggatcccaagaactatgatatggtgccgacctgcattgtatctcttgaggagaaaaggagaattggttagtatggaatcactggttaaagttctttgaaccatgtaattattatgttcctaatcctaattctgttaataacagggggacgctcctttattaatgacgagtatgtggtgtgtctggatctccaaaatccgcctatagatggcaagcactgctatggatgtagcgaagagattaagcacccagaagatggatctacgtttaaggccgggcatgtagccgccaccggtttttatgattctttcatgtagctgccatcagttactattctttcttccgagtttgtataaaagctcaactaatctacccttaacagctgtttttactgttctatttattttgcatcttgtctacactagcagacttattttgtggctatgaatggatgaatatgctgcgttatgtatacagagttgaggtgaaagctttgaatggattacgatattataaatcatacaatatcatattactaaaaaaagatccatcccgttcattatgaaagaaacaaaaattttccatgggacatggactatggtgaaaatctgacaaaaaatcacgtgataatgttgggtttagttcacactaaaattgaaaatttgattgaaattggaacgatgtgatggaaaagttgaaagtttatgtgtgtagaaaagttttgatgggatgaaaaagttagaaatttaaagaaaaactttggaactaaacacggccatcatcatggtttcatgcgtttgatttctggaagtctgaactcattaagaacgcggttatttatattaggataaagcaccagagatttgttagccctgtcgctcgagttcatccgcgtatgcttagccgcgtgctgtcgcgtgtcgccatcgctgcgccatcggagaaggaaacaaacactgattaaattaaattaaacactgagaaaattcctccccaacttcttctcgcaaaccacctcttttatatacctcccaattcacaactctgaacatcacaaattcatttcacaagttcagagctccctgaacctgaaatctgttcgaaacagaggccctctcaaaattctcaatctgccaccgcatcaacgaggtggggcccagcctccgtgacgtcacgacactgacttggtgggcccacctatcaggcctgtccacgttgaccacatcgcgtcacaccgtccacgacttttttttttcccctgattccctcgcagccagggcaccactccttctagaggaaaaggatcgattttttttcttccccaatttcttcctggtgctcacctcctcctcccccgggatcttccagaagcttccagaactgaccttggtaaagaatctttctctctctggctttcttggtggaggcttggtttctctgttggtttctcctggtgtgattggaggttggcgtttgcaggtgcgggcgagatccaaggaggagggtttcctgccatggtgaaggataccgcgtactacgacaccctgggggtcagcgtggacgcctcccccgccgagatcaagaaggcctattacctcaaggtgaattcctttttgcgcctttgatttcttcatctttttttttcttgattgattgatttcgtgtgtcgtcatcaatgtagaattgcagatagctattggcctattgagctaatcttcgtgtgccaaattgatttttttttaatctctcttccaggcgaagcaggtgcatccggacaagaatcctgggaaccccgatgcggcgcagaaatttcaggtagttttttttttctttttctcccgtgccttctgttgatatctgtgattctgtgctagtaatttgatttgttggatttgattgtggaatgaaaagtaagactacgtgttcacaaaaacatgttttttctttatgaattggaatagtttactgcaagtgtcaaagctatgctatagctagaagaatgtgaataggctggagtttgcttgatttttaccaagtgatatcagatttttgcaatgcagcgcctgtgttacttgttaagaggcatagttttatcgtcggagatgccatgattttcagtatgagcatcttctgggtgttaagaggcagagttttatcgacagagatgccagtatgttttttgagcggaatgtttggttgtttggtgtatatacattgaagctattgtgttgattgtctattcggcatcaaatgcctgcttaaattatttccctctatgaattattgaattaaatagcttgatgttaacaggaactcggagaggcataccaagttttaagcgatccttcaaaaagggaggcttatgataagcatggaaaggaggggcttcctcagtaagtcacgaattttttttatgtctggtaaacaatgggtgttcttctcaaaagataaaagggtggcaactaaaaaactgtttaatctttaatctgaacaagtgtgctgagaatatagagcgggccaatttggtaaattaattgcacagtgcaacaagaaaattggagtgtattcaaatgacctgtcaatttctatgggttgatacttggtagatcactatttccttagctataaaagcacatctgtttaaaggaaaaggagacttctctaggcacgttatgaaattcaaacagtcagttatggaacacaatattttcagttaagatgatatttatagttcaatagaaactaaagaaattatgcgttgtgctgtaccctttaagttggcgtcttacacattttacacggcatttcagggataacatggtggatcctgctgctgtctttgggatgctttttggaagtgactattttgaagattatgttggacagcttgcactggcatccatagcatcagtggaagtcgaggaaaacttaaacagtcaagaagcaagagggaaggttcaagagaaaattaaagtatgttactctcgaagttccctactgttttgcttaaatagtttcattaaagttagcattccacttaggctctaggatgctgagacacaaattaaaactaaagcttcctgtgtgacaggagttacaaaaagaaagagaacagaagcttattcagagcctaaaagatcgacttcaaccatttgtggatgagagaaaggatgaatttgttaactgggcaaatggggaagctcagcggttatcccatgcaggtacatcatgtgattgtgtactactttgtttttatttgagagggctatatgctttctgcagtcacttttactttgtttgataaatcagttgctttcaccagcagattggcaaattggatatgattacatccacatagacatagattttgtggggtcttaattttaaaacaaattgtatagaactcatcgttgcacgttccctaattcactttattcatacgagtattttaccattggcttatcaaatgaatatttttcagcttttggcgaggctatgctcaccactattggctatatttatgtgcgacaagcagcgagagaacttggaaagagtaagttgtatatgggtgtaccattcatagctgagtgggtcagagacaagggccactgcattaaatcacaggttaatgccgcctcaggtacaccccgagacactgttttgtttctggtgcaatatacgattcaagtactccttgataattagctcctgttgcaggcgctatcgctctgatgcagctacaagaagggatgaaaaagatggaggaaagtgacaataaggaggaccagattatgaagagtttcgaggagaaaaaagatgccatgcttagttacctatggaaaattaatgtggttgatattgagtcaacacttacacatgtttgccaagcagtaagtttttgcgtatccttgttagtggaagaaggcttgcatagtaacaattatgcactgtgcacgtcaaagaagaaagaactaaaaacatatgagttacttttgtgtaatcttctaccttacaggttttgaaagacgccagtgtcccaaaagatgttctgaagttacgagcaagagcattgaaaaagcttgggacgatattccaggtaagcttatgttaacgccttctgcctgtttcaaccaagtactcatggaaaaaccacatcagatctgcaaatgtcctttgtcttatactcttatgcatggccatggatggacgattggccaatatgcttactctctatgtaaccgtgcatcaaaccaaacagccaaaaacgaaccattgttgattcactgtttcaatattattgatcatcagttgaagttttgcgcatgaaccatcatagatgatcagttatgcataaaagacctctaatcaactagttccaatatataagttatgcatatgtgagtcttacctcatatatatcgtactaaaacaatagaagcagtggattaatccagatttcatacttgtagtgtctttcctgttgcagtatctttgcgtgcagctcatgtgttcttgttttgtagcatcttatctcgagtgagtttgatagcagtgcataggtgacagagcacacgatgattatattcacatgggttgtttttcaatgtaaaaatcagggtgcgaagtctctgtaccatcgtgaaaacagcctacaggtggaaaccagcccacggcagggagcagcaacatcgaactgaagactgcaaaagtacaaaaaggaaaaaaaaaagtacacctgacagacgcaatttctggttttttggaggtgtcgtctctcgtgtccgtttattcatttttgtaagattttagacgacgcgtatcgttctggataaaatttgctgtttgatttggtctccgttttctttgtaaaaatggtgatgctgtcgtgagctctgaacacgaagattttgttggtgctctgcaacctgcatattactagcttgggctatctcgttgtaagatttgcacccttttgttttgtctttcaagctggatgatctcgtgtgtgatgatgccgccatggcacctggcagtgtcatccatctggccacgagaccacgtgtggcatcgtgaataagctaaacaccatatttaaatttttatatacatgtttctagtgatctaaaaacaaaagctgaaaaataaattttgaagaaaacactaaaatcaacttcaagttcaaggctgaaaatttaaattttacttagctgataaatataagtataagtaaaaagacggggcctcacgacggagcatgagctgacctcacggtgccaagctcatgctctcgcggtgccaagttgtcgcgcactttagtgcttgccagtaagctaaacctcacctccgtacccaaagtatatatccaccaccattttcttgtggctcctgatcacaaagacaaaccataataaccatatataatcacaaaacacaaatagtgtagtcgtattaattagacagcacatgagcggagcccctcccctggctggctttgatcatactaaatattaatcagctgcctttccgctcacttggctggcttaattgctcacatgttgcccgcaaaagtaggcccgatcggcgcggcttaactccaccgctcgctcgctcgctcgcgttcgcagtcgcacgcacgctcgcctcgcctcctctcgcgttgtgtttgtgtgtcgcgcgcgacgctcgctcggttcgtttcgcctcgacacgcgatttgatgcgcgcgcggtaggattcgccggcttttcatccgcgtgcacaccgttcacgttggtttttttctcgcgcggagatcgactgcactcaacgcagcaacactgtggcgggcgcccggggggggggggggtggcgtgatttccgtgtactttgatcccttcgtttcaaaactggagtatgatgaaactagacatgtcttacgtgctgattcttaatccaaggatgagtccaatcttattctggagtattttagaatggttacgtactggtacctctttattcaacgtttggccatccatcttatttaaaatagattagtaaaaaaattagtacatataaatcattattcatattttatcatctaataacaataaaaataataatcatatttttttaaataagacggacgatcaaaagttggacataaaaaataaaaaagtgtcgtctttctaatacggagggactagttttgtcaccatcatcgtcttcgatactgtgtcctggtatgtacgcgttggcccgtctgccgaaagagacctatattttgcaaagaggattccacgagaagccaatgccgcaatggagcccttcatcataaatgaggccatgaacggtcacggacgcatggatgtaattaattaattaattaattaattaattaattaattttagttgcacgctaccataattgggtcctgtttggttccatgggctaatgtttagccctcaccttttagcctcaaattagcccttaagaatccaaacatgtggactaattttgagctaatatgaattagcctctctcaaaacattagcccctccaaggggtgctaatggggctaattttgtatggggaccatcaacaagtagctctctctcctctctttctactctctctctaccttttagccttgaattagcccatggatccaaacataccactctaggctaatgtttagcctactaattcatgactaaacattagctctcaaaattagccctgggctaatctttcaaacagggccctggtagtttcacaaggaaacgctaaattgcaagattagcctagctagcattagcatggcattgcattggcaatttggcatggacagttttaatcttcctttctttagctgggccacacgtagtactactatttttcaagatggtataagcaaatatatatatgctatgctagcttcctctctccgttttcgtgaaacacaaatcaagggaaaaaaggctaaaagcgtgacagcaacctgtgctgcgagctaaggttttgatgatgtagtaattgattagttcatcacacggcggaggaggacaaaaaatcaacaaaaaagtacatgtgctttctcagtgacgtgcagaaattagtagcacaaagcatgatggaggagacgactatttttctctcaaaaaaaataatattattattatagtgcacaatgttctcgtgtgtatagtagtaatgtctcttattctaaccaaccagaaaaacagtatacattttctcaaaaaaaaaaagaaaaaagaaacagtgtgagtagagtccgggctagagaaaattaacatgtagtagtagtaataataataataacaatcctaatcttccaatggttctttatcctgtacgtgtagaatatactgtagtgtggtaaaaaaaaggagtggtaaaaattaattgatcagaagtattccaagttgaagtcgaattgagccaagctctgctcatggcatggtagcgagaacttgtgctccagcgtggcgtcgtcttccacctgatactcgccgccatagccactgtgctgctgctccatgtcggcgaagggctctgccttggcggcggcgtcggcgccggccgaggcggcccagttgagcacctcgctgtcgagcacattgctcacctcggcgcaggtccagttgctgctgttgctggagctctcgccgtagcccaggttctccgacacgtcgagcacgctgctgtagtcggcgacgaacccggcgccgtcgtcggggtgggagccgtacagcgccgccgccatgttcgccgcgccgaggtcgaagccggcgccgaagtcggtcaccgggaacgggtcgaacaccgactgcttggcgttcgcggcgaggccgtcggcggcggcggcggcggcggcggcgccgtggggcttgtgatcctcatccacctgggtgaccgccgactccgaggacgtcgccgccgcggcggcggcggcgatgggcttgtgcgtggccgggtcgaggccgcgttgccggagcttcttcttgaggcagctgttccagaagttcttgatctcgttgtccgtcctccccggcaagtgcgacgcgatctgcgaccacctgcaccacaccattattccccctcaaatcctttatccctccgaccaacctccatggctgccgccattgcaagaaagcaagcaagctccgaaacggcaatgcagaatccaagacatgaaaccgacctgttcccgaggatctcgtgcagcgcgacgatgaggtcctcctcctgctgcgagaagctcccgcgcttcaggtctggcctgaggtagttgatccaccgcagcctgcagctcttgccgcatcgctgcaaccctgcacgacccaaaaaaccaaaattagcccaatcaagctcgccaaatcggcaatggcgatcgatcgatcgatcgaacagttggtgtctcatttgaattgcgtgcgttcttgcttgcctgcgagcttggggacggagctccagcagccgacgccatgtcggatgatgtgattgtacagcttatcgtcttcctcgggagaccaaagccccttcctcagcttcgcctgcacgccgccgcacgacgacagccgtcccattcctccccctccctgcctctacctctagatcgatgtccacaacctacgtagctaccaccaccaccacctcgccgccgccgacgacgacaacgaacactagccgctcgccacgacgtcgatcgatggtcgatcagcctctataacccttctcctcactggctatatcgatcaaccgttgcccggtggtggtcgggtatatatggggaagcttgccaagaactcctgcaacttcagttagagagagacacagagacagcgagctagagagagagaataggtgtttgtgtggtgtggtgaggtgaggcagcgatcaagtggtttctaagcaagctgccactcccctctcgagctcgctggattagagctcaagatacctccatctcgctggataaaaatactgctagttcgcgccaaagagcctcacttaatttctctctctaattacagtgttagttagagatcagagagagagacagagagatttagtttccattttctttttctttttttttttgcctaagattgatttctgctttggacagcaatataatatactaatccagctagtacagttaagagagagactaaacactggttaatggcaagtgtaactgtaagccatcaatgagctcgatcggggacctgtgcagagaatcgcgatgtggtacggagaaaaatcgcgtcagatcatcgcgttttacttgtccaacttgatcaccccctgaaaacgcccgtcgtgacatgatcgaactgactgggaatcactgtgtttactactactgatgacagtaatcagctcacggccactcgctgatcttgagagagataattaatttaattaattgattaatcaaattaaagtcactaatctcactgatcgtttgatggatgtggcggagcgcaggtgctgtattagttgatggaagaaaagcggacacacggtaacgatcggattacagtggcgaagaatgaaaaatggagggaaaattggaattttagacgattttgctttttatgtttctctagcatttcattttttgtttaaatcagtgttctaattatgttttttttcctagcatgatccctttgatttaggcgttgggttacgtgagcatgacaactctataacaagctttgtgatcatgttcatctttttggtacggtcttaagtaatcaaggcggatgccctcttatatatacgtacctttatatctccagcttgccacaaatagttttttttagaaacaaaatagttatatattttaaaaaatatataaatacggagtatactggcatctgataaaaataaatctaaactctatctacaaagtaagaggcagagaaggcaaataccgtagtaaatagttcatgtaacaatctgtagattttttttatctgaatgtgtaggcttaatttaaacttcagaatttttttaggaaatttaagccttgaatcttagtagatagaacatatacttcctccgtttcacaatgtaagtcattctaacatttcccacattcatattgatgctaatggatctagataaatatatatgtctagattcattagcatcaatatgaatgtggaaaatgctataatgacttacattgtgaaacggagggagtatatgatactggcatcatcgcttttcatactattttattttttaaaggagggcaaaaacctttttttttgtgacttttacatagggtaaacttttttatatcttatttacttaaaaacatatcgggagtaatcgtattctctaatgttaaacttgatacccgagatatcaaatctatgaccgtaaaatttctcttatacatatggtttaagaaaacgaggaaaatatcctcttaacacgtgaaaacactctccccatctctacttaaaacagaaatatcaaatatggtacaaccacaaaagtagcccgacctatgtagtgtatcaccgatcacctcaagcaacataagtttacacatccctgttgaaattttcttttaacataaaatttagtaccgttgatttccgtggccgtgccttgccctgccgaccttggtgtgcccatcgggctgtctcgtccgcgcgtcaatacaaatacgccacatttttccatcctcggacgcggtcaagtagcaattaaccccgctgatcgctgtctcgccgcgtcaccccccctcctttcccgccgacaggtggagccaccctgccatgccaagccatattttataacgtttgcgttaaatatgtgtaaaatgtattataaattaaaacttaaagatgataatagatatagtgtgtctggtatttacgatccttaatccagccagctgatcgagtatcgtaaatacacagacgcactataattacgctaaatcaaaagtaagcttttcgtaatcggtatctcaggatgtagatctcggctaaacctgcctaacctataacgtgtctcttatggtgttctttcgtgtttagttaccgtcggttttataacaactttcgagaaggacgagcgctcacttgctcgtgtgcgcgcacgcgcgcttagattagatagtacgtcgcgcgcctggacactgctccaggctgcgtaggcgatcgttttctgtttgcgtcgtggaggcacgcggcgacgacggcgacggatttaacgtcttgcctgctcacaccacagctgatcaaatctccagtagtaatcagcagtggaaatgatcgatatgacgcgcgatttgggagatcgaccagaaaccaatgggcgatcgagctgtgtctgaattctgatcagctgttcattctctgagcattacccttgctgtcttttataatctgtcgtaccgacagagaaaaaatatccctggcttattgccgtgttcagagaaggaattaattcaaacacatgtcgatggaattgtatgtaaattcaggctttggcgcacgtcctcgcgattgtccaggagtatgttccaaaatatattacttttaatcttaggtagattgaagtattaaaaaagttgatagaaataattggaaaaatactatcattgattgagaaaaagaaatgggtgagttaattaaatggagaatggttgttgagaggaagggatagatagaatagtttcagtcggggacaagctaaatgtgttagaaatagttatattttagaacgtaaaaagtactactgtaacaaatgatgagaaagtaaaatgaagaaaaagatgtgatgagaaagcaacgtgcgtacctgctgtcctgctgtaaattgcaatcatttttgggggatcagaaaaaggaaaacatcgatcgtcgacagcagcgtgtccacagatacggcgttcagttttttcaacccccttttgatttttcaaaggcccagttgttcgttttgttcttgttcgtcggtagcttatgtggcacagcaccaaattctgaccttaccacgatgatgccgtgtaaatcgtgttactcttgttccctttttttttaacaaaaaggtaaaccgtgttaaaaaaaacaaataaggggggtgtttagatcgaggggtgtaaagttttggcgtgtcacatcagatattatatagggtgttgcattgggtgttcgggcattaataaaaaaactaattatagaatccgtcagtaaaccacgagatgaatttattaagactaattaatttatcattagcgaatgtttactatagcaccacattgtcaaatcgtgaagcaattaggcttaaaagattcgtctcacaaattagtctcaattaatctatgcaattagttattttttagccatatttaatacttcatgcagatgttcaaccgttcgatgtgacatggtgtacaatttttgggtgggatccaaacaccctctaatattactcgatcgtagtatagtatatatagcatcgtttgatttttgtcgtgtaacctgctgtcacaaggttgtctgcagacgaaatcaagaaacaaaagcgatagaagcctgagagttactgaagaaaaagggtgagaattacacaatgtttactttggattcagagcaaaagggatgggaggacagaaggacagcaaattgggcagagagggaccagagatagtagcagggaagaataaagaacaaaggcaccatgatccttgtacttgaagggaaaaggagattttgtatacagatgttgcacgaggctgtgatcatcatcagataactcgacaagaggagtagatggatagaacaaaagaaagcaaacagacaagaaggaaaaaaaaaaaggtacaaggagtcgcctgtacggcatggtatatgtgtctgtagcttcaaatgtgatcgattctccaatcatccagcttctgatcgacggcgccaccagaaagtgttctgcacaaatcaaagtccaaaacatcacgttttgatgaagcattttcaactaggaatctcgaaatgcaattcatttgtttctttctttatttttatttttatttttcattcaggggaaagagcagagtaacacgccattgctgctttgcaatgcccacatgttgatcgagatctgcaattatcagcagccgtaccacacgctgtctccccacaatttctctctctcagcaaccgtttcaacacagggtcaaccgcgcaataatcagaacctgtgttcatcttttgaatttcgagtaaattgatgcacgagttgcacggccctgataatgcatctaggtgtagctagagctatgatgacttgaattgcaatgttgcattgttacagttggatttctgttgttagctccgatccacggccggctggttggtgagatgaggaggacggacactgtcactctgtcagtctgttacagtgatcatcatcagatgtaccacttaccttctacctctactagagagtgtcgacaggaagtaggagtactaattaagaacacgttctaaagagttaattgagcttaagtacttatttttcattagcattcttttttaattgctaaattgtatgtttcgtacgaaatctttttatatagaaagtacatttaaaaatgcaaataagtctatttttaaaagaaagttaataattaatagtaattaatcatatgctaaacatgtttctcaattagcgtgtacctattcagtcaaaactatactccgaaaagaaagtgccctaattaagggtctgtttgtcacagctcaaactccaactccaccttttcagcactagtgcacaatcaaacaattttagctccacgttaaaaaaattagtgtagcgaaataaagtgctctcacaaaataagtacttgtttggtttgctactatgtcaaaatattgcaataccaaaccataggcaaattttggtactaccaaatattttgacaacttatgcgtcatcttattggcatattttgatagcaaatcaaacactagtcaaactactattcaaaatacatggtagggcacattttggcatcaaaccaaaatggctctaaactagtagaaggatgaagttggatttaggttactttataactctatttcagaactaacttaaattcacgaattaggatactcccaaattggccatatttgtacgtatgtacgtagcttgcgggataacggcaaatgatagcgtctactcgctagcactacaccgagagcgagtgagagatcgatcgagtaggtgatggatgacttgcaaatgctacaaccacaagccaaggttggaagagagaggaaaacggaagccgtgcggctagctagcgtgagttggggaaagctagctaaaccaatttctagcctggctcgcccgcgtactcgcgcccgcgcgcgcgcgttcggtggcgtgtcgccgtcgcgcccgcgcgcgcgctgcatgcggacgatgcgtccatccatccatccatgcaaccggcgcgcgcgcgcggcgacggcgctggcatcatgccgccatcggcgagggtcgccgtcgtcgcttcgatcgaggctggtccaagaatcgatcgatcgaacggcagaagagaatgcaggagtagctagctagctaagctgatgacaactgtagctgctgcatgagctacgcggatgtgagtgatcagctttgttcgttgcctctacttcccagcttgcctctcgtttttcgcgcgcacgtttttcaatctgctaaatattgtattttttataaaaagcttatatacgaaagttgcttaaaaaattatattgatatattttttaaaaaaaactaatactttctctgtttcataatgtaagtcattctagcattttttacatccatattgatattaatgaatctagatagatatatatgtctaaattcattagcatcaatatgaatgtgaaaaatgctaaaataacttatattgtgaaacgaaggaagtacttaattaattatgcgctaatggaccgcttcgttttcgtgtgcgggacatgggttccaacccaggctgccgagtccagtgtagctggatggtgaggcggcaggctacgtaggcgtacgcgcaccgccggttcggtggcctggccgcgcaagccgcggcgagccttgcgtttacgcgatcgtcgatcgtcgtgtacaatgtacctagatcgagctagccctgcgtatgttcgtgcgagcatgagactgacagtcatgtgatcgatcgatctcaatcctcaggggaaatgatcaggggttcgatcgattcgtgttaaatttcggactcgtcaggcgacgctgataggatcagttggtactattggtgactagctacctggtcctctctcttttttctaagaaaaaatgattttattgtttgagaagataattaatgagagagatcgcgatttgtggtgttaattatggtacatatatattgagcattctaacatcaccaagggaaaaacattaaaaaaattgtcggataaacactgtaacactaaggtaataagaatgtaatagaaatatattgagtttcagactcatcagacgctgataggattagtttggtcttattggtgactagctacttggtcctctcctctctttttttttttacaaaaaaaagtgattttatgattcttacatattgagagatataatttctggtgttaattatggtacaccttgagcattgaagcatctacagaaaaagcattgtaacactaataaaaaataatagaaaaatcggtactatccctcctgtcaataatatttgatgttaggatagggagtatctttcagtgcgactgtaaaaaatatattaaaaaaatatctcctgtatttttcgttttgtccttcttttaaggaaagtcgtttcggccctttgacagtgcagtttgctcaatctcagacactgcagcaagcaacaaaattcaggataatcgacaactcgcgatatgcatccatgagtgaagtgaacagaggcattaacaaacacctctcagctgcaagcattttgttgtcaaataaggacagagagccagttacccatcacacatacgtactatcagggacaaaattaagctcgtaggttgtagggttgtatcttgtcctgttcttttggcaaagtttcaagctacttcaccaaggtaggagcgatttcattttccaatcaaagcttcaaattcagagcggttacaaaaacaaaaacagtggccattttcaaaccaaccaaaaaggcacgaggagactgggactggtgctgcagaaaaggtatcgtaaactaatcatctcgtccgaattcataagttgtcggttactgatcgattggtgcttctactcattcacaaaatgcatcactcctcacacatgcatctcgagtgtgctcgacctaattttcagatgtagactgaacatgatttcagaattcagtgctctagcttagctccaatactcccaacagtaataccagtaggagttaagtagtactcacatgttgggtttttcaatcagttcataaacccatcaaattaagatgtcatggaaaaaaatttcagacgtacgtcagtcgttaatttctagtcccatcacaataccagtataatctgttgactaataaggctgtgtgtgtatatgtaccttttgttctctccatttctttaagaaaactccatgcagtttggtactggctaccacagtgtggtacattcagtattgcagacaacaagtggacgaagaacacgagaccagggtatattataagcttataattaccagtgtgactaatacaaggtcgtaggtcgtgtatatgcagagaattatattgcagattccataacacgtagagtggccaatcgattagcttctacaagtgcatgtccctattgatggacaaaaagatccagccaagaatcttacatgagacctgatcttgacttgcctcctctagaaaggaaagggaaagtgaaaagcagctaagagagaaagaaaagaaaagaaagcacaggaaagaagcatgcatcatgctggctcctctttgaagttatgcaaacccaaagctagctagctaaactaaacacaaaaggaaattttatataaaaaaaacattagcatgtagtagtgttaattattacatatcggattcagaatcatataaaactataaattggagtagccacatgttgattgtttagtcattgcgacgtcgccagaggagaggaggttggtgtgtgcagtgctatgccgttaccatcacaacagatagcgtgatgtgcacttgccttgcatgagtaacctgcatgattaagctgttcggtacaatggccggagagctagtagacagtggtgtttattgatttaattatattcaagccatgcatgcaaaccaaactgtgcactaattaagcaccccctcacctaatttaggctgctcttttttcttagtagggctaccactgtttcctctgtcatcaatcctttctcttgcttgtttatttacagcaaactgattagaaaattgattggactggttaaggtaggtaatcatagtagctagtgaattatctgatgtcacaagaaagtttgggaacaaaatgaacactgtagttaacattgtgcctagctagctttgcttgttttcttctgcttttaggcatgcatattgtgttttgggtgctgatcataaagctttctcttgccctgttagcaagatcagtttttttattcaacaaccattgagtaatctagaaagggaatcaattagtgtgtgatgagcttaccgactaataattcagttgattgattttccaacagctgaatacaggtgctgactgaagtttcacagaatcttcttattacccatcttgattcctgtactcaaaatgattttgtgaaactgaacattcagaatatttgtactattgtactgtactgaatttgacattgagcctctagttcattacaagtacagcttaggtgtaagatggtaccataatgtgaatcgcaagcaaccactattggaggatcctgcatatctttatctgctggttaagcaacgatatatattggttgaactgagctcaacatcagcagtataagaaatcaatcagcaaacgaagtttttattaaaaaaaagaataatagcaaaaaggttctgaacattgtggcttctgacaacctttgctactctgctccatcatcttcatgtgttgaagcttttttttcttgtttgttttaaaactactagaagctttacatttcttgcattgcatatatagggcatatatactcacttgtttccttcaaaaaaagtccatacactttgtgagttgtccctctctcttggtcactgatctttaatttctcaagtgatatttttgttggtgatcagaagatgccacctctaatccaagtttccatcatgcatgtcacaaagtaaaggcacaatggcaattaagccatcgcaaccaccttagataatcttatcaaataatcaatcctatctcgtccacacacatagccaagtaatattctagcactgtaaggtgcaaggaaatcttgcatgacatagttgcttcccatgaaatctttctctgacattgaccttaaacattttcttatcattcatggcaacctctgtgcatgcatgactactctgtcaaattaattccccttatcaaagccgttgctgtcctctgcttagtactcctactacaactgacaaccagcaaggtctgtactagatgactcagctacactgaattaagtgccaaaaacatcactgcgtagcagttgcatgttacatcagatacatgagtagggatgatagattgacgaactgatcaacacagcaaatcaagcccttgtttcaagcagccaagcatgcataccaaatgataatgatattatctccatggaagatgaaactgcaaccgcatatatatatatatatatatatatgcagattactatcatgcaaattggcatgcttgcagaataatctgcagcaagatatactagcaaattgtgcatggacagggatagatgttccctgcttgcaattgcaaagtcgctggcggcagcacacaagaaagctaaagagagaagaaaatgttcagagagaaaatattcggaataacgaccacgactgccaccaccaccatgcgtcgttttctctgcatgggatcgatggacgacgtcaatggcgggaagcttcttcccgcccttttgacatacgtggcaccggtccatgggccccacgtggcattttcgggaggtttgaccagcgaattcaagtgtcggcaccaacaacgagcgtcgtctgcattagctgcagagagcctgcaacctcgtgagtgaaaaggcagtgcaaaacgcatagaaattatgtgtgctgctttgctttgctttgctttgcttttgcatgcgatcgatcgtgctcgtcagctgtaacgctaatcgacaattgcacagtgacgcattgttcatggatataatcccatgtctgcatgtgaaaaatcccatgaatatatcacatgtaagattgttcataagggacaaggtgtcggattcggagcatgtacgcactaaacagcacgggaattaagatcgatcagttcgatgaatcaaactgtttctgccggaataatccagcggccggagaacagcaaagtgaatgggaagtttggacttattttttttaccgggggcttgtgcattgtgattgatctctatccgtcttaaattgggtggtgttcttggtgatcaagaatgcatgcatgcgttcctgtgctagctgctccgatcgatcgatcaatcaatcaaatctggatggacgtggtgaggaaaatgatgaacaccgtaccgaactgatcccaaccagtggtaaacggtagtaacgcagcggcattggttgcaaatcgtggtcggggccgtgcatccaattgacttaagggggcacgtaattgtatgattagctttgctgattcgtgacctctgaaaaagattactccttcctatacgtgaggtaatttcgacgcctgaatctgtgtaggatacattcacagagagagagagagatcgatcgatgagcaggataaattttgcggtgttgttcactgcagactgacttggtcccgtgtctacgcaccattgaaatatgggggctagatattcacaacatggagctcacgatgatcgcgctccgtgctagatggctctgggctcagcgggcctcccaatccttgtcctggtaggagccagtggcggatctaggatttatgtgatgggtattcggaattctaaaatagcagatatatcgataccgattgacgcattgactgtacgatacatcattttgatgcataatctttactacgaactatgcacatatataataaaatatatagaaacatttacaatttcctataatcagcatcaaacaattttctattgatctaagtatgagtgaagagtaccaaagaattcggaatttttggagattgtatagcataggtggacagctttatgtagcaaagatattctgatttattgctaatgaaggaaaacactcataaaaccacgaagaaactagtagctagcaaagaaatataacttatttccgtaggacaattgatatcaattagacaacaacatgtagagaaaaacaactgagtgggcaatatatagatgtatatacaatttgcaaagataactattccctctgtttcataatgtaagactttctagcattgtccacattcatatagatgttaacgaatctagacataaagtcttacattatgaaacggaggaagtgggcattaaagtaattgcttattaattgccacaaccaaaatgtaaacaagaaaatcaaattagcatgaatatattacaaaagaaagggagggactaggaagactattgatcttgttgggctgaggagagctagaaaagggtggaattgaattgttagggtataaatatcacaaatctagatagactatggtggtacatatatattatggtcaatatatattaggtttgtgtccaaaattcatgggtattcaactgaatacccatgaattacgtgggatccgcccctggtaggagcttcaaatcccatgttctaggcaatagcgcgagtttgttgccgcttccatgacttgtgttcttggtgatagcaaatatattctcttctaggaggagagatggctacagggttcgagtcttcgctcttgggcacccaaactctatagtcgcaacccgacgcgtgtccaccggaagctctcggtcgctgatgcgttggtcaacaaccaatggatccgtgaccttcgtggctccttgggcatccattcaatactgtaatacctgcagatttggtcgatattgcggtcaacaattctttccgagggccaacctgattcattcatctagaggtgggagtgggacagcttggggtcgtactccacccgctcggcctaccttgccctcttcttgagaagtatttcgttccagcacctacctatctggcgctctttcaccccacctcggttgctctatttcctgtggttggtcacttattggcgctattggacggttgaccgcttggagaagcgtggcctgccgcacccaacctgttttgtcttctgtgaccaaaaggatgaaacaatagatcacattctaattgggtgacccgagtccctacatttgtggtagaccgtcctcccaagtctcggcctccctcattgcttctcctctaacgttgtttccttccatgagtggcactgctcctgccgactcaaagttcagagggagcgtcgccgtaggtttgacatggtcatgacccttggcacgtgaggaaccactgcgtgtccaacaagtgttcccggccttggtccgatgtggttgtaggcatggagcaagagaccgccctttggcgtcttgcccatcccttgacgccaacgctctcttcttagcgtgccaggtcgtttggtcgttcaattgtaaacatgagaataggcttaagtccctttgtttgtttataatcaatgatttatctttgtgcatgtgtgtgacgaagactgcagtggagtagagaaaagatgcgtgcgtttgtatcgatcgctttcgtttttgggtcgccgtcgttttctcgccggtccggctagctcgacgtcgatgacttgaattgcaggagaagaggaggacaccggcgatgcatatgtcatgtctacctccctttcgatcggggggtctacacgtacgtacggggtggcggacgggcacctgtacagccgccacggcacagttgtgtgtgcccgactacctgccgcgacgtgcaccggtgctcgccggggaaggggggcagctaggccggccgcgcacgaggatttgacggcggcgcgtcgtgcgggaccggggggtggcccggcaaaatgtgttgggcctttctgatctgcgcagcgtgaacggcctatgggtatggggtcgtagtaactgaagagtccaggagaaaccgtggccatgggccggggctgtacaggtgaaggcgtgtagcaggagtgggaaaaggtgcacttgaggtccctcacttcgtcgtcaagtttcaaaatcgcccttgaaccaaaatagtactaaaaatcttaaacctccagcttgtaaaacaggaataaatttggtgctcctgctcctgcagtataggttgtcgtggtcatgggcagggtttacgatttcgacgaaatcgaaatttcgacgtttcgatgagactcgaaagtagaaaccgtctgagatttcaagaagtttcatccaaattcaaatttaaattgataaaaaagaaaaaaatcaaataaaatattataaatactatgatattcatagaatctattgggatataaatttttgaaaaaaatgatgtattatgtgtatttactgaaacttacattagaaaagaaaagaataaagaattaaaaaaggaaaacacttacatgggccaaaaccgaccgaaattaaaaaaggaaaacacttaatgattgaaattttgatgatttcaatcagaatttcaccaaaaccaaccggctttcgagaacttgtcggtaaacttatggaatttgtatttaaattttgatttatgaaatttgttcaaaaattaccggttttccaccggatttcgcgaaatcttgaattccgtcggtgcctgaaacggaaggggctgtcggaatcgtaaaccctggtcatggctcccatggcccctgcgcttggccagcacaagcgtggtgactgccggaagcaaaggcgtagccatcttccgtccccatgaggaagacggactggaggtgcacagttgcgagctccggggcatagttgacaacgccctgcagatccttcacctacacgatgcagcttcatcagctgcgggaagggctatgccgtcatcggtggtgtcgatggtgtggtgccaagccacagctggacgggtgcggttccctgcgtcggtgatggggcctgaagcaactatgttgctctgacggcggcggtacgtgaaagggaagatgattcgacgtggcgcgcatctcattttataactcattagacgatgattctagcctacttcacgcggtggccatcttttgccaccaccaccatcgatctcacggcagacgctcttgcgcgccgctcggtgcgaccgtccatgcggagaagaatgcagctagcaccgtcggtgtatcgatcggctgcatcttaacgtctgtgcagacgtatcaaccgatcgagattgggtaacgtacctcgcgcctaccgtgttgcagcaatcgctggccttcgatggctacggtcatggtctcgatcgacgacgggatctagggaaagataagagatgatggaaagtagagggccacttacatgtgggacccacttattttttttaattttcttttttctaactaggatgccatgtcagcaaaaccacctatccatatacctcatcagtcaaaactgggagcaaaattgccttgggaccgaatgtgacccgattttgtaagattagggatgcgttatatttggtatttcagcctaggaacgattttgaaattcaacgacaacatgaagggcccaagtgaacttttttccgcaggagtaaggctactaggccaacaaggcctagttttatgagagaacacacagagagtttggaaaaaagttcactttaggcccctcattgtcgtcaagttttaaaatcatccagaataccaaatataacgcattcctaatcttaaaaaatatcacattaggcagccacgtcaaaacagaaccataattaatatgggtcccacgctaactcacaaccacgtcagccaaaaacaggagtaatattgtcttggtacttaatgtgatctagttttataagattataccttgtatttcggtttagagacgattttaaatctcgacgataagataagggacctcaagcgaactttttctctagagggttacaggcttacatccagttttcaacgacgtggtgcacaatcaggtaaattttgaattttgatgatttggcactatattcgttgtcaaattgatttcattgacatttgtagagatgatacgcgggactatgagtcaataaaagtgagccatgaattaaataatcgaacccacttttatagagggttaaatgaccaaatctctctcgcaaatcaacagtattcaagttgcgtgccgcaggtaaaaaactgtggtgcttatgacgacagaaaagttttatgctgcacgcgcaatagcgtgatggaagaagacacgtcaaaattgtgcgttgcaatttggctgcgttctatgccccaggttggagagattttcagcgcacctaatacgaaataacttattaacatatgaataattaaatattactccctccatcctaaaatcaaaatataagtatttttattgttcagattcataactaaaaatacttatattttagctaaaaatatttatattttagcttgtaatagctaaaagttattacattttagaacggatgtagtaatatttataaattaaaaaatgtacttatttgattttttaaagaaaaattatatagaaaattttgtaaaagacatataatttaacagttcgaaaaagtgctaacaaacaaacgaggaagaactgaaagtaactctacgaaaaacatgagtaaattaaacagtacaaatgtggcacattgacagctggaataaacaacggagcacattgattcatcgccacacgtatctaaaaaaacttgtaaaacctccagtgcctcacctactctgcagtctgcactaatgatacccagccgcctgatagtgcgtcatcaggttttggcactggacggccatgaacgtctttagctatgacctcattcattcctcaatcaaacattttccgtccactctctttcacctaaaactgtacaagtcatgggtcctctttaaatgaatttttacaagttgcagcatttcttaaaatttctaactccatcgaacactatagcttctcacccaatttctaataatatacttacatcccaccgaaatcctttatatggatatttttatctatgtaattatatggatgaaatcctatatattctcagacggaggtattaatctagaaaatatgatattgatttttgataagttttattggtttttatataaacataagcatatttattcatattatttttaatccatatgattttaaataatatagatcgggactgacatgcttaaaccatcaactcccatcttaacaaaaaaaaaagaaagaggcatcactaaggcctggtttagttcccaacttttttcttaaaactttcaacttttccattacatcaaaactttcctacacacacaaacttcgaacttttccgtcacatcgtttcaatttcaaacaaacttctagttttagcgtgaactaggccctgtttagttcaaaagttttttttccaaacttccaactttccatcacatcaaacctttcatacacacataacttttctatcacatcgtaccaatttcaaccaaactttcaaacttcagtgtgaacaaaacacaaacacacccttgagaatgggctggcatctgggatgatagtactgtgcaggaggccaacacccagcagttgaggagtaggccatgaccatgaggaccacgagactgacagctacagtacccatcaacgtgacggaaactataaaaatttccgtttgatactgaattttgtagcaaaaaaacgcagatctggatccatacgaatactaatggcatcgtcgttttggctcgtctcctcccccgcgactataaaaacgggagctttgctgctgcgccggccgccccaccacctccggtccatctcggccgccgccgctgtcgctgtcgcgatcgcgatccccgcctagatagacttccccaagaacccgccgccgccgctgcaggggtggcgtggcatcgcgggagaccagctcgagccttcagcctcttttgcgccgccgccgccgccgccggtcgatccgtgttcttggctcaggcggcgtcaatggcggcggcgaatgggagcgcctgcggcggaggcggcgtggacaaggagaaggaggagttcaagcagatctacggggtgctcaaggaggagctgctcagggaccccgccttcgagttcaccgactcgtcgcggcagtggatcgatcgcgtaatgcttttctccccctctcctttttcatcttgtgttgctgaccgcatgtgtttctcctcccggatcgtttcttccggattttcagtagggtttagatcgggtaaatgattggtggaactgcaattaatttagtcgcagcacgtgtaggggttcgcttgtaaattctggatcctcagttattagcattgagtgattaggcctttttgggaggtttaatcttggttaaataactagtagtgttatgttggagtgaatcagcaagtgcagtaaaggttggctcaaaattcccttttgttaaatgagctgctccaattctgtctccatgtcaaaaggagaaaaaataataatgctcacatttggaaggcaaaaatgtgatattttgggttaagtgaattcttggggtgataaagcgtatgattattaaaccttggcctactgcttaaccatagatggatcatggatggtcggcttagtcgcctactgctttctccatttgctactttttttattatatataatgtaaagcttcacaatagattgggtgtacgacagatgatcttatcagttaaattgtcactgttgggaactgctcaatttaacttgtttattttctttgaagcagatgttggactacaatgtacctggaggtgagatggatttgacttgattagtctataacatatgagtaaaaagtaaaaacacactaaatctccaacctattgtctttgatatggtagggaagtgcaatcgtggtctctctgtggtcgatagctataagctgttgaagggcaccaatgttctaagtcaggaagacatgtttctcgcgagcactcttggttggtgcgttgaatgggtaatgctttaacctcaactttccgaataatgggtgcaaatcaactaaaattgctcctctaagctttactgttgtctatgtagcttcaagcttactttctcgtgcttgatgatatcatggatgattctcacactcgacgtggtcagccttgttggtttcgggtgcctcaggttggtgaatctgaaattgtcctatctgaatggtgcattgcctaattatttactgaaacaaaacactcattttactttatagtacctttctttcacttgttacatatgaaactttatccctagtgccgccatttgttgcacaataggttggctccattgctatcaatgatggaattatccttcgcaaccatatcacgcgaatgcttcggctccactttagaggaaaactttactatgctgatctccttgatttattcaatgaggtaattttacattctgatctacatacacggttagtctgaactttcagatcattgtggtcttactgctactatcttgttttgctttcctaggtcgagttcaagacagcttcaggtcaattgctagaccttatcactactcacgagggagaaaaagatctaaacaaatataacataggagtgtaagtcaacgttgtaacaactttggaaataactattttgcatgctttatttaatctattcttagaaccataagcctaatgtttctgtcatatatggaatggattggttttatctattatatcttcaataattttgattttgagattgttgattcaaaacttcctgtatttttgcagtcaccgccgcattgttcaatataagacatcctactattcattttatctgccggtaaaatttatattccattgccatatcttcgtttatgcaatccttgttttgttaataaatactaattgcgagtggtactgatatgctgttatatcaaaggttgcttgtgcactgttgctatctggagaggacttgaccaaatatggtgctgtagaagacattcttgttaagatgggaatatactttcaagtccaagtaactcctatttctgccacataacaacaggaggaatttgactgccacgagtattattctactttcaattaatacgaatattttcttacaggacgattatctagattgttatggtgaccccaaatttattggcaaggttagtgcatttacctgttgtagcagcatagatgaacatcaatatctatattgatatttgtttagctcttgtagtttgatcattttttatgtcatattatagatcgggactgacattgaagattacaaatgctcttggctagttgtgcaagcccttgagcgtgctgatgagagtcaaaagagcgttctatttgtgagccatctccatagtcttttttgatgctgtgaaggttgttgtctaaacacttgttctgctcctacaggaaaattatggaaagaaagatccagcctgtgtggcaaaagtgaagagcctctacagagaactaaacctagaggtttgccttgactctatatgctttatatgtttcttcatggggtttaccttattgtcaaaagaatcttactctcttgtaaattatgatttctatagcggatgttcctgctttgtattatcatggcctacttgtttagttgctctacctagtctgaatttcgacatctccaaccattatattgagttcataaccaagtctgatatcttgtttattacttcattcttaggcggtctttctggactatgagaacgagagttacaagaagttgattgcggatatagaagcccagccaagcatagctgttcagaatgttctgaagtccttcttgcacaagatctacaagagacagaagtagggggggtttctgtgcaggaagctgtccattgttgcatgtttcttctctagcaactgatgttgtatgttgcaatttgctgatcttggataataatgttgcaaggtgttatttcgggtgtgatggaccgcttggtgtagacattagacaataatacatgagctgtttgtcttgttattagcatcatagccgcttgttttcttttttttttctttgcacgagttcaagcaagtcagttacagggtaatatgcaagttgctgtagtatttcttttttctcgaaaacgcaagaggcttgcgcttaatgaaatttcattaagtaattctgaaggactgatctgagtggtaactggtaaggcatatcgcgttatagaggttaaaaaaaacaatgcaaattcacgaatccaatcaacactcaaaaggagtacataattcaagggtcacttaacacagatggaactcatttccaactctgagaagaaaaaaaaaacaatttactgagctagttcctgttcagtcacaaggaagcatatggtaacaaggacaaactttttatccaactctatcagttcatctcaaaaaaaataaagggaaaaacccggactcccttgaagatgctgaagtccgcggcggtgggaaagcacacaataaagaataaagagaatattatgagatcttgagcccagaatattgtgagatcttgaacccaaaagctttagcaataagaggtttagcttataattttctaagcactagtgccactacctaattatgtggccatgttctatggatagttgcaagcttacaataagcaccaaaagatttggaccagctgtacgatttccatttctgatgatgcactgagagaagtgcaaaggaagattttgggtgactgatgcagaaaattttatgtgtattaacaatagccataagagaatacaatgggaaggtgtacatcatcattttttgccacagatggtaataaagagattgatacttcatacacgatacccatcttgtgcaggaaagaacaggatacaagtgtttgttgaatcagcatatcacacgttccatcctttttgctaggcacctaattcgaactggaattgttgggaatccagaaagttagggcagttgacgcagttgcaaacattgctcgacggggagcccacttcaaagcagtgataggaccgatgtgactgttccaacaagcaatctacaaaaggaaaaacacttaagaggcaaagaacagcatattaaaagcatgatttaagaaagagcacctcttgtattgtattgatgttccaagcatgcaaggtaccatcaccagatcctgcaaaatcaagcaaaaaggttttcaacaaaagctttggccacagcctgaaatattggtatcaaaaagttccaagttttgttaaatgttagagcatatataggccttcactttcagcagtagtggaactgtcaataggcaacagaaactatagcatatataagttatattggtacataaaaagcagtatgagcatatcatgccaacaaaatatttctattcggatggttaaaggcatgttgaaggcgaaatatatgctccaattatcattaggtctgttcttagtagaagcgacggtcgcacaaggtaagttaggagcacttttagtagaagttttacttacaggggaaccagttgggtaaattgttgtgtactactagttcatatcggaatatatatatgccaaatgatatggcatacaaatggaaaaacaagaatatcatacctgaaattacatattggccatctggagtaaaagcagcttcagttgctacattgggagatgactccagactaaagccacacctctgcaaaaggattttgagggtgtcaatgatttgatttgaggaaattatgcacttagttcaatttgaagcatttttttctgcaacagaagtaactgaccttatcccctccatatgcatccagaacatatatatggttgttggttgttgtcaaaagcatggacttgccatcattgctaaatttgatgtcagaaacttcagctgtatctccaccaaccaagaaagtgtcaaagggaccctgaaattgtatttggcacccaagataagaacttccgcaagccttataggaatttacagtttttgagattcaagctgaataccaactttgtcatatgaccgggaatcaaatagcttaatagcacctccttccattgccacggcaaaaacaagtccctgctgatcatatgcaacagaaggcctaccacgcaaacgtagtataccctaatgctaaacaagtaagcatggaaagccctgagatgacaaatggtactattaccctactaaatgcaatttgtgtatatatgattgatcacattaaacaaggaatggtgtccgaacctgacaagcatttacacgaagatcccatatcctgacactgtgatcaagtgatcctgacataaaactatcgttgacaggtgacatacatagtgaaacaaccctgaaatgaaatagtgcacctctcataatttatcctagacataatcgctagacaagaaagaaacaagaacatagccaacctgtctttgtgtcctttaaaatatcttaagcaacggttgtcatacagtgataaataacgaagtgactctgctgactctagattgtatcttgatgaacataagatagaactcggatggtgagtgaaacagacacggtcagcaccatgtttcctatgatatgtagtcttcaacaacctaaacaatagccccccatttataacatcagttcatcagaagaaagaaaatgtacacaacacattattgaatgctctcaacagtttggttaacatcaaacaaagcaaaattcgagcaattcagagcatactgcaggacaggttaaatctaatgaaaaaaaaaagcaacgattacattaatagagaaaagaagggcaaaacaaatgctgccagtatgactgcaatgcatatccctagcaatgttgttaatcagacagaaaacgatcgcaggtcataaaaagtgcatcagtatatatccatcaagcagaagcacagaactgacacacatgaagtatggattctagcagcaagatattgacatctcccgagttccgaaaagtagaacccaccacacataacatccccaacaca

SEQ ID NO: 4871 - DNA, 28975 bp, Oryza sativa
cccacaatctatactattgcaccacctttcaacaaatcctcccccatttcactattggctccccccaaatttcaaaattatctacttgttcaataagaaaaatcatagtattacttagactaaataagtgtttattgattgattcaataagctagaaacttaatttgtttttcattgcaatgcacgggctcttaggcaaactacttaaatcaagggaaagtttgaaaaaccctgccttctcactttgccccccatgtcccaaaacaccccccgagtgaatactttgtccacttatggaagtgtttatggattttcccttaaattaatataaatatcacaggcataaatcttcatgtattgaaagtgagcttcagttgccactgcttggcactatcctgttaagaattcactaagattttataagaacagcattgtagcccagtggtcatgaagctgccaggagcttgggccagcctgtgttcaagtcctctcagacaggttctctcgccaattttcttctttatcagtcatagatgctaagtccctccttactatcccacattttattcattcaaaaagatctcactagattttctagttctgttagctgttaaagcactccaacattccaaagtgagcatactagagaaagagctagttaccatacttctgtgaagggggtccatttatgtagaaatataccttaggtgtgcttggtgcctctgtaaaggaattttctctgttagctgaaacttcagcttctttattttgcagctgttaacacgaaaggcaaaagataatgatgtattagatgaaaggaaagaaattagagcaaataaggcatataccataaaaactttccctctttgtatatacaccattgaaataaatgagttcgctttaataccacccaaatttcaaaatttcctcaaaataccattccattgcctcttgtcatctctccataagggtttggttcaattccatcacattattggaaattttggtttctctaccaaaagacccaccaccttagcactatctgagtatatgccatttatctttcgtggtacactttattggcattggaagatagtactagtaagatttagataaagcggtgacctctgaatggcaacaagctaagccaaacaaggcctaatggggaacctatttgccgaggcatgacactatctacaaatacaacactgccgataccatttgagagagcacctatcagacgaaatctggacgtgctaccacgatacacacctcatggtgtccttctggatgactgcgctgtaacggtgatcgtgtgaactctacaagtgaggtgcaagcttagtgaagttgtaatgcttgcatctaattcctagtaataccacatatatccctagaatgctaaaatgaccaagcagtgctggcactctatcaacaggaaggtgtttgcttgtgatagaacttccttggggacaacagtggcgtgtgctctcagcagagaagcaggtgggaagggagggtgggtcaaggtgcttggggattatgtcagcctgctctttatggggaaggggttggtttatgcgttaggaggagtgataggaggcaagggaaggtacttggaggagatttgtgaagttattaaagtgaacctaactgtttcaattacaatggtatctaaagagggaagatattttgtatatacctaattttctcaagaaagtaaatcgctataaccaacatttatcatcgatttcccatcttttaatgatattcttcaataggtgcttcaataaaacagtgcatacatttgggatggaagcctaagtgcaaattgtagattaaaagcatgttgctaatcgctactctaagaaatgctaacttcaggagcagcatggttatcgcaagcttcctaaatgtacctgcttctgtaagttaagcagtgtaagtatctcattccgtagttcaagatgctcgacgcaaactgctttcgtcgggaccttgggcttcaaattcacctacagagaaacaatgcatacaatttcatgtatctaattgtgttattaaattataaaagaaaatgcactgcaaacctactagacccaaaaagaacttgaacaacatcagttcggtgcatatcaagtacagattgatgtctaggaaacaaaccccgaggtcttgtaaagtctggtcaacccttttgataactctaaggcccgccgaggcacttgctgcttggaccatttgatcaagcgcttgggttctcaaatacactcgaagctgtaaaagaatgtatagcgagtaaaaaacatctaaaaagaacagtgtgaagagtgatataccaattttcatgtgattcataggcatccacagttaatgagaacaagaccgctagtaatataattaacataaggtctgcttgtgatgagttcggcacaatcctaataacagccacctcccatgcaatgagcaagataacttacactatctttgtttttcaggaataaatgggacatgctataattgctcaggaaacataattttacacttagtttaatagtgacattatggcatggtaagatgaaggataggacaatgtggtttccacagaatggggcaaaatatggttagctttaaataaatagaacaaaatgtctactgtaacaaacaaaatgttaactcatcggcagctcaatataagagacagaaagcaacaatccatagtttcagagttaccattcgcagtgaagcaggtatggagttattcactgctgcagctggaagtgtagcagttgacaatgggtgtgtgttgctcaagggagatacaccatcaacattatcaaagtgtgccagtgctcccgcttcctcagtatgctatagacaaagcctcaaacgcttagagacatgtaaattccagaccactgatcagatagatcaggcagactatatcacttcaaactaactaccatcaaaattcataaggtttattagtgaacaacactatcatccctgcatgacagcaggcatctgggaaagcccaaaaggctaagcgctatttgcttgaacagatcggagtctcatagatatctagatgatttgacatctcttgcatcacagaaggaattctaaaaaaaaactcattatttgcaatataatgcaaattgccaccagaacattcttgcttgagattacttttgtggtgagatgtatggaattaaatgtgctgattactcactttgctagcagcacgagtttccataatgcgttttgcttctgctaaaatctgaaaaggtaacacttgtaatcagacataaaacattggaatctaaggaatgataaactgcacaagtcagctgctcataatactatcatcaacaaatttctcacctcagcatcctttcgttcttgctgttttgtctgggagagaagtgcagataaagcacgctttctctcggtctcatgagcagcattgaatgtttcctgagaagaaacccatatggacagaaataagtacaagggcaaacataataagaaaacaattactcaattattcataggttagatcaacatgtaccttcacaaggggattaccagcaacttcatcaaatgaccgagctctagcaatcagaagagcacgagtaactgcaataacaaagaatatactggtgtagaattcacaaaagcaaatagtaatgcacagactgaattgttgagcatagaattataccaaacttgaaatataataattggcagcttcagcagttgactgattattctaaataacaagccatgcaatcaccttgttctcataaaagaagggcaggggatgtataatgggacaatgaccagaatattgcttatatcaatttgtgtgcgtgtaaccttttcttaagtccccattatacataagtaatgtgagcaatattctggctgttatgataaaaacaaattcggtggaacggttacggagctgacaatttactaactgttcttgtttcatatattgaatgggaaaataaatggatatgataaccacagtaaatcacttgttggtttttgaccaagtaaatgcatgtgtagaacattaaaaattaacaacaaaggagaattttctgtggtggacactatctaagcatagaggttatatcaagatataaggtaccagaataataacggctcttcaaatcctccatgctgcgatcagttgggaacctatcaactattactatgaagcgaaggtcaaagcgttcacatagttcaaatagtttatctgtttcctccctgctccatgcctgaaatgaaatcaacaactgattatttatagaagggctttcaataaaattgtttgcaaatataatattttcaaacaaaggcttgcaactattcgaaatgaatgctcaaatgccacataacaagcatataaagatgagatgataacataattatgtataattttcgaacttcccaacattgttatcaattgtattcaagagcgcaatgatatccacagaaggtttttagcaatataagattttcaacaaaagatcaaacatagcatttataaaaatttattattgcaactagtacctacaggatcggttaaatacttctcatactcctcatcggtgtatttgagaacatccgccttctgcaataggaaaaaacaagcaaaaactgagtaagcatcaatgcaggatatgaaggatgtacccaacacaatatacttcttaccttgttgtattttgcaaagtgatagtcaccagtgggtggagcaccatttacaactctaacctgaaagatcaaaagggtgactttctgagtttttttttctaagatatgtatgccatactacaaattcatgagaaacagacccaatggtaaagttgaaggttgtcagtccgtgcagaggacgtgaaaggtagccactgccatgctatctgcagaagtacttcaaatggtcagatttagtacaagctccatcaaaatgggagcacgaaacaccttgctgcaattacccatatgactcaatggacatgaatatgtgaggtggattcaatctgcttatttgggttgaccaccaatttcaaaacagaagttgcacatgatcaaatcatcatttcatttgtcccatattaatcccatgagcaccttacccttaatgcctaattcctaataggtattaagtatacgagtagctaaactctcagctcagttcatgtgcttctactagagttatcaaattttcagcacatatcagctcaccttctccttctcaacagctggtcgccgcttcaggtgcgaagcctcgatggtcggcatgagtggagccatccccacccctccagtgagcgcgtacacctggatcatcaacaaccatcagcacttcagcagcaacgagaaacgcggggtcgaagtgtgcgggaggatggcggattaggccgcgccgtacctcgcgcgagacgccatcgggcttccgctgcggctccttgggcgcgcggggcttcttctcctggacggacgggaaggcggtcttggggaggccgaggatgtccttcgcgtccattgccgccggacggaggaggcggacctagggttagggttttggtctagtgcgccatgggagagagatcgaggtaggccgaagccgccgcctgcgtctgcgttgcgtcgagctgagctctacctcaacttggcctcgcgagagagatggattggagaagggaaagcctgagattgtatgggcctagtcatattgggccggcccaacttcttatggcctttgctagaccgagtccgagtccgacttcttggcacggtagctttttttatttcctctttcccgtgtctcacggcgaaccagcgaggccgaggcgcggagctgagcggaggaggagacgcgccacccctcacggcgctccggcgaatcggcggtgaacaccggcggtaatgcccccctccccttctccctcttgtagactgcgtcttccggccgcttggggtgggtaggattctgcttgtttgctctcgatcgttgggcgtggaagctggggtttgaatcggcggcgaacaccggcggtaattccccctccccttctctctctggtagacgcaccttctctctctggtaggctgcgtcttccggccgcttggggatgagattctgtttgcttctagcatcgtctcgatcgttgcctcgttgggaaactgcccttcgggtgaagggcatttaggtaattcacattagtactaaactttcaatggaaatataaggatgagtttttttttataagatagagggaatatgccatatctcataataacttattttgggagacagagggaacttgcatattaccctctcaaatatagtagtaattatttttgggacggagacgataaaaatatattctttgtgcgtcgagaatctcccccatcctctctgcgtaaaaaaaaaaattcttcccgtattgtctcgcctgtgccgatcgagcaggaaaatttgataatttaacacttttttcattgtccaattgttttagttgacacttgtgagaatgacatgtgggatcatctgagtgaatgaaagtgggacaggatttcaaataatcaaaacccattttaaggagtgttaaattatcaaatctctcatcgagcatagtgcaggggagaagccagggaagagggaggtgacgtcgtcctggtgagcatccacagctgggtcctggtcttttctccaataaaagttggatggagattaagatttccgttgcatgtttttcaaattgctaaacggtacgtttcgtgtgaaaactttttatatggaagttgctctaaaatatcatattaatctatttttcaagtttgtaataattaaaactcaatcaatcatacgttatttggcctggtttagttcccaatttttttcccaaaacatcacatcgaatatttggacacatgtatggagtattaaatatagattaaaaaaactaattgcaaagttatgggggaaatcgcgagacgaatcttttgagcctaattagtctatgattagccataattgctacagtaacccacatgtgctaatgacagattaattaggctcaaaagattcgtctcgcggtttccaggcaaattatgaaattagttttttcattcgtgtctgaaaacccccttccgacatggatatgacacctaaaaattttcttttcgtgaactaaacaggccttatattattttcttagggctgttttggattagtgccaaaaacgtgccctaccaatactttggtagtttgaacagtgtatctggtgattttggtttgaagccaaatcattggcattgccaatgcccaatttgatattttctatattctactcaatgcttggttctaaattggcctcaaaccaaatacaactctaccctaccaaaaaattggtagtaccaaaacttgcctaggttttggcactaccaacattttggtagggtattgaaccaaacaagcccttaattccacagccttgaacctacaaaagaaagtttgggggattcaactgaacccccatgtcccaagatggatccgcccatggcgccagcgccgccgccctccacccactccaccgcacccttcgcaactccggaggtgcgttctgtcgccgccagacgcccgcggcctgcggcggcgagcatctccgcgcgcctacgcgacgtggcgaggaggaggaaggataggcctcgtcgctgccgggcacaggtggctccccgcggcggcgaccgcatcagcgccctctccgacgatgtgctcctcctcatcctgcggcggctcgccacccgcgccgcgctcgccaccgctatgctctccaagcgctgggcccggctcctgcgctggcttgacaccctcgatttcatggtcggtgaaatactcccgccgcgctaccgtaggtgcatccaactccaccaagcggctggttttgctgcgtatcccgttgatgtcaaggttctcgttgcaagtatcaagcgacacgagcgccttgccatgcgaaacatagcggcctccatcaatagcttgttagacgcggatggcagtgatgaatgtgctggccaagctcgacggagggcccgtgtgctgcgggtggagttctttgcgactcactacaccgatcttatgaaccgattgatcaccaaggcattggatgcttgggaagtcgaggatcttgaagtttttgctaagcctgcatattggtctgagtggtctctgccgccgattgtccacagatttcctcaccatggtctctgcattgagccccacaagtcccggctgagaagcttgaagctaggtggttgtatcattccgccattgcaggggttccacgctctcaccaaaatgaccttgcaagacttgcgaaactccgtggccaaagcatcctatgaagatgtgtttaagtcatgcccccagttgcaagtgctacacctcaagtcatgcaggtgggcggaccggggcattctggttatcgatttcccaaagtcagggattaagcagcttattgtggagttttgcagcgccattgcactacactctcttgggatgcttgagagcatagctataagggagacttgggtcaggtataagcattgctccttctcgcatcttatgcacatgaaccttaacttacgccatggttaccgtaatcgtctgcgtgacttatgtattggttgggacttgaacatccagcagtttcttggattcaccaagaacataaccaacctggttctacgattcactggatatgggagatggttcgtgccatcttgcccctcgttgttgctggctaatctcagaaggctcctgattgctgatgtgccttcatcatgggatgtctcttggcctcgcctcctacttgaagcagcaccatgcctggagagccttcacatccatattatcccttgggatgacgattcttttgatgaaatcatttggcaaccatccactttgcagcatgaagaactaaaagagttggttgtaattggtttcgagggaacagaaagacagatttactttgttaactttgtgatggaagtatcaacaacattgcagcttgttgctctatttagatatgggcatgttcaagaaatggggcgttgggactggaaaattgtgaggcagcaacaccattggaatgatgaggagaaagcccaaattctgaaccagtttgctgatagagattcttgctcaataactccagttcaagtagttgtagagtgatctgttatgttaatgttttacttgtatacaaggctttaagttataaagcatgcatctgttatgttacttgtatacaaggctttaagttataaagcatgcatctgttatgtcagtgtgttacttgtttacaatgctttaagttatactgcatgcattatgatcttaatttatttctgtgcgactttttataagttacttttacagtaactctgtttttgttattatgccttgtatgcatgttcttttgtatttaagtggagccttctgtttgttctctactcctcttctctaaggttttacatttttttagaggttctcaagttttacttttgcatcataggacaccaagtcataaatttcatgagaggtatgtcttttgtaactgacgtgaacaagatgattagtgttcatagattcttatgacaatggggtcaatgtctcactgagtcaccgatcatattttgttgtgcaaggggatgtgccttgataattaacgacttccgtgtacaggatattcattagaatcatttataaaagataaaatcaaactaactaatgtgcagtttagtttcattctaggaccgcttcaacttggtccattgaacaacaaaccacctgtctgatctgctcctgcacggtgagcttcccctcgtcactccaggtatatttctggcttaccatctcctattcacctagcctcttgtccttgacatattcatgcttgagcagaacaacacggcgcaacgaccatgatatgcctcacaagctgaacctttctttctttcttgatctgaaaaccaatgaccaccaactcctccagatgagaatgcagtgctcttgagggctcctgctcccacactatctccaacttccgacgaacggccatctcatcatcgtcttcacaacgttgggaaaagtggacgtggagtctctcaagcgatggagcctcctcaacaagggcacagatccatgtggcatcccagcgcggcggcatgtccacgaccagcagcttcctcaggctgggcatctctaagaaaggactctccggcgtgacccacatttgaggtccagttagccgcagcatgagatctgtcatgttggccttgcagaaatagctgagcatggacagcacggcttcacgcttccacgtctccaataatggctgcaaaccatccccttcctgttggcctatgttgaaggtgagttacggcaccacgtcacccccttctgcccagggattttgtgcctgctgcaaatatgtgtgtctccatcagttgtgatcctttcatggatctggcttcttggtctttgctgatctctgtttcttgacttgaatccccattatctgatttctttttatttgttctttgtgtgtgtgtgtgcaggacagcaggagtgagagggtcacaatggtagagagcatcttgcagattggttgtatggtgagcagatgaatctgtggtaatgccttgtccaataattagtaaatctttgttcactgcaaaatacaaatttatatccctggctcctcccctcccaaacgcgatcgcactgaagtccccatctccttatagagtagattatgatagtgtactttttccactgttgtgtttagtagtattgccttcagcaatgcatctgaagctgttatgatccagtgttcaatcaatcaaatttaatagataacaaaacattagcgagaatttggatgtcgttgatattggttgtcgtttttctattactgtgatatgagtttagatcattttattttgttgaatataagctagcaaagaaaactgggattagctcaatttttttggcttaggataacatatgccagagaagaaacttgtaactaattaagtgtgcagtggtagctcaattttcttgcatatgctttgttggatctcatttttagtttgaattgcttaatgactataagtaagttaattataatcagacaccctttatttggggataacgactgtgtttacttcaataaataagaaagtatcatttttgtggcaagcaattttagtcttattgaactgttaccaatacttaagcgcacgagtccattgatattacagaacccctcagttttatttacaatgaagggttgttattgacctgattttgtttaaatcttgaagagttaggagtaggaaattgatggagctgttgcttgccttcccaatgccccccaatctaatcattgtacattccacaagagctatctaatcattatactggcacatttcagaagtaaaaggatgctcaatttcaacattgaaatcatatctattgctcaattacagatgtgatatggtaccccacttgatttatcgactgaatgggtgttcttgtgtgttgcgttgtaggggcgcaatgtgattattgagagatcccataggtctctcaaagacccaaagtcacaaatggagtaactgttgcaaaaaagcattgagtttgagcacagcgctaagaatgttggtgcaaacctggtgaagcaagttgctgaagctactaataaggtcgcaggagatggtatgggacctgagttgtaggaaaatcctgtacttgagtagccatatgaactatctattcgattgtgctttgagcatagcagatcagcagtccatctgatttctaagcgtactcaatgccaattcgccaacgagcatagtgttaacctgtcttttccgctatgtgcggttaatgttttttctcaactagtagtaatgaatatgttgtcatgataggttaattcttatggcatgaatcaaaatattgattgttatagcattagatggtaaggaccaagttctagtaaattcctgaattttttttaactaaattcatgtactctttttttttcgataactaaattcatgttcagcaaatcagcagcagttcatctgatttcctagtatagggcctattttctgccagaaactccccaaacaattcagattttcacttcgatttttaaaaaaccatatttgtaaaatttagaaaatgaactaaaagtaaacccagttttccagattctcatccgtacagtacctatagcagccccaagaagtctactgggcctatgtgtacatgggctgacatcagggcaagagttcttgtcgcttttcgctactggtacgtgcggttcgttgccgccgcggccgcgattgcgatctcaggcaacctcgccgccgcgccctccgcgacactcctccgccatggctaggaggaaggggaggaaaggtgcgttctaccggcgccgccaccgggatcccgcgacctacggagacgccgctgggaggaagggggcggcggcggcgctgtactgtctccgtcgacgccggacacccgcggcggcgccctgcgacggcgaccgcatcagcgacctctccgacgacgtgctcctcctcatcctgcggcgtctcgacacccgcgccgcgctcgccgccgcgatgctctccacgcgctgggccccgctccgtcgcgagctcgacgccctcgatttcgtggtcggcgacgtactcccgccgcgctaccacaggtccgtccaactccacaaaaccatcgcgtacaacggtgacgccaaggctctcgtcgccaccatcaagcggcaagagcgcctcgccatgcgaaacatggccgcctccatcggctgcttcctcgacgcggatgacagccatgaccgtgccggccgagctcgtcgtcgtcgtcgtcggatcggcaggctgcgggtggagttctttgccactcactacaccgatcttatgaaccgattgatcaccaaggcattggacgcttggggagtcgaggatcttgaggttttcgccaaatctgcttattggtctataccgccggatgtccacagatttcctcaccatggtctctgcaatcagaagtcccgcctgagaagcctgaagctaggaggctgcatcattccgccattgcaggggtttcaagctctcaccgaattgaccttgcaagacttgcaaaactccatgcccaaatcatcctacgaagccgtgatcagctcatgccctcagctgcaagttctacacctcaaatcatgccgctgggtgggtcagggaattctggtcatcgacgcccccaggtcagggatcaagcagcttaccgtggagttctgcagcgtcatcgcgctacactctcttgggatgctcgagagaatagctatcagggagacctgggtgagttacaaacatcactcctccttctcgcgtgttatgcacataaacctgaacttacgccatggttacattaatcgtctgcgtgatttatgtattggttgggacttgaacatcgagaggtttcttggattcaccaagaacataacgaacctggtcctacgattcactggatatgggagatggttcgtgccatcttgcccctcattgttgctggctaatctcacaaggctcctgattgctgatgtgccttcatcatgggatgtctcttggcctcgactcctgctcgaagcagcaccatgcctggagagccttcacatccatattaccccttgggatgatgagcattgtgatgaaatcatttggaaaccatccactttgcagcatgaaaagctgaaggagctggttgtagttggcttcgagggaacagagagacaggtttactttgttaactttgtgatggaagtatcaacggcattgcagcttgttgctctgtttagatatgggcgtgttgaagaaatggggcgttgggactggaaaatcgtgaggctccaacaccattggagtgatgaggagagatcccagattctgaaccagtttgcccatagagattcttgctccacaacttcagttcaagtagttctagagtgatctcttatattaatgtgttacctgtatacaaggctttaagttatactgcatgcattttgatcttacggagtcactgtttgtcttatgtttatgcgcattcataccgcttattagcaactaaactggtaaaacttttttataccgttttagcctagttttccctaagtaactgttcactgtattgtttgttctcttttcctcattaaaatgagacaccttcttctatatataaaacgtcgataacagcctgaccattaaaaaaaagacatttttatatatgttattagcgattcaaaagcaaatgttgtaaaataaaatatgatgaagaaaaccacaaaagcaacttaaaaaattagttctaaaatttaaattttgacttttaagtataagcgaaaatatattgctcttaatttatttgtgttactttttatgtgtttttttgcacgaactctgtttttttttatttatacatatccgtttgtatttagttgaagccttatgtttctacctgccatccagtttcgttctcaagttttacttttgcctaatttaagccgattttccttctgctagtcgactggcggggggagcaaaatcgagcactcccctacatacgcgcacgtgtgccccccgggccccaccatttgtcatgccccaacctgctatgtgtctccacaaaaatgttttcacctagtgtactcataatgtttcactatatatagatttaatgttgtagtattgtagtactgtacaaaatttgtcctaggggtattttggtcatttgaacaaatttatacagtgctaacggaggttaaccggacggcgatggtaaatcgtagaagttaagcaaaagtcgatgacatattgtagaacatgacaaagtcagtgacaaatcatagacaagttagtggcatataatggattgtctatttcactagcgatatcagtcaccaaagcaagaagtcggggtctcggggaccattttgtcattttgtcaaactggacctaggcccattggacttcttaggcccatggaccgtacgtggagccgaagcttccggaacccaaaacccttcttccctagcaaaaccctctctctctcttctcgaatcgaaattgcgaagccgcaagcaaagccgccggaggaaggagcaatcgcgagtactcgccaccatgtaccgggcggcggcggcggcggcgtcgtcgatttcgaggtcctcgtcggcgctgcggaagcaggtaaccggcgcgctacctccgcctcctcctccttcccacctgacgcatctcttccgggcgacgctaacggacggggactcttgcttgcgaggcagctgtcgcgcggcggttgcggggagcagcggctgtgggcgcgggggtatgcggcgaaggaggtggcgttcggcgtcggagcccgggccgccttgctgcagggcgtgaacgacctcgccgacgccgtcaaggtcaccatgggccccaaggttcgtgctctctgacagactccgagatgcgtggattggttggggagagtgttgcagcgatcgggctggatctagtggtggaagcgctagattttcgcactcgatttggcgactgaatgggcgtgtttgtctgtgtcgttgtaggggcgcaatgtgattatcgagagatcccatagagctcccaaagtcacaaaggatggagtcacggttgcaaaaagcattgagtttgaggacagtgctaagaatgttggtgcaaacctggtgaagcaagttgctgaagctactaataaggtcgcaggagatggtaaggaccgagctctaggaaattactttacttgagctgccatatgaactatatattcgattgagctttgagcatagcagattagcatcccgtttgatttgtaagcctactcaatgcaaacaagcatattgttaatctgttttttctgctatatgtgttaatccttcttgtcagctagtaatgaatgtgtcgtcaggataggtaaattctgatagcatgaatcaaaatattgattcttaagtaaactcacttgagtgtgatgctcagtgacttaagttctcacagtggataatggcggcaatagtttctgatatgtgtggttttcatgttctgtttttttttttgggggcctcatcgcaaacattatcaaccctatgaatagcataattactagcatgaatataatattcagtgtcactcactgcatttctggttgtatggggtaacaggtaccacttgtgcaactgtacttacacaggctattcttacggaaggctgcaaggctgtggcagcaggggtcaatgttatggacttacgtaatggcataaacaaggccataagttctatcactacacacctcaaaagtaaagcatggattatcaactcctcagaagaaataaatcaggtgggatgctctggtttggagtggtattttgatctctctgctccctccagctacattgtataaaccatattgagttgcttatgcatctttgctgtagttattgtttgcatctgctgtaaataagctaaataatcactttgactctatattactgcaaactttccatagtaattatcccgcattcttgcatgcttaagaatatgttatttcatatttctgtaaaccaggtagcaactatttctgcaaatggagaaaaggaaataggagatttgatatcaaaggcgatggaaaaggttggaaaggatggagttattactattactgtgagtaccaagtgctgcttttattattagcctcatactgcagaatcattctatttggtaatacctacttacctaggctgcaacttattttgggaaattggcaggatggcaagacattagacaatgagcttgaagcggtacagggaatgaaactttccagaggctacatatctccttactttgtgactgatcagaagactcagaagtgtgtaagtctgtatttcttggtcaaatcagtgaatccagcatgaactacattgtagaaagttcgctacattccctcatttgctttgactttatgatggaaatatgcatggaagtggatcacatcagtaataattgtgagtcaggttgtgtattttgattggttttggttttctgccactttgatataatcattagtagattatgtctcttagtgttgaccttataggatgactcagggtgcttatccttgcaaggttttatttcctgtttgttaagttggtttcttagatagctttagacccagaaaagacctgatgagagcagagaaaatatatatgagagttgtatcaactggcatggaatattccaaataatggtctgagacgatctcatgtatccctatgtttgtgcaggagatggaaaatcctcttattctaattcatgacaagaaaatctcaacgatgaattcacttcttccagttttagaaatgtctatcaaggtgattatgtcccataatgtctcagcttcttttgaatatggcaatggtaaattggtttagtactaaccagtgtctcatgtatgcagaatcgtaggcctcttctcatcattgctgaggatgttgagggagaagctctatcaatgcttgttctgaacaagcatcgtgctggattaaaggtgatattaactactggtcctactgtatacaatactgaattgcgtatacaagctgcttgatgatatgtgtccgttgttagttaaagtgcaagcttcttaccttcttcaagctagagctatggatcgttgatattctggtaaattagtaattatcatgcatcgattatagatatgtgctgtcaaagctcctggatttggtgaaaacagaagagccaatctggatgacgtggctgtgttgacaggaggagaggtcagtcatgatcaacaaccataaaagtccttaaacacaagtgatacaatatgactgaaattggcttgcttatttcgtttaatttaatttcaaggttgtcagcgaggaccaaggtcttgatcttggtaaagtcgaactacaaatgcttggcactgctaaaaaggtttgtcaatcttcacaaattatttcacctgagaaacagacagtgagaatttcctttacaggttactgtatcccttgatgatactatcattctagatggtggaggcgacaaacagcagatagaggagaggtgtcaacaggtgctgcaataaaattgtcactcttgaccttcatcccaactatctagataatagtggccggattctcctttgatagaaattaaattgtttgttatgtgaatgcccttaacagcttagagaatcaatggacaaaagcactgctgtatttgacaaagaaaaggctcaagaacgtctatcaaagttatctggtggtgttgctgtcctcaaggtttgttatttttcaggtgcacagtgatgtttcactgtatttcttttccccactttgctcctctcaggatatccattttgactgcagattgggggagctagtgaagttgaagttggtgagaaaaaagatagggtaacagacgctttacatgcagcaagggctgctgtggaggagggcattgtaccaggtgtagtgacggttttcttattttttccactttggtgtcttttttcctaaacttgtttcttgatgttttgctttcgtgtaacttgtccatatgttttgtgccaatttggaacttcaaacaggtggtggagttgcccttctgtatgccaccaaggagcttgacaagattatcacagcaaatgaggatgaaaagattggagttcaaattatcaagaatgctttgaaggttagttcctgtattggttttggcgtttcatgtgcctgatggcttgtttcttaaacatgtaataatctctgaatttctgtaggctcctttgatgactatagctgcaaatgctggcattgatggtggtgtggtcattgggaagctaattgaacaagataatcttaatatgggctatgatgcagcaagaggtttgtgctgtttagctatgttttggcattactggctgtaacaaaaattatgttgagttcctttattgcggtttagatagtccttgaaaaggctatccatatgccttcaaaagcatagtaatctttatgattcattagctgattcctgctctttgccaactacaggggagtatgttgacatgattaaggctgggatcatcgaccctgtgaaagtcatccgaacagcgctacaagatgcatcaaggtacgcacgttccttaagttgattactatttttcctttgcattactaaaatttccacacttgcttaataacttgtgtttttgtttcagtgtttctttgctgatgacaacgacagaggcagctgttgctgagcccccagcagcaaaggccagaatggctagtcggatgccgcagatgagcgggatggatttttgagagcaagtaacatgatttatgatatgtcttctcctgatgtaaggcagtgcccctcaaatgaaaggggtgattttttgaaagctatatgacgtgattttgtcttttcgtggtgaaaggcagtagtagtacttaatatttctacagaatttcacggcccgggagaaagacgttacagatataatttattttaaacttgggaattgggaatccgtctgatgtaaactgaactaatgtggagcagcacctcattttgtagattactacatatgtgaaattgatactgtgaaagctgcaatattttactatgcattttggcaataattttgcctgcgcaaaaccaccatttgtccgaccacctgaacgaattattctcccctgatctccttgaatgtgcgtacgctgcacatgttcataagcacgaactgattcaaacacatcacaactcgactgttatcaggaaggcgaaaatgcaaagtagacaaacaaggagtgaagatttatgactcatgaacacttccaatttctcattataaggggataaggggaaataaaccgtttataccgtataatatagatcgtatctaactctacttgccttgagatcgatgggggcaaactgtttattcacgcaacaaacactacatatcgtgtccttacagacacgcaacatttaaaagattcagtgatcattgaagattttatgccggtttcgcctcttctggtgtctgcataaagcgtggaacttctccgttcatcaccctccatggcccccagtagaatttgggcggcatgagcggcacggcctcgcccggatgatcttcccagtacttctcctgctccaaaatgcggtcacaatcaggcaaaagcaactgtaaattgaggtcaaattgccaatcctagttatttcaaaggtatattgcttgcattgttttgtacaacctgattcatataggacaatagggcgatctgattctatatatatatcaccaatcaaacctggccaaacttgcttgtagggtaaattgacagtcctaaactcctaatcagttcaacaaagtatgcaaccaaaatttgttgtgatccagctagctactactaccgagtacatgttaatcataccatacgggaacatatgctaaacagacctttgatcactgaagcatgcgaaattcatgtccaagtttcgagaccaaggggcctaagcattccgtcgagcaccttatgcgcggaagccccaccgagggcaaccacaaggagtgaagcagggaggggggaggaggagtggaggagcggtctgttcctagagtatcctgaccttgtaaagctgctcggtgatggcggaggcgacgacgccggtgtagaaggcggcgacgtaggtgccgatgagtggcgcgaacgagcgcggcgggcggtacggctccaccatgtcccagagcaccgtcttctcccacctgttgaattgccggtccgcgtaccacctccacaaccgcctcgccatccctctctcccctcgccgccgccgccgctcgcctccgcctccgcctccgtcccctcgccgccgcaagcctctgcaacgccgccaccggcaaagaacagcgccaccgctcagcacgtcacctgattaggctttcaattgggccgaaatgagactgcagatcacgtgggccgcacgttgcgttgcagtccaatttcagcccgacccggcccgtactcgaggcccaactagaccggttctacccagcccagccttagcccagaccggcccgagaacgggaagtgaaaacgcaaaggcggggggccgagcacgaaaactcgaaatagcccgcgacctctctctctgtgtctccgccgccgccgcctccgccgctcgccgcatccgtcggaggcgagatgggcatcaaggtgagcgcgggagggggggggggtgccgcgccgtcctcgttcggatttgtgaccggtggtgtgggttgtagctgtttttgcggccgattcgtgatgggttttcgtctcgattttgtgcgggtttttttttgttagggtttgacgaagcttttggcggacaatgcgcccaaggcgatgaaggagcagaagttcgagagctacttcggccggcgcattgccgtcgacgccagcatgagcatctaccagttcctcgtatgcccccatgtctcctctcacattctgcgagttggctttgaaatgtgctcacttacttggggtttagggtttcttaagcctttgattgcgcgagagagattgtatttttttctatttaactgcccagtgttgtaaggattcctcatttcaaattgctctcttagaccaaatcgggttgggtgaaattgggatacctccattgtgcctcatattttcttctttggtcggctatatttattaacattaaactaaacacctctagcattggatgttttgctttaaaaatgggagtagagcatagcaattccatattacattcactatatgttctgtgtgcaaatgcttgacaagttttggtgaggtattaggaaatccttacccactgctttataagttgggacagctttttatgttttacttgtatagattgtagttggaaggacggggatggaaaccctcacgaacgaggccggtgaagtcaccaggttctaaatattaatcttacaccgtttctagtgctaggattctgttaattcttttataaattagaactttttgctgtgcagtcatttgcaaggtatgttcaaccggacaataaggttgctggaggcaggaatcaagccagtgtaaacccaaattcctcatgtgttgttattgaaattatccatataaatacacttaaattgtgacactcatgcagatatgtttttgacggcaagcctcctgattgaagaaacaagagctcgcaaaaaggcatgatatgtttctttcatccttagattgtttttcctgctgctacttataacttgtcctatatcccattttgggctatgatctgtttctaacatggcatgttctgcaggtctcgaagagggaggatgccaccaaaaactaacagaggcagtagaggtgagctaacagtttgttgtgctatttacaatgttctattatgttctgtcctgtgcttgttctccttccttccttgatccccagagaaatgacttttaatgtgcaggaaggagataaagacgcaattgaaaaattcagcaagagaactgtgaaggtgagaaggggggttgatcttacacactaaaagaaatgtaaaaaaaaaatctatgatgtttgagggacaacagattcattcgctgagaaaaatatcaatgaaaacagttggtttgaataacatgatatggaagatgcaaaaaaggtaagtatgagagtaaccttatctttgcatcttctttttccttgagcaggtcacgaagcagcacaatgaagaatgtaaacgactattaagacttatgggggttcctgttgtagaggtaaatccaattttctttggtgccacatgctttttcagggaatgagtcaatatataatcgttggatttgtttattttactatgctagcataaaatctatgatttatcatgtatttgccatgctctcaatctcatccaaagacatcttctttccggtaccaataggcgccatgtgaagcagaagcagaatgtgctgcactttgcataaatgatatggtaatgttaacatagtggacttctgccttcttgtttccatctcttgcttccatttttattaattactgttttttttataggtttatgcagttgcatcagaagatatggactctcttacttttggagctccacggtttcttcgtcatttgatggatccaagttccaagaaaattccagttatggaatttgaagtcgcgaaagtatgcagcactgtgatttgcttggtacagacactgatgttgtacacacttgaccaattttcatattgcaggttttggaggagcttgaactcactatggaccaattcattgacttgtgcatcctatctggatgtgactattgtgatagcattaaaggtatttttgctttccctcttctcatgagtagtattcctataaattcttgcttgcttgaatttctgtccatgcaaactttttttcctaaccaactatgtgtgcttgtccgctaggtattggaggtcaaacagctctgaaacttattcgtcaacatgggtccatagaaagcattctggaaaacataaataaagacaggttaatcttttgaactatttgaatatttcccacttgactgagaactcaactgagacatgtatatcagctgtgtggcaaaggcagcccaaaattttctatatgtgccactttatttcatttcttggtcgcattatcttacttagatgtaatgatgtattgtaatgtgatgaagaccatttcctatgctaatttgtgctaaattttgatcatatctatcgcctactgcagatatcagattcctgaggactggccttatcaagaagctcgacgcttgttcaaggaacccaatgttacattggatattcctgagctgaaatggaatgctcccgatgaggaagtatgcctgtcacctttttttccttgccttcaaattttacaagtgatgtcgtcccaatactttaattctttctccagggtcttgtagagtttctggtgaaagaaaatggtttcaaccaagatagagtgacaaaggcatgcacttttcttctgacttactatgttatattcttgaaatatttttatcagcaatttgtttctccggtttatgtaggccatagagaagattaaatttgccaagaacaaatcttcccaaggaaggtgagacgtgagcattgtggtacatttttatactttggttctaagagtgttgcatgcctatatcatttgttaaaccataccaactcttgaattaatgtgaccaggctcgaatccttcttcaagccagttgttagcacatcagtgcctctgaaaagaaaggtaccttaacctgaatgccatcaatcttgtcgtgcttaaatttagaacttttagccttctccaggttcatccattgtagcatgatatacaaccaattcatgtcattgaattgcgtactttatctgtccattcaactaacaatgttgaatcacgtggtttgatgttttgattgtccaatgtacctgccaaataacagatcacagatgaatgataaaaatatgtccattagaccagtactcaacaatatatttgcaagcagccagaagtaggcagatacaatagccaaagctgaatcttgtaagccatgctaaaatccttctactatgagaaggttatagccttgtttggcatgattttctcgcagatcttgtactgttccatgtaaaactgcaaccatagtgctatactatatgtaggcttgcaaatgttgtggccataattatatttttgtagcaatattatgtctcatgatttgtttctatgatataatggcaggacacttcagaaaaaccaaccaaagcagtcgctaacaagaaaacaaagggagccggcggaaagaagaaataagttcgattgtgccattcatcaacaagacctcctgcacgtgtcatttcaattttaactcccatgtttgtaactcatcctccatctgatgttttctatgttcctagtaaaccagaagtccagaacttcgtctaatactagttcatctatgtagtacgtctctcttctctactagggatttgtagtgttggtttggttgctgcgtagtgtatgaagaaccaacaaaattggctttgccgcgcaaaattaactggttccgattcgcaaaatcagcgatctcccggacgatgtgctccgcgaaatcttgcgccgcgtcaactcccgcgccgcgctgggcaagcgctgggccggcctcgcgcgcgagctgcccagcctcgatctgagggtcgccgacatcctgccgcgcgactactacctagagcttcgccggcgcgacgaggccaagaggtcgttctgggtgtacgactacggcaagaagtacgacgccgtcatcagacggtacgagcgccgcgccatgcgcgccatggccgcctgcatgaaggagctctcgccgtcgacgccgcgccggagcgtccacaggctcgcggtggagttcatcgacaccaacagctcgaaccacatcaaccgcctgatcaccacggccgtcgacgcgtggggcgtcgagcacctcgacgtcgccgccgttctcctgacgtcgtcgtcgtcggcgcagctggatcacccggcctacaggttccccgacggccgcatcagcgacgacccccacggctcccggctaaggacgctcgagctcaccagatgccggcctccggatctccgaggcttcgacgcgctcaccacgctggtcctgcgcggcttgccccgcacgacgcgggcggccgtctacgagcgcgccgtggcgagctgcccgtcgctccgagccctccacctcgtctcctgccgatgccgctactccaaggtcgtgatcgacgcgccattgccggacctccgggagctcgtcgtcgtcggcggcggcgacatgagcgtacgcttcctccacggactccccagcctcgagacgctcgtcgctgtccagaacagcgtggagctgtaccgccccgacgccgacgccgcgccgcgcctcgcgcgcgccaccgtcgcgttccgcgtcggccagatggaaggggatcccccggactgcagccattgcaggagaggatcaagcgcgacgccgcgctgtccgcgctcggctacctctgcagggccgccattaacgtgacggatctcgcgctgcgtctcacggggcctcagatgtgggtcgtcccggagagccctttcctggagatgcccagcctgaggaggctgctggtcgccgacgtgccgccgcgctgggacgcgacgtggatccgcgccgtcgtcgaggcggcggcgccgtcgcttgagcgcctccacgtccacttctcccaacactatcgccaagacgacgacgacccggcggcggatcgtcggagattggagatagtgtgggagaatgagccgtcaagaacacagcattgtgacaatctggaggagcttgtggtcattggtttccagagcaagaaagagaggcaggttcagtttgtgaggtacgtcatggaggaagcatccatggcgttgcgccgtgttgtgctgatcaagcatggacacgtcgaggatagaggcccaggtgaatgggagatggtgagccagaaatgtacttggagcgatgaggagaagctcgccgtgaaggagcagatcatggagggggtttgctgttcgatggaccaagttgaattggtcctagaataatgaaaccaaactatgtgttgattgtacattagttaaacattcataaaggttatacaatacatcgaacagttataattcccagagtgctaataaaacaggaaggattgaatccatgcagttttgacgcttcactcacaaagaaaactgcattgaatttggctattttaacatgttcatcaaaagctacagagaatcatccactttgaacagatcatgatttacaaggttcttggcttctacccaaattacatcactaaacaagtcacttctaccaaaaaggaagttgtaggaacaaaaatattcaacaatttgcatgtgttggctgtctattccgccttgtcgagactatttgtcccagccatcctctctcatgccaaatagccatttctgggggagagggccatatatggaggcgaacttcgccaagcatttcgttctgatgtcatagtgcttctgcgtgtctcggctaatagcaactgaagaaagcttggaagtgtcgatagcccaagcagggtgaacatactccacagtcctcgaagagcttgcatttgcatacagaaaattcatgagcaagtcctcgcagttgaagttcttgtggacatagtctctgccttccttagcttcttgactccagtatttactgaaagcgaactcactgtccatgaaagcagcacctgtgaggatcaaattgtagcccttcttgccccgagcatatcgctcattcctgtactgcaaaggatcaccgtctatcattcgagggtaaaagcccaccatcctctcagggtgttctctccataccttgaatcctttctctacatcactgcaagtcatcatgatatcatcatccagttccaggacagcccttgtctttatcaaagggtcacccctaaatcggttgttaagggagttgatttcttccacacgtattctgacagggactgttgaatcaaaggcgtcgctggtaggatggttgcctttgttccagacaacaactatctctctgactgactcacatctagagtagtgttcaacaaatagtttcaggttccagagtcgagcttcatatgtcattgtgaccattgtaaattgagagtgctgcccttgatgtgtatatgcctcttcagcgccattgccaccaagtaagaaatgcacagcaatgcagacattaacaatacctatgagagcaatcacacaaaagaatagtgtgtttgaccatgttttctcactgagccttgctttggtagcagagatattcctgccaatactggttgaatatctacggattttcaggttgaagcgatgcacaggtaaaatacgagataactcacttctcctagttagaggaacccaaaaacttggaggaatgtagcaactgattgcaccttttacaaaacctacaaaagtgaccagagcaacagctaccaaaaaacccatgtaaccaaatagagaccgtcttgttgaatcacctgaagggacacgatcaccatccatgacagcaacccatccaccagaggcaagttgctgtgcatctatgtgatggtacctcataccattccaagcattcctccctttctttgcctcttcgattccaagatttaccggaacctctttgtattcttccttagttagcttttcaatcttgtacagcttaaccttccgtccataggtaccactgcaatcctgccctggacgatacaatgacccttcaaagatgaatagccttccaccgtttcgagctcctaaacttttgtcagatctgtaaatagggttttgcttatgttcactccaaggaccaagaggtgagttgctgtaccaaatttcaagctctgcattcttttctataccatgccgtgtaaaatctgaggcaaacagccaccacagtccatcatattgaactaatgaggaatcaataagtggcttatcaatgagcaccttctccaatgtccattcaagaggaaacttagtagctcgataaagtcgtagctccttctttttgttcccctctggcatcatataaatctacaagagaaaaggtaacgtattgacatattcagaaacagctactcatt

SEQ ID NO: 4872 - DNA, 61712 bp, Oryza sativa
  unsure (1)..(61712): unsure at all n locations
ggatgctttggcgttaatttcattcccagccatttcaaggacctccaactggggtgctgactgtttgagggtattgataattgctacagtgcccttgttctcaagattgagatcactgagatacagctcaacaagatcaggaagttttgaaagggttttgctgagagccaaccctgcctcaactccaaacaagttgtccctgagatcaagtttcttcagacgagtacaagtccctaatgcctcagccagagccaccccaccatcagatcctatccttgttgctgagcacctgaaactctctagattaggagaacgtttaaccatctcagcaataaacatagcaccttcatcccccgtcatattgttgtggaagtggaggatcttaagcttctcagttgaaggaataagttcagaaagagcttgtgcggcttcctctgatataccatcattcatcacatatagttcttccaggttgtcctgtgatttcaggagctcttcaaatgctctgacacccttctcacctaaagcattatcagagatgttcaagtatctcagtacagcgccttctaaagcttttgagaagatgcgcatcacatcaagggcttcatcctcaggtctgccagcaacaaaatctgatatatccacctctgtgagttgctttttgattgattccagaataggtccagcaacattggcagcaccaataccaaagctcctgttgctgaagcaaatccgtttatatgcatttcctggtttgataagcgggctcaaaagttccttcgcttcatctgcctcaataaacgcacgcttgccaccagatatatcaaatacagaatcagcaggctcaagaggtgtatcagcaacaggtacttctggttccacagtggtccttggccctcttttcagaacttccagcatcaacttgctagtttcctttgcgtacagctggacagcagaactcccatccccatcaggctcctccttgaaatgctcgtctgcagaggcaaagcatacctcttcgatccttttagcattatcatgagcctcttccttgcccaaaaggccgtacttgcgagaaaatatggactctgtggaaaggttcttggtcatcctctccacaagcatgagacgagtgctttcacttggtggccacagtttgatggagaatgtccggggttggaaatcttgcttagtcgaatccatgtgaaaatatggcagtaacagcaacctaaatgacagatgatcaattattaggatgattgcaataatagaacatgaggcaatagctgcaacattttaaaaaaatgcaaatagtgtggaaaactagtacttggagttctatccaccaaagcatagtaccaatgggagtaaacctaaacaatagctagcaaaaagaataataaactctgcactgtaacagcaggaaaaataacaattgttataatagcaggaaaaatagctatcaccaagtgatttctctgaaaattcattcagcagttataggatgagttgctataatagaagatgaggcaatagctgcaaatttaaatagaataatgtaagcagtgttgcatactagcaactgaagttctatccgccaaaacatagtaacaatgggaatacaactaaactagctagctgaaaaaaaaagcctgcactgtaacagcagcagcagcaacaacaactgctcttttagcaggcatcaccaagcgcttcgtcagaagattcatttagcagttataggatcatgatatcagagtttcactgaaagaaaagaatcaaagcgaaaacgtgtgatgctgctattccattatcaatcaggctaaacttgcttatgctactcaccctactacaagcaggggcggatccaacttgggacacgagggttcaattcagttgaaccccaaacttttggggaacaaacaaacaaactgttaattgtattaaggctaaggatctgaaattaagagaagagcttcttccagatctagaagagaagctagggttaacgaacgcaggcaaattccaggcaaaggtaggtcgggggagagagatggatcatcagaaagaggatgcggatgctcaccaggatcccctcccctgttcagccgcgagatggcacgaggagcggaggagacgacgaggagggatttacccgcggcggaggcggaggcggcggcgggggatgcggcgcgctagggtttttggctctttggaattttggttgatgcggcgggcgcggacggggcgaggcgaggcgaggcttatagctcggtgacccgggccgtagccactgaaccgtgggtcccacggcccaacaagtagcgggaggggaacagaaaaaaaaaagtaaattttactccctccgtcgtataatgatgcagcaacctaaaatacgatggatctcatcccgtcctaggttgctatattatggggcggagggggagtatagaactagcgatgcttcgattagactatcacaaaactacagaatcgatacattacaatataatttatcataaaactacatattatagagtttaatctgtcatgttatagctatagatgctatggtttggtgattaaattggcactaaatctatagtttttattacttttgtgatactctgtggtgaatttgtatacctcctcactaccaaaatattgcccatcctaaataccccatccgttccattataaatacaatcgtaagggcatgtttggtacagctccaactcctaaatttaactccaggagttgggtctggagagnagnnnngnannngcntanacccagctccacaactccagttcattttatgagagagctccacccaactccactcccagttttggtggagctgaaactatttggctgagctccagctccaggaggggtgaagctggagctggagctgtgccaaacaggccctaagtttccgcgcctaattttgatcgttcgtctaatttgaaaaaaaatttaattagtattttttttgttgctaatgagatgataaaatatgaatagtactttactcatgacttatgcttttaatttctttcaaaaaatctattatattattaaaggaatagaaaaggaagcctccacgttcgctctcatggcctagaaattctcacattaatcggagaaaaagaaaaagcagagtccatatagaaatacaatttagaaatagctgaaattcggaattaaaaataagaaatattagaagaggagactagagtccatatagaaatacatttagaaatagctgaaattcggaataaaaaaaggaatattagaagaggagactagagtctatatagaaatacatttataaatagctgaaattcggaattaaaaaaaaggaatattagaagaggaaactagggtccatatagaaatacatttagaaatagctgaaattcagaattaaaaaataaggaatattataagaggagactagagtccatatagaaatacaattaggaaataattgaaattcagaattaaaaaataaggaatattagaagaggagactagagtccatataaaaatacaattaggaaataactgaaattcggaatcaaaaataaggaatattagaagtagagtatagagcccatatagaaatacaattaggaaataactgaaattcggaattaaaaataaggaatattagaagtagagtatagagtacatatagaaatacaattagaaaataatataaatttggaattaaaaataaggaatattagaagtagagtatagagtccatataggaatttaaaactaacaaaaatttgaaataaacatgataaaattaaaagtagagtttggagtccatataaaaatacaatttataaataactaaaattcgaaattaagaaaaacatgggaagaagagtttaaggtcaatataggaatacaatttagaagtaactgaaattcaaacttaaaaattaaagaatattgaaagatgagtttagagtgaacatagaaatacaattaaaaataataaaaatttagaaataaaaataaataatattggaaaaagagcatagagtctatatagaaatacaatttataaaaaattcgaaattaaaaaaaaagaaatattaaaagacgagtctagagtccatataggaataaatataatttacaaataactaaaaattgatattaaaaatgattaatgactaacagatatataaaatataatatgaaaattcagaaataaaaataaataatattgaaagaagagcatagagtctatatagaaatacaatttacagaaaattcagaattaaaataaaatattaaaagacgagtgtagagtccatataggaatatatataatttacaaataactaaaatttgatattaaaaataattaataactaacacgtatataaaatataatatgaatattacatattagtggttttgtaaagttattgcaaaatttaaaattatgttgttattttaatatatttgaataatataatgagaaaacatatatgctattatatgagagaaaatataatgatgctagcggcgcaatctgcacgggccaatatgctagtttttaaataaaatggacggtcaaagttaggcgcggaaaaccatggctgcacttaaaatgggacgtaaggaatagcaaacattttaagacgtagttctagagaaatttcacgttaaatatatagttttatatatctctagttttttttataatagttttgtgaaatgtaatcaaaataattcctgaatccatctaactccaacgtcgtctccgatctccccgtccatctccctctccgcctccgccaacgcgaacgcccagaggtgcacgagagcgcgcgcgccgcgccgcgcctcgcctcgctgatccggcaagcaaaccgcggcgccgcgacgcgacgcgaaccccgccgcgccgcgagtgtgggggagcacgaatggtagccggccgcggttaggtaggtgggcgccgcggggtgtcgatagctccggagggtgggggtggggggagcagatccagatccagcgagggcgcgagcaatggcggcgggggcggtgtcggcgctgttcctgctcgacatcaagggccgcgtcctcgtctggcgcgactaccgcggcgacgtctccgcgctccaggccgagcgcttcttcaccaagctcctcgacaaggaggtaatgcaatgccccctccatttcacctagatctgtgcaaatgccgggcttctcgatgagctttttgccctgtgtgatcagagcgacgcggaggtgctctcccccgtcgtccacgatgacgccggcgtctcctacatgttcatccagcacaacaatgtgttcctcctcaccgcgtcccgtcagaactgcaacgccgccagcatactcctcttcctccaccgcgtcgtcgatgtatgggttgctgcccccatcttcacagcaacattctgcgtttgttagtatggacaatgccattggattttgttcatatgatttgtgtgtgtgtgggcgtaggtgttcaagcattacttcgaggagctggaggaggaatcattgagggacaacttcgtcgttgtggtatgtgcgcttgcgtgttacgtgaactgagtactgggtctggttcaatcggaattgccgtgtcactgaaattggagggttgatgtcatttgctgtgtgtgtagtatgagttgcttgatgagatgatggatttcgggtacccacaatacacggaagcaatgatcctgagcgagttcattaaaacggacgcgtacaggatggaggtcactcagaggccgcccatggcagtgacaaatgctgtgtcatggaggagcgaggggattcggtacaagaagaatgaagtctgatacactacacctgtatttttatttttttggttcacatgaacgtgtgatggatttagaaaattatcaacattttgtgctgcaggtgttcttggatgtggtggagagtgtcaatatcctcgttaacagcaatgggcagatagtgaggtctgatgtcatcggtgagctgaaaatgcgaacctttctaaggtagtaactgcatggtcattctcatatcacaaattcacattgtgctgataactcagctgcttcagtaataatttaatgggagttgcagttagagggatgcgaaacactgtttttatatgatgtatccaacccattattgtgaacttctagtttaactgtttatcacatcactgaagcaagttgatattgatgaataaagactattaaattgtgtatacaatattctgccaactatgagtctacgacatatatgttgcaaccatgtcaaataaatgtaggtaatgtaattctcatccagataatagcatcaaacagtacataaaaatgaactttgttgcagtatgtaataatgctctaattggactagtcattgacctgactagtttgtatttcagactatctgttggattgtccaagatatcgttagactatatgtttcccaagtacccagttacgttatgaatgctaagtggactagccattgaactgactagtttgtttttcagacgatctggtagattgtccaaaatatatgttcaacttatgcatcatagctaatatccatctgcttgtacagtggaatgcccgagtgcaaactggggttgaatgatagggttctcttggaggctcaaggccgaacaactaaaggaaaagcaatagatttggacgatatcaaattccatcagtaagatactaacatacagtataactatgatggttctttatcaaatgtaattcatttctattacatcatccatgttacaactctgaattggccaaaccttcgttaggtgtgttcggttggccagatttgagaatgacaggactatatccttcattcctccagatggatcatttgatctgatgacttacagacttagcacccaggtttgtccctgcttgatctttgctgctagtatagcgctaggttatgatctatatttcacctaatctatcttcctctggtccctcccacaggtgaaacctcttatctgggtagaagcacaagtggagaaacattcaagaagtcggatacagatcacagtgaagacaagaagtcagttcaaagaaaggaggtgttattttattttattttcttaaaaaagcgataatgtctctgcatcagtgtcttagttccagacaagttactgttattgttttttctcatttccagcacagcaacaaatgtagaaattgaagtaccagtgcctgaggattcgacaaacccaaatataagaacttcaatgggctctgcggcatatgcacctgagagagatgcgatggtctggaaaataaaatcatttcctggtggcaaggtaagtgctgagttgataccaacttaccactttgcctttcacttttgtgctatgtccatcaactctaatttcctagaatctctccattaggaatatatgtgtagagcagaatttagccttccaagcataacatcagaagatggaatgcctgaaaagaaggctccgatacgtgtgaaatttgagataccgtattttaccgtgtcgggtattcaggtaacataccaaattatgttgcacatctcttaccactatgtttggaacttcctttggtatcctactcctttattgactttgtgcttttgcaggttcgctatctgaaaatcatcgaaaagagtggatatcaggcccttccttgggttcgatacatcacaatggctggtgaatatgagttgagactcatctgattttcacacctctggttgctggaagaaatgattgatttcctggagtccaagcctcccagggggcgtttacagaggcaactcagacgaacattcactcgctggatgggctcccgaggcttcatggttccatctcgcgcaagcgaggaaagctgctgacagccatgttattgattttacccatgttttgctgcaagtttgtcatcagtataggtccccagaatcttcatttcttttctgcgttttgttcccagccgatatctcttgtatcattgtaaaatttatttaatcaactgatgtcacaagcttggatttttttttgtatctcctgtacctaattaacaagcttggatcatgtataccactatgtatatctctcctttccatcatgctttcttgtgtcaagtttgatcatgtcaggttgatgcatgggcatgaacagtgtagcaagatcttagcagcgctacggcaaagcctctgcaccaagggcatgtttggttgctaccctgagtgtatgcctgagtaaaagtggtacttgagacttcaatgaattttttttatgctttttgcctgatgaggcgtccctgagttttctcatttttgtagaaggcctggagccctggactaaacaggattgtcgcgcttgaaattagctccggccactaatttcgagcgcatgagccaggctagtgaaattggcggataagcttaggtcaggcaggtgctttaagcatcatcaggcgtatctctggcatgcatctggtcaggcagatgttactcaggctatgttagagtttgatagcattgctttctcgtatgctcctcggtccagtaattcttgtgctcatgatctggcccagatgagggtgaagggggacccggattggttcggcatatggactgatcccctccccgagtttgtaactcgcctggttgctcgtgacatcactgagccaaccgcgaaataaagttgggaacctgaatataaaaaaaaaaggcccaaatcactgatgtatatgcagccttcgactgtcactcaccgatctgccaagctggcgggtcctaggggtggtttgatttactctcaaactttgctagaggttgtcaatctcatgttagacaagtttgattaagtaaacttcttgttggttcataaccatacctgtggcatgattctctctcagtctcatggtccatatatcgccaactaaaaaaagtatggcactagctaagatgtgtctatttttttactagctatacaatttagataattgtggaaaaaaatggtaattttagtatagcatccaaattccaaacaacaccttttttttttctaccggagcagcatgttgagcggtcaaaaaatattatgtggcatgtaggggagcctatgagcatgtagtgattctatcaatgtctagtgatacttttcatgaatgtcatgtttggttgcctgtatcaagcctggctcgcatccctcatgcagctttgggtcgtttggttgcctacaccagtccatgtgacaagctaaacggataaaaaaacaatgtgttttagttcacgctaaaactgaaaatttggttgaaattggaacgatgtgacggaaaatttagaagtttatgtgtgtaggaaagttttgatgtgatggaaaaattgaaagtttgaagaaatattttgtaactaaacaaggcaaaagttgagcaggaatgcttgatttgagctgtgctgctcgatcatgaccgtacgtgggtaggagatagggccaccaccctaccccttgtccccttcttacttctcctgcaagtgacgaggcaatgaacacgacgatgacgaacccgacggagggcacggtgtacgacacatccaccttgtcgctacacccctcctgttttcagagctccagaaatttactagctcattgactcattgagtcattggttctgaatttctaatgaatgatgaatacaatcatgtccattgaaaatattcttttattaatcaagatgcctaatatatattcacttcattgtataatactccctccatcccataatataaagcatggccaaacttggcataatcttcgacactaatctttgacttataatttctcatatactataaggtttattgtaacaaaattataaccatcttaaagtaaatttaaatgtcaatccaatgatataaattttagtaaaaaaataatttatattataataatcattggtcaaatgtttttaaagttgaattttggaatgtgtgcacgccttatattataggatagagggagtatataacatctttaatttgacttttgaataggcatttcatcattcttcttattcaattcttttaccaataaaatataagtcatgtttttcaatttattatacaaataaaatttaagccatgtataaaataccttaaatgataaaacaatcattaatagtaaataaatgacaattacgtgatagttttaaataaaataattagttaaatatatgtctagaagttaacggacattgtatctttatctttacctacttaaaaaattggtagtgtttttacgtccatcaatccaacggtcatgacctccaacagatccaacaactagatcgctactcctcgactccttcccctcgcttactgcctctgcccccacttcccgagtcagagtcgaagttgatgagtaggaaagaagccatgtcggacatggagagggaaagaggagtgttgatttgttgatggatccgatttcaatcaccctaaacaaaatcagtattaccaaaaaaaagagaggaagagatcgaccgattgatttcttgggctgaggtgatttggacgatatgagtaggggtgcgatgcatggccaacatgcagcaacatgtggcgacaagagagctctcggtcagtgtcggctactttgtgaggaggcggtggaggggaggtctggcaatggcttcctatcttatcgatgaaccttatcgatgttgcatctttacaatgataagctacgtcatgtgattattattattgttgtaaaaacgtgaaataatacgtggtttaatatgtttgccttcactcgttgcaaagtaagatattcttgttagtacgttaaaagaaaagagaagtgcatacgatgtcggtcgttgaattcgccatatatattaatcaccttaaaaattaagatagcatactacatttttgttctccagccttttttttatatttttttttcacaagtgcgagatacgccaccacttctgtgatctgttgatcgatcttacacatatgcatgcgtgcgtacacacataacgcgcggacgcatgcatgagctaggtgtaattttatagttgatcaatcattcatatcgattgatgatcagttggctaattatagcttgagcttggcggcgatggcgagggcgccggtgacgacgcggttgacgttgttcttggtggccttgagcgcgaggctgggctccagctcccgctcctcgtaggcgttgccgcagtcgccggtgaaggtggtcgccgccgacatcttggtgatgaggctcgccttgctgtcgttggcgtcgatgcagcgctgcacctcctgcagcgccgacaccgtgctgtcgtacccttccttgcaggtgtccaggatggactccatcggcgtccccttctccgccgccctcgccgccgcctcgaacctcgccctcgccgccttcgccttcctcatcgacagcttcaccgccgccgtcaggagctccttcggcgagctcacccccggcagcttcctcagcgtgttgcacatcttcttgttacccgcctgcatcaacatcaatagacagactgttcatccatgacatgagcagtaagtaattttctgaccatttctggagcgggagtggattttaatccctcgaggaacatcattccctcattgtttacatgtcactcaaatagttataaaaaaattaaaaaaaattcgagaagatgtattaacatgttatatatcacttcacaaatatccaagttcaaattaaacatctatatttggtttaatttatttttttcgttgcgagatacagaagttgaatttgaacgtgtatgtttgtggggtgatatatcacaggttaacacgtcttcttaatttttttaatttttttataattatttaagtgacatataaatacgagggaccctctcgagcgatcaaaataagcttccatggacaatagtgtcgtcactcaccgcgacatgatcgcaggtccaggcgcactcgtcgacgacggcgccggtgatcttgcggccattgtcgatgatggcaccgagtgggttggtgatcaggttggtcggagcgacgtcgataggtccaacccgggcctcaacgacagcggcagcggcgaaggcggcgacgacgacgacggagatgatgacgaatcgcgccatggtgtaatgtgttattttgctcttcctttctctcttttttttggccgccctcgatggttaaattgagggatataagagagacggccaagaaagagagtagaaagagaggcaaaaggctgagaagctaaaaggtttggtgatggcttggcttctccgacaagctgagtacggtttatataggggagaggtaaaggtaaatgaatggccatggtttctttcaggttgggtggttgcatgccatgggtcatggttattttcagattttggtggttgcataccatgggctctccttggtttcaggctgtcttggctaaacttggtgttgccttttttttttcttttattgtttataagaactttgtacatattttttaaaattaaacttgtaacttattttttttttatgaatgtttcgacaacgccaaaattagcgatgtatgatttgttttctaaaaataaattagatctagccgtataatttgcaccaccatccagctagtttatttatttttttataagagtacagaagggcaacatgtcaaaaatctataccatgatttccgcaatgcttgcccgccataacattttaattaaactagttggcaccatgtgtgcgccttacagtgggattcattagttctatcgtcaaccaaaatcaaagttctaaaggattagatgcaactctatggttgtgttatttaccctatctgcctaactcatctccctcattttccatgtacacgcttcccaaactactaaacagtatgttcttaaaaaaatctatacgaaagttgctttagaaaatcatgttaatgcattttttaaaaaatagttaatacttaattagctatatgctaataaatctttctgttttacgtgcgtgacggatttagttcccaacaccaacaaccgaacgcagcctatgtatatacaaaatactaatgtagcttcatatgtaccttcaatattacaatacaagtattgatatatgaatgttattgttcatatgtaatctagatatcgttgtaattactacaatctcaagtttgatctgaaaatgggtttgggttagtgactcccaataattatatgctatctaattattcataataaaacaaagctcacatcttaaacaataattggaatcgtattaaaaaaagataagttagcattatatttgaggacttaggaaggaaaagcatggtgctatgtgcaaaatgggtaaagattcttgatcgagcgacagttatctttttattaataaatttgaaggcttactacatgttttactctatagaagtaaatgctcctaactaagagtaccaactcctacccctctctcaaagtagagggaaatttgtccatgtaactatatgtgcacaaaatcccagcttttttggaatgcaggattttagaaacacacgaatgtgaaaaaatatgggtgaatagctaatttagtccctcaagttttagcgaaggctcaatttggtccttcacgtttcattttgtccacataggtccttcaaatatttgttttggcttaaaatcatccttgggtccacttaatatgccatatggctatttctagtcaatatttctattagaaaatatcatttttgcccttaatttgtatacatctatatactagaaaagagaaagccaacatgaataaacaacattatagatgtacttcccattatttcaatatgtgcacatgaaacttaagcaatggctatcgtatacacttgttagtgcataattttttttcgttttacataatatactatgtattatctataaaaaattcaagcatgcaatttttctcttatatatgtgaatgatgagggatataagtgtcatttatgaagagagttgttggttcaaggataagtttgaactaaaatgaaagagcaattttacagtccttgaggaggtaccatgaggtaccaaaaatttagtgtaaaatttggtaccccatggtacctcatagtacctaggtaccaagaggtaccaaatttacaatagaaaaaaggtacctcatagtagctcctcaagaaccgtaaaattgcccaaaatgaaaacttgaaagactaatatggatagattgaaacatcaaggactaaaccgaacctcagatgaaacttggaggactactttggctattcacccaaaaaatatagaattacagtagtgtaaatcaggaaaccataagctccaaagtttgtttctcgatttatccgcatcagccaaagtttcaattttaaaaacattaattttgatgttttattttctaatattttaatttatcttttcagcattactagcttttaattgctgataacaaatatgaatgttttactcgcaaattattttttctgctaataagcgctattacctccgttacaaaatatagcaatctagaacggaatgagacccatcctaaaactacgaatctggacatgaggcatgtccatattcatatttctaagatgggtaggttgctacatttcttaatggagtgagtatatcttataattaccgctcaacgcgctaagcacttgaaagaaaaagagtagaagtagcaagatgtacgatgaagcgtgcgtaaatgtagagaaaatgctagtcaatctgaacaacccaatcatcgcctccttgcacgataatctcatcctaacatcgtggccgtccttctcttgttttattaaaagttttttttttacgattacacgatagatacatggtatgtgggttctaaacttttattatcctcacacgttagtacatgtaataatagcgttattatggtaaaggatgtgaacacgtccactacacacgctgacttaacctgccacggtttcaccgatcgtcatcttctcctcccttctcctgcgttccgccgccggcggcggcggcggaggcggggacttgccggcggaggtagtcctccttcccgaggcacgagtccgggacgacgacgccgacgctcttcccgaacgcgtggtggcagtaggcggacgcgttctgcccgccggccatggtgatgttcacgttctccagcgacagcttgctgcacggcgccgcctcgctgcacgcgaacgtcaccgcccgctccgacgccgacgtgccggtgatgtccgtgtagctgatctcccccaccgtcaccgcgcttccgttctgcacaccatccaatccaccccaaaaaactcaatgttcagagatgttaggcaaaatgttcagagatgttgatcttctactatgtgctgatcagatcagatgctgatcatgagctcactgtacctttgatccgcagggaatttcgttgctcgaggagttctgctgatcgatgacgatcgggttcttgacgttcttcataaggatgtcaccgaacttcattttccgggcggtgccgcagccgccctgaagaacaacagcagaagttagctagctaggcagttttgagttcagagttcagtgtaatcttgggtgtttctgacgaagattcatgtgagaagtgggcgttgggtttacggttaacctggaaggtcttgacgcgtacgccgttttcagtgttggaaatgaacagggtgtccatcttgatcttttctaccctgtggtaacttcggttctcgcctaatcctccaatactgacaagcacaaactgttaattagctctgttacgaactgctactataaatggatgtggtcatgtggagtgtgtttgggtggagtcattgtctgaatttagttcaaaatctgatgcaaattccactgaaaagatggagaaaaaaatgctaacctgataccatggccaggtccacatgagatggctcttagacgaacatccgtagaattgcccacaatcgagacacaatcatgaccttaaaaaggcaaaaagaaggggaagaaaatgttctttgtgagcctttttactgtcctgcaaaacatatctgatcaactaatttcaaacgagacatctgtttcagcaacagacatcattcagaaattcagagcaaagctccatttcttcagaagaaaaaaaaatgtgtagtacctgtggagatcgagtcgtccatgatgtgaacattgcgcgagctgacgacgtgaactccggtggtgtccgggctgtcctccggcgaggttatcctcaggtagttggccttgacgtgcgagcaccgggtgaacgtcaggtggctctcctggctgttctgcagcgtgatccccatcacgctgataccctgacaatcctcgaagtgcagcgcctgcaaattaacaccgcgaaaatgcaatccatgcatgaattctccatctttttggtccaaatcctctcgagctagccaagatctctgatcaaattaaagcgaaaatctcacctttggagcagcctgggtagtgcaattctgcagagacaagattgttcagaacttcagaataattcagatatttctgtgttgcaattggcaacatcatggtcatggaggagaccattggttacctcggtcgcgttgtgctttgccttgcacgaccgggcccaccaccggtggccacggccgtcgatgacgcccccgccgctcagcgtcaggtcgctgacgccgacgaagtggagccattcgccgccgccgccgccgccctccggccactcgtcggggctctccggcgcgacgatgttgccggagatctgaggaaccggacgcgattaacgaagtggataaggcacaagaaatggaagaggcggagatagtgtgtggtggtgtgtgcgtacgaagagcttgatctcctccctgcaaggtccggcgagggtgaccggccagacgaggtaggacttggcggcggggacgtggaggaaggtgtggtcgccggtggcgcaggcggcgctccaggcgtccaccaaggcctggacgaggcggcagaaagagtgaagacgccattgtgagctgagctagtgaagctggagtggctagctgctgctcacctgcgtgtcgttggcgacgccgtcgccgacggcgccgaagtcgtcgagcgagaggagagtgcggggctcggcggcctccggcaggaggagcaggagcgcggcggcgaccaccaccacgccggcgagcggcggcggcgccatccttgaactaggtggcatccaagatcagcagcttcgactttctgacaacaagtgtccaagtccacgagatattattttgacgaaaatctgatccacgatttattttttttcttttcttgggagaatcttggatccacaattccacatcaccacgtggacatcgagaaaacacgtgggccgtgggccgtgggccaccgacaccttcgttacgtggggccaatataattgggccatcggcccatcactgctagtagcagaaactccggtaaaattatgtttttttgtatccattttaacttcacataatgccctctaaaaaattcttgacacaaacgtcgtatacagcttacaactctctgtactcatacactctcccaaatacggcaacagtttctacacctacgtgtacggtatttatacttcagcttttttccggtgatcgttgccaggatcgggcattgccggcggcgatcaagaaccgactctggccgccggcgtggcgtcgccgagcatcctgtggggcgccttggcgaggcaggacgccggcacgacggcgccggccgccttcccggacgccctgtggcagaacgccgacgccgcgccgccgcccaccattgtcaggttgacgttcctcagctccagatcccggcacggcacggcgtcgctgcacgccagcttgatcgcctgctccgtcgccgacgtgccccggatgcccgcgaactcgatcttgcgcacctccaccgcctgcgtctgcatccacagagacgaaaaattcccaagtttcagagatgatgaactagtgctctgaacaatggcaaaagttcagagtttcagagatgatacgatgctttgcaggtgaaaatgcagattattacctggtttgcacagggtgttggttggtcacagtagtactgatcgatgatgattggattggagacgttcttcatcacgatgccctcgaacctcaggttgtgagcataccccatccctccctgatcaagcacaaagttgcattttgtcatataattactcctttttctgaatagattgttcttgtcagaaccaagaactgcaagtgttttttcccctcatcagattgttcttgtgagaattcagaagtgtgatgtcctgcaactaacctgccaactcttgatccgtacaccgttggttgtgtttgtcagcaagcaggtgtccaccctcacgttctctattctgtcagtggtccggttcttgcctaagcttccgatactgtcaatcaaacaagtgccacgtgtcagtgacattggcagttccagtaacagaatcctctttagaaacagaaaaatctattgttatactgatcagagatcatgggcaaagactggcatggaatcctggaaagtactgcaacctgatgccatgtccaggcccacatgatatgtccttcactcggacgtcagagcaattgccaaccattgacacgcaatcatctcctgaagaaagtgattaaacagcagattaattaaccaatcatccaaatatcagcggtaatcactgcctgcttcaaacttcaaaggaagcccaagattctgaccaagagcagcaatgtatgacctgatctcttatcaatcaactacattaatttaacaactttcaagtattccttttccaggtcaattattcgattttgggcgccgacttggcggatttgatcttatcttgaataacaaaatgcgaaaaatggaatcagatagctgaattagtttgaccagaagtaggagagacactgacacactgtctcagaaagtcagcatctgaaactgaagattagtccaagcttgcaagcaagtacattccgaattttgtcatggcattggcatgcacagcacactgacctgtggagatgaggttgtccatgatctgggcatgggtggtgtcgttgaggtggatcccgtcggtgttcgggctgctctccggcgccacgacgcggaggaagcttgccttgacgtccgtgcaccgggtgaacatcaggtggaactgcggcccgttctgcatcgtgatcccctgcacgctcacccgcctgcactcctcgaactgcagcgcctgcaattcaatgcaatgcaatcgcagagagaagaatcagtcacggtcgccgccggcgaccgtactccggcggccggaatggaggagcgttcgctctcgctcaccttgggagcagacaccgtgctgcaaggctgcaagaacgcaagaagagcaaacgttcagatgatgctttgatggttaacaatggcgaattggttgttgttgttaccttggtcttcttgcgcttgcaggagcgcgcccaccactcggcgcccatgccgtcgatggtgccgccgccggagacggacaggtcgtcgacgcggaagacgtagagccacttcgtcgggtcgcgccccgcccactcgtcggggctcgccggcgccgcgatcgtcccggaaatctgtcacaaacacaatgcagctcgcgtcatcgaatcgaacagacgaacgccgccgccgccgccggcgcgcggcgcgacacggggcaagcacgtacgtaccatgagcttgagcttcttcttgcagggcccggcgagccgcaccggccagatctggtacgtcttcccggccggcacggcgaggacggccggctccgtcgaggcgcaggcggcgttccaggcgtccaagaaggcctagacacgaaaagacagagtgcaccgtcgtgccagagttctcgccgaccaaaaaaaaaaattgcaccgagctcgaacacctcacctgcgtgtcgttggtaatgccgtcgccgacggcgccgaagtcgtcgagggtgaggagcacgcgcgcctcgccggcgccggagaagaagagaacaccagctgcaacagccatggccgcaacaaccagccgcatcacggacacacgaagaatcgccattgcttcctgcaccaaagaaccgaacaaggagacgacacgacacgattgaaggagaagaagaagaggaagattagaggaagcagggcaacaaaatagcaggacacctagcagctgctactaatagcagcgcatgtgctgccttgtactaactaggttgcttttgcggttgaatcatccatccatggcgatggatagcgagatttaagcatgcaaagcgagggggggggggaattttgcatggccgtctgtggattgggcaattgcacatttgcacaccctgattgcgacttttgctgattgatttggtgactaaaagattccaacttttgtgcttgtgtacgtactttgtgtaggttggtaagtaactgaatgtgatggctaataaatcagctgcataagtcatttcctttgtgctatttattagagatttttttcaaggtaattaaatagacataaaggtagtaagaatttctccaaatgggggaaggaatcagggccatttggtggcaactggcaaggttgcatgcatgacatgaggcatgtagtaataatttatgcactgttatggtaaaatgttaatattatttttttttgcatttcaaacggtagcagagcaagagttgcattccatatttccatgcctgctatgctgcttagctgtttagagctcttgcgtcaaggaactgaaagcgctggaagctgaaagaccgatcggctcttcttcagtttcacctcttatttcactttttcttttctgaagtttataaaacaatgatgaaagcatttacctgttatgacctgacctaaccaaacagctagttacagcgtgaatttactgtaattttgttctgttgtttgtcaactgtctgtaccttttgttctattatctatcaatcagtttgttgctttaaatcctaactaccaaactttgccctctccagaatcccattctgatttgtccttgctaagcattattccactactaatgcaccgattagacacctgcccttttcctccctctgaatcaagtagccacttttctagctctcgttttctcagggacacttttctagctcttgaaaagcatcaaatgataaaaacatccacatgagaacattatcctgcttctggcaccttaaatgagtggctcaagcgaatctaagcactcagttgcttttgtcagataatctaggtgtaggtgacgtcttgcataatttctaatcggagtatttgagatgcatttgtctgattctagttttgatccactgaactcagttaaaaatgttattagtgagctgaagccttcgtttacaatatgagaagcagaagcatcaggtaaagaaaattcagtacgtacttgctactgtacggttttgcatttacagacataaaccaaacacacgctcaaaagtccaccttcaactaccaaacagtgcagtactgttctatgtgctaagaacacagaattatttggccggcatccatcttcatgctgtcaaaatgcatccatcttcatgctgtcaggactgagagtaactctgttactaggaacagaatcatttctgcattgaaaacactagctgataaagagccgcatagatatccagggttggcattgctaaatgctctcctcttttgcgaattatttggccggcaagtttgaacacgatctgtccttgtgcaaatggcaaattctgaacaaaaacgttcagctttctgactcctgaatcttcaaaggaagcagctcaccatcatcgcaggtgccgtgcttcagaagggtgctggaggatgattaatgccacgcgtaacaggaaagaaagaaagaagaaaaagacgaagaaatgccattcattattaatccaaattacagaaaaggccaaacaagtttcagagaattcagaaaacaaaaaagttgattcacaccagctgaggagcaacttgggtagcttcaggtttcagctctccttcgtcagaaagaaaaaatgagtttcagtttcaagcagcacaggcataacgcctgccaaattctgcactagcacatgaggttccaaaaaaaaaaaactatacaaaaagtggaggaaaaggatattgcagagcaatttttttcccagataacacaacatttagcacgtcgttgcatatgaaaaagaaaatctgatatcgtccgaatagattaattacaagaaataagattatcaagctctgcagatgatactccacggacacattcactgttcacatgaaaaatacttaatagttcatagttgcttgcacgtcatagttttctagtgctaatcacctacttgacatgaaacaatttacaagataagcaaagaaactatatgaaaaaataaaaaggctacgaaatggactaatggattggagcatgatccgatcagatggggaattgcatgtatgtacagatgatgagacgatgagtcgctctagctctcgacggatcacgacgacgagtggcgcctagccttggccttgccgccggcgacggcggcggcggcgccgccgccgctcctcccgcccttgccgctgccgccgaagaacctgcagaagccgcacacggcgacgcgcggcgacggcgggtcgagcgccggctggacgcgccccgccgccctgtacccgccgtgcccggccgaccggctgcgctccaccctcgccgccgcgccgccgccgccgccgtccgccggcttgatctccccggacaggtgcctgtcgtcccacacgagccccgacgagcccgaccgccggaacgtctcgctcgaccgctgcagccccgccatggatcgatcgatcgatcacaaaaattcccgaaattcacaggatcagagacccagaagatccgctatatacgaagaaaacacggggggtggttcaccgagaaccgaaagatcgaattcttattggggaggggaagatagtggatgaaaccgatcgatgatgaaaccgaaagggacggcgacgtgtgatgacgatgagcgtaaaaataaaaataattcaaaaaaatataaactaaaaaggaaaaataatggccgccaccggtcacttggctccggagataatctactctgatccggcgatcgatcagctcaactgttccgaggcgaaaaaggagagaaaataatggatttttttttctcatcggcaacgctggttggcgggtgggcaaatggatataaacggtggcggcttggtccaagaacgtggacctactccaccgcaggtagttcattcatatttgaccagaagaacaggcatggatgatttgatcaagctctaatccgttttgggttaggttaaccacgaggttaattcttttttttagttttatagaaaaatgcccgtgcattgcaacgggtgaagactattttaatcttattattgttttacggtttagctaaggtgaaattcaccgtgggaattcgcttgtatattctttttataaaatcatgagccgcaattaggggtctgattgtctcaaattagcatgcaagtttttttaaagagatttcttatacaactccttttgtatttctaaaacgaacaaaattaaaaaccggctcaaatacagatttatatttctaaaaacgattgaatttaaaaatcgattcaaacatggatgacatactaaaagctgacgtttttataatagtagagattctgaccttgtgtgtgtgggaagaattattctagcactagtccactgtagtgtgcagtggagattgggaaaaacggatgtgattcgagcggacgagcaccatccagtgtttgcacacttgcaccgttggtgaacctggagctgcattttgcagctttcatgatggattcgttcggcctaaacaatgattggacgtggatatagggggtgtttgggaagtagggactaaatttagttcctctcacaaaaatataagtccctatgatagggacttatgtttttgtgagatagactacactttagtccctacaaccaaacaccaccctaggtggcgtctaagctttcatgagtagtacggcacggctccgatctggcatcctccgtaacttggacgcgagatgtattgtctcgatcgattttgctttccaattcgatcattaccgggtggcgatgtcaaagaacaggggcaacactggcccatgtgatgcttgaagtgtgaaccttggaactgatagcttctgccggcttccattccaaggtgggacattcagtttcgttcacggaaaagctccaaatacatttccatgccatggcaccaccactgaaacgaatccgtcatctgtcgaaactgcaggtcgacagcatgttgtcgtcactggacaaagaccccattgaataccatggttcaagtacagtggataattgcagatatactgatcataacagaagtctccatgcattgtatacacaaaatactccctccgtcccataatataaaagattttaagtttttacttgcaacgtttgaccactcgtcttatttaattttttttaaaattattatttattttatttgtgacttattttattatctaccgtactttaagtataacttttcgttttttatatttgcaaaacaaatttgaataaaacgaatggtcaaacattgcaatcaaaaacttaaaatctcttatattgtgggacggagggagtacttcctatccagtcaatgtcgcccacttgacactttggcagcaagtgtgcctgagcatttcagcttttggattggtaatagtacatgatctgttccaacagcaaagcaaaaacaagcttcgtctttgcctgcacgggaaatgcattgcatcttaattagcaatagctcaaagaaagcaaccaccccagcacaaactacaagctcatggaataagccctcggaagggaaagggatttggcgcaaattaagcagcagcgcgaggaacagcagtacaaagccaagggaggccgcagtaacttttacaacagcactggtgctgaggagttgaggtatgtacaaagccactgtacacaccttcatacaccggaaaaatggggattgcagatagcaaggggtggaaccgcagctcacgatattcaccatgtcaagtgaacaagattgaaatcaggaagcctttctccggccggtgccgctaggacttctggggctcatttgcttatcctgtgccatcagagaactggtgccactagtcccatgatacatcaagcgacgaggagaatcatttctcatgctctggttctctgcctcaagttgtttagcctcctccattagcatagataactgttcacagaaccaagtagccattagtggcaactccctttaagagcagtgtaataagatgcaggctccactcacccgaagttcattttccttcagacgatcctgaagtacagttatagcagggctcaaactagaatagcagaatgcaagataagttagcagagggctgcacataaataaacatatcagccaattaacagacagagattgtgctactaaccaatattccattaatttgcagagagatgagttgtatgtagatgcatggtgaatagatgtaagtgggtggatcttcccatcactgcaaaagaaccatacaagatgtgcattttaccacataataaacacgtagtactatataaggcaaagtaagtaactttagttaccgaatattttgatgcatggcttgattatatgctgatttttcctcttcgaaaacgacatgttgcatatcacagtaagaagttaatgtggtgtccagctttagcagatgcctggtcggaaatacataaagtggcacctcctttcttacatattctgcaccactattggcaacacattctagttagaagttaatatatgattatattgcaccacactagctaaactgtttggcatgtacaattttgatatataaaaaaagacaataatccaaatacgcccttctggtgtgatatatcatacactatttagaaaatgcagaaaactacagctgttcttttatagtagaacatgcttagaatttagacaagaagtaaaataaagcacagtctattagatagcatcttagggattgccatgctttgctcaggaaaaagaaaaaggacactgccatttggcaaacttaagagaccatagatcagtcatgctacaattggtttgtttcaaaacagaacatatgtgacgtggatatagctccatgagaaagaagtgtcactggaattgtgtttattaaatgtatgtttctagctgatagggacttagagatcctatagaagcaggtgtcacagaaagtaagtcagcctgatcattcaactgacatttctacagcataaaaaggataaatgcattttacgggaataacaagttttcaactataatacctaatgtccatgtttgacctgtgcaacgcctcctggatgcttggggtcatatctgattcatctagatcaacaggggtctcaggtgcattattgggatcgtatgcaactatagcattttctttggattgatgttttgctgagtgattggcgtcaaaatgaggatagaaatccacatcagaagattttgcccacacctagataataagcacaagcacagtaagtttaccaatattaatatacttgcaggaaggcacacagacaaattgtattgcataaatagacatctaaacaaaattatcatctcccattttaacatacatagtatagaaatttccatgcttcacacctgtcgcatcacaataaggaattatcattaaatgatacctaaaagctacgtagattcaacaaagctgtgtaattttcagacaacaattacagtagaggtaaaatgtgtctccaattgatatggatcagtggacagggttgcccaaacaatgtagtgcatgctatctgttaatatctgatgtacattggttcatgtaaaaccatatcaggacatgtataatccatcagaagaattggtcatagtcataaatgtcagcagtcatcctgtggatgttatatatcaggctggtgtatattcaagaatgaaaaagcatctgccagatactactgagcataacaatcataactgttatggggcttggctgatttattggtgtcaatacttaagatacaaaacccatatacaatatctttattacataatgtttatcacttataagagacagtatcatatcccaatgtaaaatcagatggatattttatgactacaaatatatatcatgagcttatttcagtttgttttcaaaatgttctacatcatgtcatgatgttcatacctaaaaaagaatagaaattctatgttttccattgacaagtgatcgcttttagaattgccatcaacgaacataagttacacagaataccatcggtgtcagttgaccattagtttaactccattaaccctgtgcaaacagtccattttacccctagaatatactccctccatctcaagatatagctacttttggaattcaaattttgtctcaaaatataggtacttctccacctaccccctcacattgaccaatcaaaaccatcccccattcaatctctccacctcatttcaaccaatcacaatcatcccctattcaattccacctactttcttaatattcccgcaaaaacctgaaggtagcaatattttgagatggatggagtccaaagggtaaaatggactttttgtatggggttcatggatgtcaactaacggtgatggcaatagggaaggaaatctcttgtgcgatggtatttcatagaactcacgttcgtcgatggcaattcgtaggattgatcacttgtcaatgacaaaacatagaatttctcaaaaaatcaaactaggttgctattaataaatggcaaagcccaaatggatttggatctttgcacatttcctatttagctaactgtttcatctttattcattcattaattagatgttttatttaatccaaaaaatgtaacaatgccacttaggtatccttgcatactatgctatgacagtgcaacgactaacattgccacatgatcaggtagttgtagaacattgctagtgtggtttaaatgttgcccatcaaaagggaaggcatgggaggcttctagaaggacacatatcactgctatgtaagagaaaaggtcattcttggtctatatatattgcccaaacagatggaactgttaagtttcataaacataatttctatagcgccacaaagagccagatctaaaatccacttttcactcttattgcttacttttttagtacagaaattgcggttgtggaatcctatcttagagaccagccctatattttcttaataaaattgaaaagaaatttcatgacatgagagtacaacgaatacaagaataaaccttgctatttcttgaagatttagaatcccccgtgtcttgttcaatgccttcaatcaatgccggatgtgaggtatcatccaacgaactccaagatgattcaaggttaatgactggatcattaacaggaacaacagattgctgatttccaccaagtgactgaaaagcaatcacttggatttttccaacctgtgggaaccaaaaaagaaatcaattcagcagggctaattaaatgtcatgggtgccccaaactagaagtaaacatgatgtgcatatgaagtacaagaatcataccttttgagcatcttcgctaaaacaagagaatatcagacccacaaaacctggctccatcaactgaaacattgcctgggtccgaacatctgcagtatatgactcatgtaagtcagatataacaagcaaagtccagccctcactgcaaacgggcagcatctcataagagacaaataaagcataaaagcagatgcactagcgaattccctagatctacattgtcatcgtcaatttgtcctgatatggaccctctactgccttcgtactcagggaagtataagttggtgccataacggaaaaaatggagtaaacccacatgcctaaatatagcattcccaaatacaaaaaaagcatacattaccaccaacaaaaaggaaatgggctctagcataattaacattcgttttccaaacatcagataggataacgaaaggtttcacatcacttcaaattcaaaatggcattagtacaataacacaattgcaatcaaatttcaaaaccgtgcaaagttccatatcatctcacgacatcacaaatacggaatgcgacaaagtactgcacaccaagggggttatcagaaggcgctccagccttagtgaagcacagcaaattggaggtaacttgaaccacctacctacatgggaaggcagaacggtgatatgcgggtgcgagtggtaccatccaatcaccctcgttttctcgccgatggtggccgacaagctgtgcgaacagagttaagtccaactccaactcccgaaaccccaacattaggcttctcaacacaaaaccaaacacacaaaatcacagaaatggaggggaaaaaggatatctcggcctgcgccgtcgccgccgcgagcagctcggggttgacctccaccctgtccttcttccgctcgcacctcatctgcggcgacgccccccatatcagagcagtcaccccgcccctgctcgaatgctgcgaagcaggcaaaaaaccaccatgatctcaacaccagcaagcgccacgcattcgcgctggaggaggagcaggagaacggggagagaggagaagcaggtgaccttgatgtcgccgaagaggaggcccatgacctcctccgtctcggtggtgagggcgtgggagaggcaggtgagccacacctcctccccgatcctgacctccgtcagcgacatctcctccgcccgccggcctcctgccgccgccgccgccgccgatccggtggggtttcgggccgcggcggaggaggggttgggtttggtttggtttgcctcttcgatttggcttgtagcgctgcgcctctttgaagctcggtttttttttttccttttctttttctttctcgtgcgaaatgggctctctcgctcgcctctcggtcggatgacggctgcgccgctggctccctggccttctgttacgtgtttcgctgcaaagtggggccctggtctgatgtagccggcagatactgcaggtggggcctacctcaaagtagattttgctacggcttgtttggtaactcgacgtaaagggattaggagtttacacaagggaattaatgatgagattaagatgggaatttgatttttaatcccaatatcttgtttgacaggggagatggaaattgatagggagtttagttggagattaggtcattaataaaaacatatgtctgatatttgcttagacaaaataaaggaggaattccctcctaattacctgcccctacccagttattgaaaatgaggtagttcctttctcaattccccatccctatcccaccaaaattttcatgtctcccaaccaaataaaacacttaatagcccatccctctaaactcccaatccctccttaaaaactcactccaaccaaacgggccgctatagtcgtgacacttcgatttggcacgtcagcagcaatcccgcttattaggccccacccctatgttggagaaggctaatccacgaccagttccccactgtgagcctgcctgtttaggtctttaggggagtttaagattttgagaaactattgttgaaaaactaacttgtgggaatctgaagaagctagaaaacctagtttctcgcttttttttctcgcttctagttcatttttcagattttataactacaaattctcaaaatttgggaaccttgagaatttaggtaaaaaactggactgtttgagagagctgttagcacctaaaaattttaggagaagctgcaggcgctaagttcgtttggagaagttcccgacctttccctatgcacaaacaacggaagttcaggcccaaactacatgggccacacgtcagcagcgatcccgttacggcctagtacatatgggcctcacatgagccgcaatcccgttacagcccaatatatatggaccggaatccccgttccaggcccgactgagaagagctgcaagtgtgttacggcccaattaaccgatgcaccgttgtggtcgtggcagtgccaagcgtggtgaagtgctggcttgctctcggccgtccatggtcgatccaacggctgactaggggaatcacctgatccccttaggagggcctcatcgtttggcttttttttttaataagccaaaacggtttattagagaataaaaataaatttgttggttaaacttttatatatgttctcgttgacttaaataccaatgctgaaaaaaatacattaaaaatatctcaaaatcaatgttacaatgtcaaaattaagtttgaaattttaaattttagctttctcttaaaatttaaattttaaattttagctttttcgttggcttaataaatagggcatctagggcatccgatgagagcctcttatggtcgagtgtataaaaatatgaatgatccaaagtattttttaaaaaaattctgtgatcacgagtacaagggaagatgatacggtgaatgtaaacacatcgaaatgataaaccacaaatgcgggctttaggcccaaacttttattattgttacgccataataaacagaacacagacgagaaactctgacgaaaacaactgaacatcatcagtacacatcacccacacccgtcagaaatcctcccctgcgacgaccaccacttcatacagcatcgatacagactcaaaacgacacaaaaacaaattcaaacttgcaccgaatttgaagtgaaaacatacataaatagacccaaagggaaatcattcacggcgtctagtgatccctcgccgtcgtctccgtggcggcggcggtggcagaggtgtccttgttggcgccgtcgtcggtgccggcctcgtcttcggtcatccccagcgtgctcatcaccgcgtccttggcgccgaccaccgtgctcttcacctgctcactcgcctgaaacacaaacaattctcctcaagatccacaacaatggtgttcgacgaggagaaactaatcaaagagcaattttacagtgcttaagaaggtactactttttctattgtaaatttaataactggtaccgtatttttttatctcacggtacctctgctccccgcaaaaaaaaaaaaaaaggaggtagaattgcttttaatcctgtgtgtacctgttggaggacgctgccggtcttgtccttgccggcgatggcagagtccttggtgtactgcgccgtctcggcggtcttctgcttggcggcgccagcggtctcggcggccttctgcttggcctgctcggtcttctcgccgaggaagccgccggtctggtccttgctctcggcggctttgtccctcgccgcctgcgacgtgctggaggtcttgtccttcgccgcctgcgccgtctccgacgccctctccttcgccgcctgcgccttctccttcgtcgcctccttggtatcctgccccttgccggcggcgtgccccgccgcctccgacgccctgtccttcgcctcgctcgccttgtccttgctcgcccccatcacctgccccgccttctcctgcacaccaagaacaatcaagtgatcaacaaattaactggaagctcgccggagctggagaagatggccggccggtggtggctgacgctgacctcggtgtgggccttggtctcgccggcgcggtagctagcctggtcctggtgggaagccattgatcctaagcttcaaaaattaacctcgaaattcacgcgcgaatgttagaactctgatggattttgctcgattatcttgatcgatcagatttgcactggctgtggcgatgggattggaatggaacagtatttataagggttggcatcgagacatcctccgggacacgtagcatggcgagacgcctacacgatggccacgtagaaaggacacgcgttgtgtaaggttccgtaccttcgcgaagccctctcatgcgatccatccatccatccatcgatgcaagctaaaagccaaacaggagaggactactatagtatactgttgctactaaacaagtgtatttatgagcggctgagagctcaggcacgtgccgatctctcgacacgtgggcacagcgagttgaaactgatcatgatcagatcgatcagtgtgtcgatacaggcgatcgaaacgtcgatcgatcggtggctgtttggcgagtacaagttggatgcggctttagtttttacacttggtgatcgatcgggtgtcgttgccatgtgcggcgcctgatgtcgccgatcaacgtgttcaggtctgattgtaaatggtgttgttgttaatttggatgcctgatgtgttctgctacctttcgcttttgagtgtacttctgccacaaaagtttggagtgtgtagtaaccactttggcggcaaagggagtaaacaatgttaaggggacacatgttaggaaggtctcgcactcaaatgagtaggcacagaagcttcgggagatgcatggcattgttaacgattgttatcattacatgggtggcagatgtttgcggtttaattacgagtatctgctcatcttttcgagatcgagagaaaaagagaaagacaaggtcaatcatggggaatggatgccatgggctcaccatgggccagtaattcggcctgacgctgtgacgaagtgggcttctcaaaccaaaattactgggccaaattcagcctggccctgacctcaaaccatgggctgggccttgccgattaactcaagtcgatcaccacagatcaacaaaggatgagtggtgtgtcaccgtacgatgacacattgagcggccattattgatcgcacacaagcatcctttggtcatagtggcaatcctgacctgcactgcactgcacacaccggctaggctacatcgatcgtcgccgtcgcagcgtagcacgcactaacccatgcagatgcaggatgggcacgcactgtgccatccatcgtgctagggctaggcgtaggttatggaggccctttcgtgctgctagcctcggtgcagcatcgaccatacgtacatattgtggcatcggtacacgcgcgtatctcacctgacacgtccaacttcggggctcatgggtaagccccataggtcggtcagtcggtgcgccgtagtgctccctcctccctaaatataagggattttggttagatatgataaatcctaatacgataaatctagatatgaaatatatcacatcaaaccaaaatctcttatatttagggacatagggaatacttactttgcacgagtgcgattaaaactagggtgaatagttaatatggtccttgaagtttcgttttgagctcagtttagttcttgagatttcaaatcgtccaaacaagtcctctaaattaatcatttgggttaatatagtccttagaccaaaaaaaatgccacgtgagcatgccaagtcatcctcaatgaaatgactattctaccattatataccatatagaaaagaaagaaaagacaaacaggaaaaataaacaggccagcccatgcccaatattattgcggagggtggccgacaaaagaatttatacgatcagtgcttggttgtagcaatcataagtgacaattgtaaaacgatcatacacgcgtgaaaacatttgttttctttttttattcttttctatatggtatataagggtagaatggtcatttcattcatatcgctgcatgtgaggatgacttgatatgctcacatggcactttttgtgagtccaagaactacattaacccaaatgtttaatttagaggacttgtttcgatgatttgaaatttcaagtactaaactgaacccgaaacaaaacttcagggaccatattagctattcacccttaaaactataaattccttaccactgcactattaagtgcatctgatattctgataagtgacgtaactacaacctacacaaagttagaggattgtattttctggctggctaccttacgtacgttgcacttgtagtcggtagtccccttccatttgggtcgacgactagcaccatagcatcgattctaggtactgctatacagatacaacgtaggagtactgctatacagatacaatgcatgcaactatatatgttttacgttggcctgccatgtgtaagtgcaactgcaaccaacaggaccagctccactatagaaagcactatgtagacgaagacacttatattatagatgatgaaaatataatggtggcgaaaatttcaggccgttttttattttatctatataaaaaagtaacttttacaatttctatcacagacgtatggcagtcatcattaaatagttaaattgacaaaataaaaaatccttgaccgactgactatcatttctatagagatgatattgatacaaactgttttcatacatatatgaactgcgtccatctttgaacctctcataatatataacagagggaatatgatattaaataaatacacattttaatatatctgaagggaaagtattctaaaccctcaagggatgtcctctcgtcttttgcatatcacctaaatagttattaaaaaaataaaagcttggcgagatacactaaaatgtgatatgtcatttcacaaatatgtgagtttaaatggcttcttacaagttgtaacaaaaaaaataactataaatatacacgtacaggtaagagtttaatttgtctttttttgttacaactcgtagaacatatttaaacttgtatatttgtggagtgacatatcacacacacacacacacacacacacacacacacacacacacacacacacacacacacacacacacacacacacacacacacacacacacacacacacacacacacacacacacacacacacacatatatatatatatatatatatatatatatatatctaagttactatttttttacaactattttcatgacatgcaagagacaaggggtaatcaccttgaaagttagaatcctcttttcatggtgaattcgaatgaaaataatttagtgatgtactatgtgaaagggcatgtagcctagtggttgcagtgacctaagtaacaccacatggtcctaagttcaaatcttcataagagcgaatttcagatagagttatttgagggctaagttcctaatttaaaaaggctgcatatatccggttggatgtagaggccaagtaaaaaaaatacccttctctaaaaaaataattttcttttagctaaaacagtactctacaatctacattctaaaacgttgaatttgtggaaaactgcctaactattatcagcaaatttccatacaactgatcagcgatcagcgatgacctgcagcaaaacagggtatagtggacttacactcgccaccagcagcgttcaccaccgaaagcctggttgtactcgtacttgccatgatccaaagaccttagaagaatgctgatacctgatagctacccaatgctagctatcagattcccccatatatagcgctcccactagaatgtgcattgtgcaaacgacagtacactacactacaccttacaagacagcaacaagcacgaacttaaactgccccttaattaattgcagctaattaatcaccagttctctgaaagaagttagctcaagattaatcctgtcagtattactctttactcttttcgtcctaggttagtgaaaaagttgagcacttgcataagcaataagtggctaagtgacttcttcttctggtagtagtttctgaagatcgagtcgatctggtatctttctgcaggtaaatcatgcaaatgcatgtatgatagttgaccctgcatttgggccggctaggtagcgcatacatgtggattgtggagttgtggacttcgctatcatcgctatctcgtagagcaaaatcattgttggtatgcaccattgcaccattgacaaaaggctgctgctgttcacttgtcctttccagctgtagatcatgcaaattcatcggatggccatcggtagtatataagcaagggcaatggcactgcagctcctcaaccaacagtgcagtcacactctcgcacactatctgcataagaaggggataagctacctgattcatgccatcagtttcagttgcatccagcatgagcaagctcaagttcttggtcactgtcgtcctcgtgatcctgctactgttcgattcatcgtcttcaggcatgttgtttatcatgttcttgttcttttgtgtgttggtctgtcgggctgtgtaatactgatcagtgattttttttcttttttgcttggtccgtaactgattaatggacagttttaatttatctgtcgtctaaatgcagggcaagctgagacagcatataccaattatgaagtgacttctaaagtgaaagaggtatgtacttaattatccatcaatctttgtagtgaccatcagagagatgttagggtaatatatatttcagatctatcttggtgcttttcacgattccggtcttaatcaataactccgtatgctagctgactttaatttttgaaggacccaacatgattcatgacagctgacttagtattaacgagaagaaaactgtataacttgccctgttgtgcatgctaaatgtgcagaggcgtgttagctgataaaaaaaatgactctgaaactatctaatgttcgctgataaatacatgtgctggctgctgttggacacaataatcatcagaactgtgctatgatcagtgatgttttctttacagaaactacagttttcagtcaagtatgtatgtactaattaagtttcatatgtccttaccacctcagagaattcagaaacatagcaggagggttctgacagatgttcaggactatgactatggaggacccaaccctagacatgaaccacgtaagaagcctggaaatggacactaatcgcctcttctccacactgaaaccttgacaaagataagtcagatactcagatgatcccaaatgctacaatcaccagaccactatcttactgtaatgtactagaattaagcagaactgttaggtactattgtgtcgttaattaccttgtaatatgttggtcaggtgcatggagttcaggtcattttagacagtacctgcgtgtattcaggtgtgtgcttatataactagcaactggtaaaatacaactactgaggacattttgtaagttgagacttcagatatgtgagctatcttgtttgcaaatcttcggttgtgttttgaataaaacgagcattttggctccgtataaagtttgaatgttcagagtactcgtcaagttgagagcgttgctcgtaaaattcagttaagctgtatgtattaccctccacagccagcgaagatgtaagaatatcagtagcaaaaaatctgaaacacatcttctctcttaacaaatgtgcccttcttatatctgataaaaaaacaagataatatttcacgtgtaacagacatccttagctgctgaattcagaaccgagcagtcatactcatctgcagtagttcagcagcagcagatcctctcgtcctcttctgaaacacaaaacagacaagcttctctcgttactccaccctacaccatccatttatttcttcattcacctcgtcattaggaagccatgcaatcctaactagtttagaccaattcatacatccaaagaaaacgctccaatatatataatatattcaggaagcatcttagtacttgcgacaaactctgaagactgttagctaggtctgaatctatttgatggcgtgctgaattttgcctgtctcttgatttttcatttttgcataaatccgtcattacacacaaggcaatcatcatcaccatactaggacaagtttctatccgttctcgttcttatccgtgatcgaagcagtcgtgcagcaattgactctgcttccagaagttcagatacctgaactctcgagaatgaacagtgctgcatctgtgagcttctttaccctcgcagataggaaatcacaactgcacacaaaagagggtagcaacacctgcagaaaacacatgaagatgaagggggggaaaatggcaactgtatcgttgccttgtagtgcagcaatgctactagttttttttttttttttggaaagatttctaatcaatctctagaagcgttgttcggtcagaaacttcaactgccaaacagtagtttattaatgatttctggtgtttattggctatagaaattatgagcaacggcctcaaattgggacttctaattttgttcagcagagacacacaaagtcatggtcaaaggagatggcttgcagtacttggtcgttcattaagcacatgatgttgagataattacccggacttggactaggctcctaaagcacacctgctctttatgattaaagatgaattaagtactactagtatagtattagctatcggttactagtaatactattttggttagctcattttactattaggaaagcaattaagtacacatcgctttagactccatcaagctcttcaagcaccttgtgatgattcatgcacaaggctcttaatggagatattgccaaattgctacgaaaacaagaggctttccaccgtccacgtccctgaaaaaataatagtgaaaattgatctgtcggccatttctcgtttttctttttcctacgcaagacgtttcctgattggatatctcatcctcgtctcatccgtcgtcgttgtgctggaaggaacaatctgcatgtagtagctttgacacctcatgaggcaaaatataaccggtggatcacaattttctggcaaaaggataaactatttttgtttgataaaattaaagccacaattttctaactcaagataaacaacaaatggtggtttgcattgtgctataagctagacaagcatacgcttttttatttcagatggtggtttgcattggtctattctccaacaactccatgtttttggtggcggcaggtcagctcatccttttcctcatgttgcgtaactgcatagcttcatccacaaatatgctccgtacctgaggtttggaggatggcaagaacattcatcgcaaacatggttcggattcgctgtaattttgcaaacctgtggttttgcctgacaaaatctgacacatttttcgacgcgatcgatcccggcaagttgaatcgttctcttcgtataggcatatgagttcagattccttccttgccaaccctgaaaccggaggagatcgaatctctcaaatctgaacgtgcaaccgttgcagtaacagcgtacgcaagagagagatccccttggagaagacacacgattcagctcaccagttggtggttgacatgaaccgctgatgcagagatcactccacacgcgaaacacaagcgactctgactgacgtacacacggcgatgcgatgcaagtgcatcttaagaaataccgcctcaatttcgaaatgcacgacactacttacttttcgcataatattacactattcatcttattaatttttttaaaatacataaaagtataagttaagattatattttctttggtaataaaacaagttcaaataaaataaataatactccctccgtttttaatatatgatgtcattgaatattttagatacgtttgatcattcgttttattaaaaaaaataattatcatttattttattgtgacttgatttatcataaaatatttttatacatgtaatttttttgaataagacaaatgattaaatatttaaaaaaagttaatggtatttcctccgtttcacaatgtaactcattctagcatttttcatatttatattgatattaatgaatatatatatatatatatatatatatatatatatatatatatatatatattgcgcgagagaaagagagaggattctggtagcatcagcgagacgtgagcatgcatggcactagcggggagggagcggcacagcgcggcgcggggtcccagctgagggcgcagcggacgacagggacggtgcgcgctggggcgagggggcggtggcggcgagtggtggacggcgacgcccaacccgatcgccacagcctcgtcagcgcacacgcgcttcacatgaatttttatgtcgcgcccgcggcccgcccagccaccgcaccgcatcactgagcccgaggcaaggagcagccgctgccggccacacgtggaaagaaataggtgataagagcaaaattaattggatagccaactacttgctctaattcatctatagccaatttaataattcatttatataatagttacatactatactattaatacctggtcccgcctgttatacacatactgtgtcttagagtccgtgctatagccgactacaaatttgtagcccgttgctcttctctcttcttatttatctccttaaaatatgtttgcagctggtttatagcctgttattgtacctgctctaatcctcctgagtggttgggaatttgggtttgtttggtttagtgtggtatattttgaagggtagtattttaagtgggtgtgtttagattatcaaaatttatgttatggtggagaaaattttagaatggtgccaaattaaccataggcattaccattcacttggctctaaactaaaccattacatttactactccatccgtcccattttaaatgcaaccattagtttctgtgcccatctttgatcgtcctgtcttatttgaattttttttataattagtatttttgttgttataagatgataaaacatgaataatattttatgcgtgacttatgttctatttttttaaaaaaaaatttcaaataagacggacgatcaaagttgggtacggaaaatcatgggtacacttataatgagacggagagagcactattaaaaaaaaagggttgttcaaattgtagccaaaataagacttaccaaatttttacattttggcaatattgtcaaattttgtatttcttatatatttaacaaagtttggtaaaaaaaaataaatggatgcaattttttagaattttactaaaaattagtatatgatttaaaatgacattaatctgaacaacctctaaagaaaatggtaagacataatttgacaacaatccaaaataacattttttttcctttgaattgacaatctttttcaccggtccggtgattatcttccaatggttactccttgacttattacttcttagaatttactgtgggctaagatgttgtggatattttagctaattttctgtggaaggtgaaaaagggccggtctttgtcattgctttgtcatctgaggacgaagaaaattgtatccgtttggactgcttttgataactaaaaaaggcgaactttcttttctcagcaggggacagaggtgataaaaaaaatcgaagaacaactccacttggagtgataatgaaactgatcttcatataagaatatgaaccttttcttttcaagtaaaacatgaactgaacttgtttcaacttcatgcagctcagctctacagtaaatcaaacagtaatcacactccaaacaaaaacaaagtgtttcttgggtgcccatctcaaaacaaaatgaacgtctatcgccgggccgaaacaaaatcaactttggaacgagcaacttcgcagatcctaccagtttactccagcttcttaacttcttgatactgactcacaatctgttcgaacaaactctctgtcctccaaacgtggtccaaaaccaaatgccctccttttctcctgatcaagtattccaaccaacacgatcaaggaaaacctcataaaaatgcaagctttctcctcttccttcaattaaaaacgcacaaactttctccaggtcagtacgtaagccacttgatccatccaatcaatctccagtagtattgtactaatctctcacactattacaggcttacagcacggtcctgaaactccgaaattcgccgaaaattctggacctcaagctcacgactctcaagtactccgaattatctcatccttcttctccctcctcccgtccgcgccgcgacgatgcgagcgcaaccacgtttgactcagccgacggcgaccggccgcgtagtacgcgtgtcatcgtcgagctcgagcccatccatccacgtgttcctcctccttcctcgcggcgacgccgacgacggctataaataacccgcgcccccatcccgaccaccgctcctccgcctccgcctctcatatttttcccatttttcacctgccttaattcgccctcctcccataaccgtagtagtaatcgtactcctccattctcgccggaatccagagcgaagctgtaggaaattgttgggaggaggagcaatgccttactgcgaggtggacaggtaccagaacggcgacgagtgggacggcgtccgcctcttctaccgccgcttcggccgcggcgccaccaaggtgctcctcgtcatcggtatgtccgtacgccgtcgatgaacccatcgcctttgccggcgatcgaaaattttctgcgttttttttttgcctttttgttttcttggttctgatttgagaaatggtgggtgtggttgggggcgtgaaggattggcggggacgcacgactcgtggggcccgcagatcaaggggctgaccgggtcgctggagccggccgccgacgacgaggagtccggcgacgccgcggcggcggagggggacgacggcgatggcatcgaggtctgctgcttcgacaaccgcggcgtcggccggagctccgtgctcccgcacaaatcctactactcgtgagtttctctacttcctcctctcatcgtcgtcttctagatccaaatctccaccttgtctcatgatcgaggaggcaaaatcgttcgtcgtgaggtgtagaagcatcgcgcccaatcttgagagagatctggaggagggtaaagattggcgtctcatgtagctttcgatgagaataaatccacgttctactcgattccagccgcgattgctttccacgagaaaatatgtgacggagaggaaaaggacggagatataattttcctcgaacgcacgacgcggctgtgcgggaaaagtcagacgagtggcggcaatggcggtgtactggtgttagttactgtctgaccatgtgaatgtttccattgtcttgacaggacggtgatcatggcgagggacgctctggccttgatggaccatctggggtggaagaaagctcatgtattcggccattccatgggtgagttcatgagtctccatctctgcgacgctgaatgatgatcatcagaattttggcggattgacttcttttgaggggaattgtgtagtaagtaggagtttctgtaagcattgccattgatgttgggtggtctttgcaacacaggcgcgatgatatcctgcaagctggcagccatggcgccgcacaggatttgctcgttggcgttgcttaatgttactggaggtggcttccagtgcttcccgaaggtaccggaatggagaattctgcttgtttatacctggaattttgcagaccttgcaggactgtcgactctaatttcctctgtagttctcatcaatgaagcttgtctgcatttgcagttagatgggcagatgctctcgcttgcattccgtttcttaagggcaagaactccagaagaaagagctctggtagatttggaaacccattatacaaaggtgaaaatgcatccatttgtcatatgccaattgatgtaatttttttcccttgacattttgagtgttaacatccaatgcaccatgctgcgatgcaggaatatcttgatgagaaagttggatcatgcacgaggagaacaatcctctatcaagtgagtttaaaagtgtttgttgttgatggtgtatcacctagatttaaatcttcatcataacttatgtagcaccaaagtccaaaattgtgggaggaggagcttcccaggatttaattttgggaggtggtgagtactaaggagaacagtatgttgttcagctggcaggagctgcaaggagcaagccgctggccagggtttgatccttggtactcattacctcccgacattaaattctgggcaggattaagtccaaaattgatttggacaaaattagttgcgtgtacacatagaatgattcctctatgtctgttcttttgaactgtataaactgtaaagtattacagtcacaagatcacagcattacaactaggcctttgtaccggaaaaaaaaacaaagctttacttatttcattgatgtaccaaatttcaattattctgtactatgtattttcaggaatatgtgaagggcatatcatcgacagggatgcagtctaactgtgggtttgaaggtcaagttaatgcatgctggactcacaatatgacaactaaagaactagatacaattcggtctgccggttttctagtttcagttattcatgggaggttagtggcgacttgagaaaagcacacatcccttccccacagttcgcaagcacactgtgtgtttgtttctcatcacttggtttaaaaatgatgcaggtctgacattattgcgcaattatgtcatgcgagacgacttgcagaaaggcttattcctgttgctagaatggtcgaacttcatggtgcgcatctagtaagccatgaaagaccagaggaggtaagcatggactttgacaaaatgctatattgttaggcagctgaaattatgctggaatgctgaaaatattcctaaatagctgaccgagcgaggcaatattagaaatcatggttccctgcaagcatcaaactctaacatagatgcactaatgggcatgtaacttttgagcccaaacttggaagaatgcttttgcttataccagttagaacgttactagatgcttgtgctgttgcaacttgcacaaattcttccaaagttgccaaaccgaactaaaggcaggccgttctctgaaagcatcattcaccacctaaactgtacaagggaagatgctacttttgaagaaaattgtttggccaactctgaaactgctttttaggcaccaatgaaatggttatcccaaacctgagatggaatcataaacatgtaacttacagagttattttaaggcttataccttctccaaatcgctgttcttttctctcattatttcatcacgcttacagagttgcaggaaattgtaagttgactcatctgagtatttctctattgcaggtcaacaatgcactaatggaattaataaaagccacaaaatctatgatgaaacctgaggaatggtcatcccagccagagaattcatcaggtgagcttagaaaggccaaacacccccgaaatctctttcgaaggctatgttccaaggcacacttcttacgctacgtctttatcagaaaccggggctcttatttctgcaagacctgtttccgtcacaatacgaacagatgatgggggaaatgccgcaatagcagtctataacttacttgccaagctgcaactaagctttctttatgtcataggagtgatactgatggggtttgagcatatgaggaacattgtaaaagtaatgaagccagtaagggtcgcagcaatcgaatcataaggtaggtttcaagaactacatcaaaataccatccagagtgtttctgaaattgtagcaaacacttaaccgagctatgttgctttaatctgcagaaacaaaactcatgtaaattactctcagagccgtcgaggagacctggtattttcatgtctcctcagtactgtggagatgatggttttagaatagcatctccgaagacttcctgagaaaacttctgctctaagcagaataagtgaacaatacggaagaaaattgatgaggtatttggtgcgcgccttggacagaagcgtcccagggcagaaatgcacaaactgatgtacccgtatgagtgtaaatgttgttaccgtatcacggccttatgctgtcgccattcttttgtatcagcatgaaatgtgattattcccatcaataataaacctggttccctgcatgatatatgtatgtaattataagtaacagtaatatgtgtaaacgcccactgaacgacacaaaaagctataaaagagtgcataaatcgtatcataattaactggtctaacaaaacaagaacagtaaccttttcattcattgccaattcacccgatcggtctggcaaacaatctgtatatgaaaaggtttggactaacttgttcctgatccctctttggaacacaaggattggtggatctccttgtctatgattaagcccaaagagcctaaagttaccaaatcttcacaatgtgcaacgtatggctggagagaaacatcttccaggttacataaaagcatgtcggcgaatcaggtggcttttatctgattttcgaaaggatggaccagcaaaaattcatttttgaacctccctaagctgtaatctgaattttttttgtacttctgattatcttcttaacttcaaaggactacgggcctgtttggtttggggactaaagttaccatgcctaaagtaagccgcacttgtggcggagaaaaagaacgccacagatctggcaaaaaaaaaaagacacagcgaacttgcagaaacatgcctatcaagttagggcaagcctatggttagtagaaaagcaaataccaacctaagtacttgctgcaggtctaagcttaggtttggcaaaacgtggccaagaaccaaacagaccctacgtcgtgtaaaagctctgctatggacccttctacaaatttcggcagagcttttgccgccttaccgtttcaaaaaaccaaaaacaagataaaactagaacaggaacttcgcaaatttgtaaactcgatgcaaaatccatgttcattagttagcaatattgtgacgccaaggttgtcaaccggaatctcaaggcaaatttctacgaaaagcccctcatcaccatccagaccacatgtacccaatcggacggctcgtacttttcaatcgctacacgaactgatctgaccaggataataaaaacagtccctttattatttgtatgccatttaaatgattatgaaaaaattaaaaaaatcaacgagataaattaatatatgataaataactttacaacatcaaatttaacttctacaagttacaacgaaaataataaatttaactatgaatatatatattaactagccatagtttaatttgttttttattacaactagtagaaattgaattttaacttacatgttgatagagtgatctatcacatattaatccatcttgttaaatttattatcattctttttataataatttaaatgacatgcaaacatcgagggattagaattcactctccatatagtagtataaagggtttatactctaaacgtacctctaaaatctcaactgttcccaatctgaaccgcgcgtatccgatcggacggtgtaggtgacctcgccgccgctgccgctttgccggcctgccggggtttgccgccgccgccgtgtctcactctcacgtaaaatgtggcctctccaggaatttctagttcaatttttcaactcgaaaaactgctgccggattctatataattatctcatgacctgaagtacgcaaatattaggaaatgacaaaatatcaaataattagaaggggtaaggatttaatctcaggttgtctagcccaccaccttataaaactagccggaatacctctggacgtttctcctccatggcatgaagtctgaactctgaagttgcaaattgtcccaaatttgaatgtggaaaggctgttccaggtgacgtgtgtcacagattaagaggacatcattaacttccacactcgagtggattaatcgaagccaataataatggattcatcattaaaatcgatcctcatccacagcgcctcgctgctcttccaacaagaagttcagaacacactctgacatggctcagtaattctttactgttcgctcaaattgctacatattatacagattgcagatcaaagtaagaaacgctgcagaaacaaactgaaagtttccggcgaaagcacgggagactaacctggacaaaacaatcgatcatggcaaacacgcacggttaatttctcccggcttcgacgacgaggagacatctgaaaacgaagctgagacggaggcaagcgtacaccaccaatggaggaagaagaggggtggagactggagacgacgatgggtggccgtgcgtgcagagcgaggcaaagcgaagaagagtacaaagattcgcacttcgcggcaaaatattcctaccgcgcgagcgaatattcctccgagcgatgctggatatgccctatacgtttccctttcacgaaggcgtcaaatcgttcgaccacgtgatccactggactctctctccatccaaggcccaatttaccgcctacaaaggcccatatttgaatgggccctaaattttgatcggccttaggtgggcctcgcttatgagagcttcgagagggcccacgtgtccactctctctctctctctctacagcgacggcggcggcggcggcgaggtgagaggaaggagaaggggatcgaggaggaggaggcaagcgcagccaccatgggagtgatggagaagctcaagatcttcgcggtgaaggagcccgtcgtcaccgcctcctgcctcatcgccggattcggtgcgcttccctttctctctcgatcctgccgtggccgaaaccctagtagtggcctggtcgtgattcctcgcccccattgaggacgctggtgttgccttgcactgggcgcctctgtttagctcgaattcggtgaccgaggattgattctaggactctctgggctggggtggatgggttcagaacgccttgatgtgattttttcgcttgctaattttctgttggatctagggttctcaaatcgcttcagaggtgttcttctttgcaagccagtagctctgcctgttccccatgctgcgtggctcaagatctcaagtagtctcatagttcatactccataagctatacttttttttttttgggaaagataagatccaattgttccttcccagccaaacagtctggtctgttgaatgccacaagtgttaagcagtgtgttttgttcaaacaatttcattctttagctcagctaaatggagttggcctgtgtaagaactaagatgcaccttgtcgatttggattaaaaaaaagaaggatattctatcagctgcattttttcttcactggtatttactagtaatatatgtctctacgttgtaatgcgccaggcccatataagtagggatgggttataacgagattagggataaaacattggatccggtggttacctatgaacgctactcgtgtaagcggtgcgtgcagtgggaggagggggcagattggcagaaggacttaggaggacgactctgcttttaaggttgtagagaaataggttggtaataatgactgataaaggtcctttgaatctcgtgctgaaatgtagtatccctggggttccctggtaactctgaattggtgttgaaacgcttgcttagtttgcattatgctgccaggggtgaaacttgaaacggtgttgaaaaggttgagggtcttcctttgtctgaactaactaaagtctcttcctaaataccagcactggatgccttctattaatcactggcttgcagaaaatggttgatgcataggaatacattgaggccacatgaacaatgagttgctttgtggcttgggaaagtgaactagctagattccatgtggttttgttctatttgaaaattacaatgattagcaatttttaagttcaatactttgcccgatgtatgggcacactaaattttctttaggaaaccctgattgtgcaaagtatcattcagaatttttttttgaggcaaagtatcattcagaatttcagaaacatgtctggagctttcccgtataatagtaaaattttaatattatgaaagtgctcttaatgtaaaatctaagtatataatttgacgtagccagtttagatagttctacatgtatttggtgatcaagctttagggatgttgagaatggaagcattaatcagtcgatttcctgaaattgcctttaaggcttcaagtttttgtctagttttgttttttgagaaaaaaatttgattagctcttagtatctttctgcttgtatttaccagaatttctgcctttggttagctggtttgtacttcgtatcgcgccttcattgaagttcctcagtagcgcattgttatttctatgttttaggtcttctctgatttgcttcctttagcaagattgtaatattcttccctgagacttttctcagtactcttcatgctagaaatgagtgtgtagaacatccattttgttgcattaagccattaaccagactgctttaatgttagttaaacatttgaacaagaaactagagcaaatttgattcctgagattttctggtatgattggattggtctatggaattattgctcatcagaggagcactctgcatgcttctatcaaataggttcagctgatcttattatttgcaatttcaggtctttttcttccagcagttgtcagaccaatgttggattcttgggagacagcaaaacaagttcctccacctgcgctgaatgatgtatgtgattcctctctgttttttagtacatcagaatgatctgcaaccatatcttagtttctgaccacatcatttatcatgtccttattttgtcatgttcataatgtgccacccaagatatgtgcaagcactagacagtcttatgaaaattatgaagtaaacttattctttgggcgttgttattatttggggcaattgcaaatttaccactactttgaatcgttattgcaaaactgccactagaaaattgcaaaaatgccattagaactgtcattcgagtggcatccttgcaatattaaaaaaaccagtggtaaatttgcaattgccccttacttattatttcaagtaggctgtaaaattccaggattgagcactctgaatattcgactggcaacctagactgaattgcacaggacctttaaaagattgtgccatgttaccgattcctttgttgacgactttgccatgcttcacctggttatctccagattcacattattgaagtactggaatatcaaccccgctccattgagaacaccagtatttaattccttctatttttggtacttctgcaggttgttgcaggcgtcaccggcaagaaaaaggagtgacttggcatcttttccacttgctaatgttgtcgcaacgatttctctttgttttgactccggatgggaagcctctcccagtccagatgattaggatcatccattcatatgtccagcacagtgtgaaaacagtactacatgtgatcggcaaaataatcgtgttgtacctgaacttactttcaacataatgaaattaatgctgcaattttcagctttgagcttgcaagcaaagcgtgtggattgattggtagccttaacctatatcgtaaaattgctggtgccgattggttctgtgaagatttacaccagcagattagttgtggcaaacattctcttgtgtgcagcactatcgtcagtggccacgcttgcttgagcaagctgtgaagtcagtactggcttggaagcaaagccttggagcatcagggaagaaaccgtcgtgccagactcttttgatgacgtgcggagcatcgtcgttgtcgcgaggtataagagccagcgagacgccggcatagcttgtacacggtggctgatcggagctccggccaatgtccggcgaccagatgggctcagaaccaccgcgtgtcgccgccggcgatgcgcccaagacggaggggcgcattggcagcttcagccgcctcttgtccgggctcgacgccggcggcgtgctcagggacgtcgagccggagaagatgaaggacgagatccggcggtgggccaagtccgtcgtgtcgctggtgcggcagctcagcttcggcgcgccgccgccggaggatcatcgcagcagcaactcgatagttcacaccagctagctgaagtagcttactcttgttttcttatttaaatttaacattttttattgtagatgaaagatcatttcatctacaattcccctggtttctggcgatggaagaaatactgcaaatctgttagcatgcttccctaactactacatttttttcaaaaaaacctataacttaattaatcatgtgttaattttaaaaattcttcccgaactactactacctttttttcattctgtaacttaattattcatgtgttaatttaaaaattctataacttaattaatcatgtgttaataagccactttgctattcgtgccgaagaggaaaaattttgaacttccttgttcgatcacattattagtgcaacgacgactgcttatggaaatatataagtttgtcgtgatgcaaagtttgatcacgatagcgcgacgcaatatacaagtttgaatacgttaaaaaaaaccatgagaatttgttatagtgtacaatattcctagtggtttaatttattatgtttctttctaatattaatttattattgtatcatcacgcacgggttgatatatttagggggaaacttatattgttattggataatgctctagatctactcatatatagagggttcgagttaaacatagggttaaactgaaatctagagagggtttttacctctcttttttaatcactactcctgtaagcatttgttgtgtaatttagaagaggtaaaaagaggtaacattcactactagtggttttgctatttctattatcaatagtcctgaatttgttgtgtatacagtggtcatgactctctatattgcatgagtgcatgaccttatgggtcttggtttagtaaatcactagaaacgttatatgtgttgtttggttaattttatgaatgttttgaactgaggatatatctcaggacaattgtatttggattttggaggtacaataattggctttaagatattttttgccgttttgtttgtcttacacaatcacccatacagtccaacacaagtaattcatctaattgtgtacaggaggcgcgcccatgatctttcttgccgttttgtttgtcttacataattagttgaattatatgttgtgcctccacgtcacaggtggcatgttgtagcctgagtgaaatgtcatatccaatatactctgttaaaaattgactaggagacctttatactctcaattgtcaaaaaaaaaaaaaaaatcaacctagtattggatttgatgttttctatattcagattctttgtactagaaaacgtctcatccaatactagattgatttttttttgggacgaagggagtaagttattatgcggattatatattctctctccgtcctataatataagagattttgagtggatatgatatatcctaggacaataaatctgtacatgagattttgagtggatgtgatacatcttaggacaatgaatcattgtactacttcctccgtccccaaaataagtacagccatggttttccgcacccaactttaaccgttcgtcttatttaaattttttttgaaaaaaaattaaaaacataagtcatgagtaaagtactattcatgttttatcatctcataacaacaaaaatgctaattataaaaaatttcgaataagacggacaatcaaagttggacgcggaaactcatggctgcatttattttgggacggaggtagtataagatgtgtcacatccgcacaatatctcttatattataaaacagagggagtaggatctagacagagttaggatagaatacaatagaccaggggtgtgtttgagtagaaggagatcggggagattggaaagatacgcaaaacgaggtgagccattagcgcatgattaattgagtattaactattttaaatttcaaaaatagattaatatgattttttaaaacaacttttctatagaaattttttgcaaaaaatacactgtttagtagtttgggaagtgtgcgcgcgaaaaacgaggcgctttctcaccctatatcacacaaacgaaagcagcctaggagaccttatgcgataatacaagaaaaccagtctagcaatcaacgtgcaattttgtacaaatactctcctccaacccttgggctcaattagtggtaactgggctgggcctccgtgggccgcctatttcgcaacagtccagttagtctggtgtttcagcccattcagtaatacatgggccaaggcagattagagcagggtccaataaggtccataaagacccgagcaaacctagggtttatgagcacggagcgtataaaagcgagcctccacgccgccgtccctccctgcagccaccaccaccacccccacaccggagcacagcgaggcggcgccgcagccccatcttctccggtgagtcttcgtccctcaccctcgccttctcttacggaaccctaaaaccgtatgatctctactagtacgatggatggatggatagctcttagttttggtcagttcgatggcatttgctcgttctgctcgttgtctaatatcttctacgatcctatccggctgttggtccagtagtattactgcaagaactgtaagcttagttcgagatttttcttgtagacgatttgttacctacttagattttgtttactagcgggttatttgtttcgctcggttagatctggtaatataaaacgagccatgtagcgattttgatgtgtgggggcacgaactgttcttgtcacgagaaaggttgtaccccagatttcatttgcaatcgatgccaattctgggcaaatgttgcgttataataatcatatatatgggtcactttttcctgctgatcattagttacaggatcttacagtaggttgttggttttggttatgtaggcgaagcgaaatggcgacggttccggagcctttgatctgggagattgtcaagaagaacaactgcttcctggtgaagcagttcgggaatagcaatgccaaggtgcagttcaccaaggagcccaacaacctgtacaatgtccactcctacaagcactctggtcagtagtcgcttcttgcaacattgctggctttttgatggaaaccaagcatttcattcagcatctgcaaagtgctgacttgggtgatgatgtgttttgtaaggcttggcgaacaagaagaccgtgacgatccagccatcaggcgtgaaggacgcggccgtggtcctctccacaaccaagaccaagaagcagaatgccccagcgaagctctaccacaagtctgtgatgcgcaaggagttccgcaaaatggctaaggctgtcaagaaccaggtattagcacgtgaaactacttctttgcatagcttcttgtccttgttatgccttgcgatgctagaagctttaaatgcactgctatgaacataaagcatcctatattttggcttcattactcttttcttatttactgctgtgatgagccgtaacacataaggaggccaaccgatcaattggttcttcaatgaaatactcttgttacgcttggcttctgagcattttgtattgtcttgatatgttgaagtggctctcatttgtggggttcagacgttaggatggaactgtgagatcttcatacggaacaattaaaactcatacaatgttttttacagaagttggtataacttgctgttaaaaaaacagttaggtgtcaatgaactgcaagttagtttgtgagaattcctgtttttcgttttcagaaccatctttttttccctgtttttgttacattgctaattctaactgctgctgtgataagccgtaacacataagaaggccaaccgatcaattggttctttgatgaaatactcttgttacacttggcttctgagcgacttatactggcatcctgcctttttgatatgttgaagtgcctgatctgtgaaaaccttcagattttcaaatggaacattttgatacttaaaacaccagttttagcagcagttgatacaactttatctgaaaattcaggtatttgacaatgaattgcaagttagattttaagtatttgctttttaataaccaagtttttgccctatctgagttaaattgataatgcaagatgcagctgtgatgagacgtaacacataagaaggccaaaccgatcaattggttcttcgatgaaatatatttgttacgcttggcttctgagctgaatctgcctctagtatttcttctctatacggcagctttcctttatgtaccttactgaacaatcatcagtagtttgttctttaatttgctgttattctgcccttcaggtgagtgacaactactacaggcctgacctgaccaagccggctcttgcgaggcttagctcagtgtaccgcagcctccaggtttccaagtctggtgccaagaagaagaacaggcagccaactaagctgtaaatcgcttaaagctcgcttttttttttgtcaaggggcctcgtggtgttcatgtttccagctacctctgttcgtaacagtgattgagacttgaattgatatctatgctagaattggatcaactatgctacaaatctactctagtttgtactcgctacaattttggtctgctgtgtcattgttcacgttgcacttgataatagcagctaagctaatgtcatcaaattgctggtgccgttttgctttgtacacatccccgtgtagcttctgcgaccagattacctatttttgatcaagctgtgtagggttgtggcatgatggcatcaatgtgctgttgccatttgacaaatcattctgcttattacatcaagcacttcatacgttagtgagagcggggcgaggatcttttaccatagggaaaattggttctatgccatcaaaagttttcaagttttgctttataccatcgaaagttccttttcaagttttgctttatacctcgaaagttcctggtgattttcctaccataatgttacatgggtcatatctttatactccctcgtatttgaccgttcgtcttattaaaaaaatttatgaaatatataaaactatatgtgtacttgaaattatatttaacaacgaatcaaatgatataaaaagaataaataattacttaaatttttttgaataagacgaatagtcaaacacgtactaaaaagtcaatagtgtcaaatattttgaagtatttgcaatgataatgttattatggtagagaatgtgaacccgtgagggagatgattttgcattgtgagtttctgacaagcggaagctctagaaagttctgccactctgtgagagtgcaaagctgttgtgatgttgcacttgcacctgctgctgctgctgaggcccgaagcgttgccggaccgagcggtacgccatgagcccgagcttgtgcgccttctcgtacatggtctccggccgcagcggcgcgacgtgcaggccgacggcgtcgagctgccggccgctcctcccccagaacccgacgatggcgccgccgtccaccgggaacgcgaacggcgtgccctccgccgcgccgccgcctaacggcccgtactccctccggttggtcctgaacgccagccacctgatcaccgccggcgcgccgccctgcgccaccgccgcgtagtgcccgctcaccgccgtcaggtactcctccgggaagcccagcttgatctacgtcccagccaaacagactcagggggtatttagatacatggatgtaaaatttttgcatgtctcatcggatatacggatacacatttgaagtattaaacgtataataataataaagcaaattacagatttcgtttgtaaaccgcgagacgaatttattaagcctaattaatccgtaattagtaaatatttattgtagcaccacattatctaataatgaaacaattagggttaaaagattcgtctcgcaatttacacgaaatttgtataattagttatttttttcgtttatatttaatacttcatacatgtgtttaaatatttgatgtgatatgttgaaaatttttgccagggatctaaacaggccctcagctatggctgtgccaagaacattacaaggtgcagatggtattgggtgtgcacctgggtggtctggttgccgccggcgccgccgtgccgctcgccggcgacggcgacgccgttccggtcatactcgacggcgatggagtcgatgcaccggtcgtacgacagggtgatgctacgaacgccggtgtgaccgccgtcgtcccaggggctccctccggtgccgccccatggcccaaccttcatgatcttcttggacacaaccatcttcttctgaggttgctgctcctgcaaaaaaaaaagggatatcctgtataattgaagtgtatgagttgctcactgaacttttggatagaaaaattcagatgatttttctgttctgcaagactgaaaatgaagtgcatgacttgcataccatgtttggttcagatatgttaagaactacaccaagtagtaaggtgagcagctaaacttattcagagaacaagtgcgctaacagataaaaatggatagggatttttttttgtttgcaggaaacaaccagatggaagaacagaaatattaggatatataggaaaaataccacacagtggcaattgggtgataagtgggaatcagaaccggatgctgtaatggcagtacgctgctttctggaaagctaagcatattgtacaggaagtttttgttctccaagagtccaagtataaattccggtaacatgatcctgccaatacctagttttcagttcaatgttaccactcctggtgattttttatttacatatcgcagagctttagtgtagtacaagttttttagggaaaagaaatcaaagtttgatattttggaaaataaagccttcatgttatttttgttcttcttcttatatggaaggatatgcagctctcctgtctattcgagaaaaaaaaagaaaaaatgccttcatgttgaatcatgaattgctcacttaaactccaagttcataagcatttgcacgttaacatcagataaagacctgaaacaaatgttgtacctcatgtcattacagtgctttgaaaaacagaaatgaagatgtagacagtggactcatactcataggtaactcctagaacttagttcgttccaaattcgtctgtccccagtccccactgaacaactcaatcctttgaattttctggaaataaactcagtccaaattggacgcatgaaattcgcataacacaatttatctcacatattattacatgcctattacgcagggttggtgcccagaaataccattcatggccagttgggattgagtactactactgctgaaccaatgttcaatacaaccttgtttgacagcatccagaaagtctgaaaacacaaccagcagttgtcgttttctaacttcagatgtgggcttcacagcatttgcaaattgcaacaatgatgttctctgtgacttcaagaaagtagtatttctgtatacatcaaacacttgtctgaagacaaatgattgaagtgtttgtgataaggcctccgatcaagacttgcatctcatctccataaaaagaaaaagaaaaagagaagtgaaatacaattcaagacttgcatcagtgctgctagtagcacaaatggttcatctcttgccaaccatctactgcacaacaagattcctgaagtggttcggctgtgcaattcatcatcttctcctgaatcctggcctatcagtcagagccggtgcttacactacaaacaattgcattctcttcaactcctgacccaataaaatggcaatttgcagagaagcaagtacaacagcagtggcaaccacattccattggcaatttggcatacattgtagtagcagcagtattgatcttaggtgtacagccacctaaagcttttgctgatctgtcctgagctaatcaaagagctaatcaagttcaagcaacccaaatgacagtgagtcccacaataacaacttgacaggtgtgtatgctgtgtctgggccctgtttggaccatgctgcatctttttcttgcattggctgtcaagtgttaaaagcatactaaaccccaattgcttaattgcttttgcttctttttttttgagctaatgcgccaaattatgaactgctaattatagctttggtatgcatgattaagtgattaacagttagcagtctcctgtctttaagctatggttagaatccacttattgttgcaaatctacaatgagctgtctgatttgaatgtggggcccacagccagtctcctcctctcctatataaag

SEQ ID NO: 4873 - DNA, 113790 bp, Oryza sativa
caaatgaagagttaggattaaatggaagagggaaaataaacggttaggatttaaaaatatcttttggtgggtggaaaatcatttccttttctcgttagccaaacactgccttcacttacagagatacattagcaatctaccatgtgcacagccgagtggacacaactaaagatgctctcattttttttggggggcccaaagtggctacctgctttgtttctcgatgcctgtttaactgtagaatagtaatgaagctagaatatccctaccagctggctacctctaaatgataaaattggaaccaacagaactgcttcagtgcttcgctatatctagattattgctcatctcgtgtcaagattcgcagatttcaaatagattagagtgccaacatttcaatagtcacaaattgcagattataattatgatatggcagtgacaatatgacatggtatttgacaaaaccatgaagtatgtagcggtactagatcaaccactggtaataaaacatgtctaggctctagaatcctataaatgtaacggaagattaccggcctctgccatgttccttcaggcattcttgaaaaatattcaggcgactgaaaccatagtacaaacaacaagcagcagagggacgtcaaaatctcaggtaacaatgtagcaaagtttccagcaatttcaatcctcaatctttcgagttttcatgaagcaaaacatactcccggctgcaaaaaaacaataaaacatttgtcagattttagatgaacggggttagtaaggaggcatatagaagcagaggctgatcatcattatattatatttacttttgggcaactagactcaaaagggccctaaatatggattagaaatagtaccatccatctaagaacaaaaagatgaggcttctgaaggatgaaaaccgtatgaactaggaaggggcactgtgtgcaaacttcaaaatctccacagctccgaacatatgttatacatttatacatgattgagcttgcaagtcaaggctccataaaggaaaattatgtttccataatgtagacattttgagattccttgatatttataaacattaatataccacctaaagattcatttggaaattgtattgagaaaaacaattaggcgtagtttacaaagatattacttagattattggagaaaaaatgtttatcccaagagtaccacaaatcaaaataaaagctctaattaaagagaatgccaaaagccagactgtcactttcataataagttgttaatttaagtcatcacataccaaagatacatatacattgagcaatatacaaataaacaaaaaagtgatgctttctttaattgatcatacctactattgccaaacttaatggtatccttttcaaagagttcataataacggctgggctcaatacgattctcctgaaaaaaaaatcaaaacataaatattgactgggtagaaaatattattagaaatgcgactagtgtatctgattagtagtaaaagtatcactggaggacttacattaatgaaagttccattggtactaccaagatccatcagataaggcctatcaaacaaagcagcaaaaaacatcataatctagactagcatacagaactaagataatcatgaattattagtacttgttattaaaaaaaatatatgcgttactagcaaggagtacctcacttgctttgacatcatgccatctggctgctccttctctacaagtctgaaaaggcaaagagatgggtgaatcacaatattatttctcaatatatactccttttaaaagggagcagtggtgatggtgagtggtgaatctgccaccaccccaccaccagctccctagtttttttggaatagaaaaggggggcctacatgtcaaccacccctaccaccaacttcctactttttgtgagaagaaaataggacagtgcacatgtcagtaacaaatatatacataaattaaggggcgatatacacagaaaatgatgataataatgagttaatgataattttctttatttaaaatcctgttgccacgcacaggcaatatgctagtaaaggcaaaaaacaataagattgctatgcttacctatattgaagaactgcatgttgcttactgcaggagggatgatctatggggatgtctgcaactttccgttcccttccaaaaaggtagctgctcatccggtgaacatataatggttctgatcaatcaagatagcatcataagacacagtcaaacaagaagagcaaaactgaagtatttaatcactaacgtaagcatgtgaatttttttaccaccctacacatttaatttataccactataatgcccaacctttaacttgctgttcatcacaataaacttcatcacttcagttatttcacttccgttcaaaactaaaactaatgagctatccatacgataccaatgctcaaacagtatcattggatatattcacaagccagtgtatactgtatcgtaaggaactgaacaatagcaaagcactaggcaggcttcattattacaaaccaatggaacaaaaagatgaggcttctgaaggatgaaaaccgtatgaactaggaaggggcactgtgtgcacacttcaaaatctccacagctccgaacatatgttatgcagtaggctggaccaaactggcaaacaattgcatggatacataatgcatagtttgcttatcagaatcaaatgctctgaataaggatgattctatgaaaaagtcataccgttaatctcacttgaggttaaggtgatgaaaaggttctataatgatgtaattttttactctctggagttttcagtctctcgcatagctttggtcaaacctgataaagcaagaggggtagaggatgttcttctgagagctgctcagtccggtggaatatctgaaaaggtaatagaggcgggtagcataatctttactgtgtcaagagactcagaagaaaggtttatctgaaagctgactttctttggggggaattttctggctttcaggtgtctgaagaaaggcttatctcacttctggagcaaatcaatacccacactagcaaacagacgaaagttacggtatgataaacgtggaaacttctatcagtttttgacataccatgtgcacttaactaaacaaacctaccatgcttccaatagtggttttgggtagcttcactacaactaatttagtttggtttgtaaagattctcgtttgttgtgattctttccaagtcactgattgtacatcatcaaaaaaaggaagagaaaatgatgctaatataggctagtctgtgaagggaaagcatccaatacacaactgattctttttactatgttttatttcgcagattcagaggcgccggagcgtccttgacgacgatgactagctgcatgtgtgttgtgtgtacgatgagctggtggaggagtctgccgtagcgcaaaactgcttgctaaaaatgatgattatcaaacgctatatcaacaaccatcaaaacttgagcgactatttgatggatatttggccgtatatgaattaattcgagtttggtttggcttgttccactgatgacattcaaactttcgacttctccgaagtgtgtatccatcatatcatgagtatgttagttgctcctgtctgatgttttgtcggtagatgaattccggtagcgggggcaaatccaggccccgagcaaagctaggccaggtctggggcctgggataaaattaaaggtccattgaaaaccttgatttttcaccaagtaaacttatcttaattaggccgaaacttttatggggcggttctaactcatatatcagcaccaagcgtgtcagtagtaatcaaatctatcttctcgaaggtcttctttttctgaccaatatttaacatggacagacgttaactatatcaaatgatggacaaatattgatagattacagttaatgggcgctctcagcttatctaagatgcgtttgtctgtactcattatcatatattatgaactcggatgttcgattggtaggcctaacttttggctgcaagctataattaattagtggactctaaacaaagacacgtcgtcaattaaaagtcaaggatcgtcgtatgacatggagtactaggacagtttttcaaaactcgtcttgagttgaatttgttgattaattattactagtatatacttataatttatatataaccggtaatatgctaatggcaagcacggataattagttaaaaataattagtagtgctagagctataccataccggcagatttttgtgaaccactcccttctgaattcttatggttgttagcctttcgttgttacagggtttggttaatttatgtgctttgttcattatataagtacactacagcgcatgattgctgtttatgattttatttttcccccctggatcctgttttgtatcggttagagctttttccggctagaaactgtccggtcttgttatcttgaatggcctgggcagatagatcagaaacagttttttgcaaagattatgatgctgtgtaattataatttaaatactactccattacaagtgtcctgttgttcatgaatattacgtatatactggtggagtttcaatagaaaatcaatgagatcggtgatatatcattaatttccgtttattagagcatatgttagctgacacattcacggagtgtgagtagttgcgtgtgcgcatgtttctaccatgtaattgaaaaaaaaactcactgttaattaattagggtccaaatatacacgtcagaggcccagtttagtttcaaagtttttttttctaaacttcaaacttttcatcacatcaaacctttcatacacacgtaacttttctatcacatcgtatcaattttaaccaaactttcaaacttcagtgtgaaccacaaccagaccgacgaattcaacagcttgagtagctaccaacatgcatgcaactgtctgatctcgtttactcagctagcctcttagctaggcttacaactgtacactgtatactaatacaaatacaataatacatacatacgagtatacgactatacagttggtatacgttaattaatacgtaagtacttgcctttcttcagcatgcgtacaaatcaaatatacgtataattctcggatctctcgtatcttcttctcggtctcgatggatatcaggctccgagttcgccgaccatgtattcgacggcgtcgcggatcacgcggagtagcaaaccggccatgtcgtcgtccgccggcagccggcggggaggacgatcggtgcgtcgacggtgggtgttgggcggcgggtttcccatcggcggcggcggcgcgagctgccgcggccgcccgtcgccgccggagagcggctgcaccggggtgttcgggtcaggcggcggcgggggagcaggccactgcctccccgacacgccgccgtcgtcgtcggagatcatcagcggcctcgtcgacgatctcccggccgacgacgacacgccgccggagagcggccccacatggccacctggaccaggtggcggcggaccgcgtcctggcggcctcctcagcacgccgccgccgccgccgtcggcgagcggcgtcacccggccatgcggacgaggcgatggcggggcgttacccgacctgccgccctcgacctcgacggcgcctccgacgaccacgccgtcgctcggcaacatcagcggcggcagcacgtgcagacgccgtgcttcgagcagcggagcgaggaggacgacgggaagaagaagcagcagcagcagctttggagaagacgaagacgaacccgccatggcgggaaggaaaaacaatgaatcgatcgatcgagaattcgagatgttgcaagcggcagcgcgcgcgaagaacgacatggccgcgtgagctcttatatatataggcaaagattagaattgcttatgacggctagaaagttgacaagtcaactgtttcttcttaatccataaaatgctacatgacaatatcccattcgaacgatatgatatttctaagctattatctgatatgatacgtgttagatatcggtttataactatttaaactggataatatctctaagtgatacatatctattgatttttatatatcaggtgatacccctgagatattatcccgttcgaataggatagtagcattttcaaaaagaatcttcgatatactagttaatgggtctgtttggtggagttttatattctgagaagcagttgtttggtagccagcttctgagaatctggaaaagctctgaaacccagcttctggcttcttagttcatttttcagaacctgtacctacagattctcagaagctgtatactgtttggggcagcttctagcagaagcagcttttaggaaaagctgcagctggaacaagttccccaaacagagccaatatttaacttgaaaagaacacgaatagcagtgtataaatgtgcgtaaatcgtcagttagttgctgcaaatagctagctgttggaaccgctaccgggcgaagattttcgctacgagctaaggttgcggtcaaagttgaccattcaacagacaagaaacaaccgcgacagacaacagccaccgcgtgagtcaaaacaacttttgttcacggagagaaaccgtgatggcaacatggagcccggccaagctagtgtgtttggctgcctgggcctttcatacttgtgctgtttttcttttcttttttttcttttccttgttaattagcttagataaattgtaggactaatagatttggatgtctcttattttagtggcctgatcaagtgcacaccttgcacctgccaggggatatgatcctgatgtgcggcacacctttcttcgttttatactgtaaatatgtaaatcgttttagttttattctaaatcaaatatatatattctgtatctatttaatatttttattttcgatgtatcgatgatgtcaaaccatccaacgctcatttgtcagtgtctctggtaccgtggaacatcatatatatatctataaagtttatctagtgtagttaagggaaactatatattctagaaaaaaatgataagatggattactactccctatttagtgtagtacgtgatagattacttcacaagcatgtaaggtctgtaactttaaaaaaaaattggctgtgaatatatgttaactagttgtagtttaatttttttttaacttgtattagttggatttttaacttgtattagttggatttttaaattgcatgtttgtgggggtgatatatcacatattagtacatcttctcaatttttttaatttttttcataactatttgaatggcataaaaacaacaaaggaatgtttgccgaagactttaaaatccactgtcacatgttatttctactaatatcatataaaattctagcagcaacacgtgggatttcatctatttttttcttgatgctttatggatccgtggtgcaaaaagtatccggtgttgtcccctgtaactaatgtttgaaatttcaattgcaaaccaaatatggtgggttgatacagaggatgtatttttatctttttttttaacaaaaaagatttagactttaaatctatcctctgatttcagccggattcaccaccgtgtatatatatatgcatatactgcgccaattggccacagagagattataattactgcatctccatttttcgtagttgagcgacgcaacaacgtgcagctactagccagctagtctttttgctcagctggtgtctacttacctagactctgctacgacacttataattaaataaaaaacgactatacaatatatacgattatacagtcgttataccgtatacatacttgcctatagctttgcttctgtatgcgtacaaatatacacgtacaagtacaactctctcgtatatatctcttcttctcggtgtcgagctctcgatcgtttcaggctccgagtccgccgccgaccatgtactgcacggcgtcgcggatcacccggagaaaagcggcgcaggggatcggcggcgcgagcgcgacggcgacgttggtttcacccggcgggtttccggccggcgtcggcggagcgggtcctggccggccgcaacaccgcgacacgccgtagttggagagcggctgcaccggcggcgtgttcgggtcaggcggcgggggagccttaggccacggcctcccaagcaatccgccgacgccgccgtcgtcgccgccggcgagctgcgtctgcgtcggcacaccggggtgccaaggagacggcggagtggggccgcccggcctcctcagcaatccgccgtcatcgtcggcggcgagctgcgtcggagtcggcacaacggggtgcgaaggaggcggcggagtggggccgaccggcctccccaccagccatccgccggcgagcgtgatcggcccgccaggcgcaaaaggtgacggtgggatgtgatcctccggccgcccgacacctccgacgacctcgccgccgtcgctcggcaacattagcggcgccaccaccacctgatgaccgagtggccgtgcttggagcagcggcgcgaacgcgagcaggacgacgtgaagaagaagaagaagaagaagcttgcaaggagacgacgaggcctccatggcgggaaggaaagggatcacaagctaattaagctagaaattagccgatcgatagatgagatgaaactctgatgcaagctactaggctgcagctagccacacccacatgagctctgttatataggcaggatttggtacggcgctcgtgtggtcgtcgtggactcgcgtggtgtgcatgtgtgatgactgagtcaacggttttttgcctaattaatccatcaaaagaaagaaaatgctcggattgatttgttaatggtttgacacggaaggaaaaacaagttaatggtttgacacggaaggaacaggaactgtataaaaaaacacctaaaatgggatgaatttctatctaaatgttttttaaatttattgtattatattatatcatatttcgtttataggttatgtttttttagaacggcgaaagtagtccggggtgtgaagcctccgccctaaaccgcaccaagtggagcaccatcctacctagctggctaaatgggtgccacgtacgcgtacacgtacatgtatcctcaccaatcttaaagcatgatagatctgtaaagtatttttgatttttttccacgtcgtattcctgtggtatatgtaggacgacgtgcattgtattcgaaataaatttcaaaatatactgttaatttgttttttcttaaaaatattcaggatgcaagcttattggtagaaatatacatcgacctcacataatcgttgcgcgagacataacgaaacagcaataccgaacagtatcgcataagaaacagcataccgaatctctggtccaaaattagtgattaattaccataattagttattatttaatgataactaagattaattagttgctaatcaatgtgattaaaacattaatcattcagccatgccgtgcggtctcgcgtattggttgtgcgagaccgtacgctttcgtggaattcccttgcaaaaccttggcgcgtcgttactccacgtcattctcgtgcggtggttatgtgatagcgaggtatatttctaaccaaaaaaaattgaagaaagaaataatatattttcaaaattaattacatcgtattctacccgcaccaccatcgctccgctgccagtgcacgtaggacacaaacaccaagacatacggagttacggacgacgaggaatcgacggcaaccatgggatatatcgacgaccacacatgcatcgagacattgagatgaactggaagtttcataattcatatatcgttttagattttctgagaacatacttgctccttttctaaatatttgacgtcattaacttttttaaacatatttgaccgtttgttttattcaaaacttttgtgaaatatgtaaaactatatgtatacattaaggtatatttaacaataaatcaaatgataggaaaagaattaataattacttattttttttaataagatgaacggtcaaacatttaaaaaaaaatcagcggcatcaaatattttgagatggaggaagtatattgttttagattgaattcggaattttgtctatgtatgtccgccgcgtgtttcggtcatatcatcgtcaattattaacgcgtacatggccggactgtcaaaccaacgctttcacgctggtgtgaaagggtgttttattttttcttttaggaaattaaggagtgcaaaactgtaagtatatgtttgtcgtgacgttacacacacgttcgttttgaagtactggccttgtttagtttccaatttttttccccaaaacatcacataaactgtgtttgtgtttagttccatgttaaaattagaagtttgaaaaaattgaaacgatatgacggaaatgttgaaaatttgtgtgtagaaaagtttgatgtgacggaaaagttggaagtttgaagaaaaaaatagagccatagaatctctggacacatgcatgaagcattaaatataaataaaatgaaaaactaatcgcacagtttacatggaaatcgcgagacgaatcttttgagactaattagtccatgattagtcataagtgctacactaaccacaagtgctaatgatagattaattaagcttaataaattcgtttcgcggtttccaggcgagttatgaaattagtttttttattcgtgtccgaaaatcttttccgacatctggtcaaacgttcgatgtgacatctaaaatctgttcgtgaactaaacaagcctgatggacaatggattgatagttaaaaattgagtttatggtaacagttttgatagttaacacgagcacacacacaaaagaacggtcgatagttcacacatgagtacacaacataagaaaacgggcttgtgatcaggaaatgaaacagtgactctgtgactcgtaaacatcaaggttggactcagtgcagtggagtactaatcattgacattaataacatatgatctcgtgctcatatgtcagcgagcagtacaacacctcgaattgatcaaagattacgacctcgtaactaagccgtgtacactgccgggcggcttggggagagcacaggttggccaacgacatctcctgcaaacggaggaggaggagcagccgccgccggccacctcgccggcgcgccatctccgtcatgccagcgcggcgttggcgaatgtgatgacctcggcggcggcggagcgcgcggcgacgacttcgccagcgcgccaccgtcggcatccgcgctgctccacagccgcaacgccgccgccgacgacgacgacgcatgtacgtgtggttggtatgcgtctcctggatggacagaaacagcacaagaaattttctcggtgaatgacaaattactagctatcaaacccagtaacccactattctaggccagattagcaatcaaaaccattctttttcacatgatcaatgcgactgaaaggaaccaatgcaattctgcgtgctgttgtgttgcctacctagtgttcgtgcatccaaaagatgagcaaagatgatgatgaaatgggcgaggacaagaagcagtgaagtagacagtgatctgtccatggccgatcgagaatactatgcaaggagagcaaaatgaaagctaatagctgaatgtgctcttagcttgttgtagatcgattggtacatggatgaagaaattaaaggtttgggaacattagcatttatagtggctgaaactgcacttctgttgtcgaaatggtttttctttaagaccagaggacgacctctggtctatggtgtagttcaaggattccaggcttccagcattggcatgtgtacagcccagtagacaatacctaaagatgctcatacttccatgtgattagctcttctgtcacctctctactcattttcctgcacccaaattgggttacctgctttgtctctaacttatttgtttgcacccaaaatgcataattgtagtatagtactgaacctacagcttagaaccttatctctacctctgtatgataaaattcgagctaactgcttggcactagattatttcttatctcataacaagattctcgggacttcaacaatttaaaatgttgacatatatatcattagtcacaaattgtccatttataatcatgcatgttatgataataacaagacatggggccggcgaaaaacccaatacaacctggtattttggacaaaccatgaattcaatagtgatagtagatcaaccaccgaagaaaacagccccatcgtttggctgttgagaggaataagcaaaacaacatatttacaaataaaaaataatttatgaaaaaacttttatacacgtgtttttaacgatataaaagcaaaagcagaaaagtaaactacaatgattaaaccccaaaatcaactccaaatttaaagttgaaaatttaaattttggctaataagtataagtataagcgaaaaaatggggccgcaagcctatcatcctacggatgtaatggaagattgctctttgtcatattttggtcgcttgcccatagtcccgtcaactttggtggcttgaactctcggccattgggcaaggcagatgcctatgatgaatgaaaactctttctatctatgtgtcacgccccgaattagtcccgaccggaactaacccgtgacgctccaaattaacctgttaatcgataccagtcccaggaaacagtgctggtatcacagggagacagaatatcacagcaacagaagcctctttattatagagtagaagtacagtcatgttgggctgtggacagatcccgagctcacaactgcattacaaaaggaaagcggaagccaggacttggaccaaacaatcacaggcgcgacttgggaactaggccgaaaccctaaaactcatcgtagccgacttgctcctggaagaactcctcatcagcaggatccgcttcatcttcttcagcaactggggggggagatatttatatagagcaagggtgagtacgggagtactcagcaagccaggggaaataagtgtttaatgcaggcttcaaggaaaggctgttgtttttgcaattgattttatttgaactcttttctaaaagcaactgtattctttttattaattcttttaccccttcgtcgtctttctgggcctcccggatttgcgactctagggtaggctgtactgtcaagctggctgggactcctgactgtaccacggtcagccttaacttctccaattctctgcacagatgatcttggtcaggccgtatttgagctacattgcaataggccttgcgacttagcgcatcagcgaccacgttggctttaccaggatgatagtggattccaagatcgtaatccttgattagttccaaccatcttctctgcctcatatttaactcggtctgtgtgaagatatatttaagacttttgtgatcggtgtatacttcacatctgttcccgattaaatagtgcctccagatcttaagagcatgaaccacggctgccaactcgagatcatgggtgggataattgacttcatgaggcctgagctgcctggatgcgtaggccacaaccttacgttcttgcattaggacacatcctaagccttgtcttgatgcgtcacagaagatctcgaaatcttttcggatatctggcaaggtaagaactggggcagtggtcagccttttcttcatttcttgaaagctgtcttcacaggctacagaccattgaaatttcttttccttctttaacagctcggtcataggtctggctagcttagagaatccttcaatgaatcttcgataatatcccgctaagccaaggaagctgcgaatctctgacacattcttgggcgggttccaagcaagtacagcttcaaccttgctgggatctacttcgacaccgttggaggagatcacgtgtccaagaaatgctactcggtccaaccagaattcacacttcgagaatttagcgaatagttgatgatctctgagcttttccattatcagcctcaggtgttcagcatgttcttcctcgttcttagagtatatcaggatgtcatcgatgaataccacgacaaactggtccaggtattccataaagattttgttcattaagttcatgaagaatgctggagcattggtgagtccgaaggacattactgtgaactcatatagaccataacgcgtcgagaaagcggtcttcggaatatcttcagatctgattttcagttggtggtaacctgacctcaagtcaatttttgagaagactcttgctcctttaagttgatcgaataagtcgtcaatccgtggcaacgggtacttgttctttatagttacttcattcagggctctatagtcgattaccattctctcagagccatcctttttcttaaccaggagcactggggctccccaaagggatgagctaggtcgcacataacctttactccctaactcttcgatttgtcttttgacttctgctaactcattagctgccattcggtagggtctttttgcaattggagctgtgcttggagccagttctatggtgaactcgatctctcggtctggtggcattcttgttaattcttccggaaatacgtcgggatattcacagactatgggcaccgactccaaggaggtgacttgcaaacaggttaggatagaccgacttgcggtaggggtgttaggggtaaagcggacttgctttcctccaggtccttgcaaggtgatggacttttcggcacaatctatctgtcctttatgcttagccaaccaatccatccctaggatgatgtccaagctttgcgagtctaggactatcggtttggctaggaagtcaacttcctcaggggcgtaccgagccaacttgttgaactgacttaggtactcattgacactgttgttgccttgtttaagtctgttgaattcttctttcttcatgtcaatagtgctttcgggcacatgagctgcacggaaagccgtagcgaactcatcccaagcaatgttagtgggttcagggtgtgcattgcggtaattctcccaccaatctgcggcaggtcctcttagctggtgagaggcgtagagcgtcttctcaaccggagtacactgcactaagttgagttttctatcaacatctttcaaccaatcgtcagcctcgacgggctcgacggtctgagagaactctggcggacgtgacctcagaaagtctgtcagcttggatctattgttgcccacgtgagggtggccatttccatgcgcattatgctgaaagctggctatggctgtggttagtccttgcaagatttgtgtctgaactgccattatgtgttgcatgttgttttccacatgaggtggggaagggaggcgttcttctccagaattgtgactggcagtgcggtgagagcggtgagactgctccagctctgcatcacgggaaactgtgcgatgcgagcggctactgcggcgaggttgctcaacctctgcgttgcggggaacagtacggtgcgaacggttgctgtggtgagaatgctcattagctggttcgtgatttgcttctgcttcaactctaccatcttcaaaaccaaagcgggctggtgcacgagctgtacgacgggggcggctagccatctaaactcccagaaaaggggcggggtaagagtcagataagcacttaggagggcaaggagcaaagcaaatagcaactcagatagcacacactaggcataaactggatttttcaaatcataaaaacacctgatacaacgggtgtggacaagtcacagagctacgccgagcttgactgtgcacacaccacctaggagaaccagactaccaaacaacacccacaacaaacacacgcacgcactacctcgccacgactccaaaagagttggcggcggaacaaaaggggcctatcacacggacggctgctgaagactgcctcctctactcctcgtcggcctggctgcctcctgtagtcggctcctcagttgaagaaacgtcgatcggctggcgcgaagggaccggcgggacctgtcgagggccggcagcagcacgggccgctggcggtgggggagctgggtggcggaaacggaacacggtggaagaaccaacaacacgcttccgcgcagtgcggataaagcgtgggccacggcgggaggaagcaactggggtgtgtccgggggtgtaggaagggctaactgggtgtgggtagggggagtacactggtgagtacggcgcacgcgagctgggggagcgcgggccactgggagtgcgagcagagccgcgggagctgtgggaggacaggtggctagcgtggcagagacggcctgagtcccaagagatagtgtcaactgaggtgacaccctcctcggccagacgggcctccaaagcggcgtagcggcgggcaagggagcggtaagcctcaaggagtaggtcgtgctgagtggcctgagcctccgaaagctcgaccatgcgagtcagcactggctgagactcgctgtacggacaagggtacctggcgtctgagtggccagagggaagacgtggaagctgccggaaggcggagcctccgagacggtggctgtagtcgtgggccaggcgacgaagcgcagtccaggagaggtcctggtacgcgatctggagagtgggcctggccacagtgaagtggtgggggcgaaggccagctccgtgtatacctccacgagggtaaaggtacacagagagcttacagtgagggggaacacggtccacggagtaccccgtgtactcgggacacgagaagccaaggaaacgggagaggtcacgaagctgagcgacgtggtgaccctcaccaaaaccgtgggaactgaagctggcgttcactgccatctacaattttgaaagagggagaaagatcagtaaccattttagaaacaaactattgaaaataaagaaaacaaaagaaaccttagcttttcgcaagtagttttgaacttagtatccttagggtcatcctaagcgtcgggtttcgccctagggccaagcctgtgctctgataccatctcttgtcacgccccgaattagtcccgaccggaactaacccgtgacgctccaaattaacctgttaatcgataccagtcccaggaaacagtgctggtatcacagggagacagaatatcacagcaacagaagcctctttattatagagtagaagtacagtcatgttgggctgcggacagatcccgagctcacaactgcattacaaaaggaaagcggaagccaggacttggaccaaacaatcacaggcgcgacttgggaactaggccgaaaccctaaaactcatcatagccgacttgctcctggaagaacttctcatcagcaggatccgcttcatcttcttcagcaactgggggggagatatttatatagagcaagggtgagtacgggagtactcagcaagccaggggaaataagtgtttaatgcaggcttcaaggaaaggctgttgtttttgcaattgattttatttgaactcttttctaaaagcaactaagtgagtgcttctcaaacgacacggttgagacagtgcgtctcgtccggtcggagtatgtgcaatgtatcagtctttagatcctgaaacaaggttggcacccggccaaaagctttttgaacgaccacccgggccaactcttttcaaacggccacccgggcccacaacttttaaactgccacccgggcctagctgatcccgtcagctgcaggttttccaaacatcgaacccagtttcacaacagcaatttcacaagcagtagtcaaacaaaactacgctaggaatcacctcacatccgcccatgaccgtgggcacggctgttcgaacagtttaatgacctctgcagagggggtacactttacccacacgacattactaacccgggtcacccagcccgtggggatcagccacgtcgggagacctccaagctttcatgacaaggcatttcgaaagccgatgcaggtttaccatatgccgacgagaggggtcctagaccaacaacaggttaggtcccagaccatactgtgccaggaagcccaggggtcctccccgacaccaccccggcgaatccacatgtctctcggcatcaaggctcccctgataagctagttactcagccaggggtgtcccattccacccatgtggtcgtacttgtcttatgtttggatgaaattccaaggaatcggtccttaagtgcgagagcgggaaaccgtacacccggtacgttccccggtccgcggttttggaaaattcatttagttcgcagacatcgacccaagtgtcgggtttttccaagtcttttgtaaagctccagttttacccaagttgttactcagattttaactttgaaggcgaccgtcgatactcgcacagagtgcacgagtatcgaggcgcaactggatggttacaaggggacatggcatagcaattaacaatggaaggatcaaatgcgacaagttaggtaagtccgccaatctgcttcgcagacgggacaacagattaagtgtgatcctatcaatgcataatactttgcaagcaacataattaaatttcaaatataggctcaaggtgttcaaaggtggcttgccttgctcgagatctggagcttgatcctcgaaatcctcgcactgcgggtcttcgggctccggaactacacgcgaaacggaacaactcaacaaacggcgaaaataaagccctattaatgacctctaagcatgccattagatagatctcgagatttgaggaattttggaagttgaacggagtcaatcggatttacggttgggaagatattgaatttctaagattattggatttctggtctaacggaaaaaggattaaattaaatcctttttggaaaagaaaaagaaaagaaaagagggagggattatagacttttcctcgggcggctaaggcgcggcccaagggaattggaacggaccggccgaactaaatgggccggccgtcccaagcgcgcgcgtgcgcgggggaggggagagagagtccggtggaccgggctcaccacacgcggtcccgggtgggacccgcttgtcagcggctcggctcaccgtgcggagggcgcacgcgcgcgggcggggaggaacgcggtgcacgcacgcggtccgcggcggacgcagatgcgacgggcccacgcgcagcctcacggcttgcggtggaacgcgcgcacggggagggaccgaccggggtcggctcgacccggtctaagctgagctggcgccgacgtggcgcctacgtggctgccacgcaggacggcgggaggtagacgacgacccggccgcgaatggacggcgggcggcggcggcgagcggcggagcgaaccacggtgatacgggcaaaagcgagcacaccgggcggttgttcgtgacagggggaggcgagccaacggctcggattcgccggaggtcgctcgatggcggcggattgcggcggcggcaaccggcggcggaagaagagggaaacggcgacgaggccacgaggggtcgattcccgtcggtgagagcacctacgcggcttcgggaactcgacgctagcgtcggattgggcggaactacgccgagcgaggccggcgacgagcgggtgctacggagctcgggcggcgacggcggcgagcacacggcgagcgaaggcgacggttggggcggcgccggctagctacggggggtctactcgagctactaccgaaagctagggggaggagttggagcgaggaggaagaacggagagagacatcaccgagaagaggaggggcgctgtgacgagaggccgacggcgcgggagtaatctctccggcctcgggccggggaaggggaaggagagggcgcggccgaagtccccttccgcgtcctcgaatgcaccggctctcccggcgctcggcgaaggacggcggaggtgagacagagcacggggcggcggctatggcgcggagacgaatggaagaggagggggggtaaggggaggccgggggtttaaaggggacggcaatgtcggtttgagaaccgacttgcgcggtcaaggcgcgagctggcgctccggctagcgaccaaattggcgacagggaggatgacgccggcgggaggaaaagggaaaaaggagggggagaaagggggcttgcccctttgccggatcgggaaaaggaggagggagcggggggggcgatgacgacggcgatgacggcggcggtttggagcggagcggcgacactggcggcaggcgcgggcaggcgctgacgacggcggcgaccgggcggtcggccattcggcacgcgcgcgcgggaaaacaacaggaggcgcggcggcacacgcgctcacgcgcgcgcggcgtgcgggcggggcggagcggagggaggagaggcgctcggggcgactctcgcacgcgcgagcagcgcgcgggcgaggctgagcggggggggaggagcgcgccggggggggagagagagagagaaagagagctcgggagagagagagagagatgggccgagcggaattcggcccatcgaaccccgggggaggcaaactaaactttgcggagggaatcgatttgaaaggatttggattcggatttgaactcgacgatagatcggggattgagatcttgagatggcacggacactagacaacaagcaaggaaacaaatttcgcaattagggtttttaagaattaattttcctgctaggcgccacgacggaacgggcactacactatggctctgcgatagccgcaagaaggtcgacaaggctcataggcgaggctctgacaccgttgcaactcttgtgacgtgtacaatctagaaagaaagaaacaatagagtgtgcaacaaacaacagcgaacatagcccaaggtggccaaggcgatggcagccgatgcgacgctttggcgtctgcccaatgcgttggtgccggtgttaagtccttagccactagagcggctggtcgccaaatgttgagtcaggaataggcttcggtttcttagtctttaatgtttcccgcttcccttctccttttattttttttgggtttgtttgtaaaattttatttcttttaattaaaaaatacgctccctgcatattccaaaaaaaaaaaaaagctctttgcaatgttcagagttcagacattcttgtggtgctccaaggagaaatatattcaggcgactgcaaccatagtacagacaacaggcagcatgctgagggatgtcaaaatctgaggtaacaatgtaccacagtaccagcaatttcaatcctcattcttaatttccagttctcatatgaagcgaaacatactcccgccagcagcaaaaacaatagaacatttgccaccatttagttgaacggagttagtaagttgttttaaaggacaaatatagaagcagagacatccatcacatcattatttctaccctataatcattaatttgttgggtaactgggcgcaaaagggaacataggattaatgacatataatgccatttaggagtacctaagaataaaattatcagggtactcaaggatgaaaactctatgaactagaaattgcattgcgagacttcaaaatttccgctgcactgtacttccaatctatctgttgacagctaaatttgacactaaggaagaaatataataaagtttgaccaaatttgaaaagaagctcgagccttctatacaaagccgttctattctgtaaaaaaaaaaaagaattcctagccacaagtcttctataggattggtcttttttttttggacggaggggcaccgaccagtgaccgttgtaaatcgttgtggtgacaaaagcatcaacactatattttatacttatactaattgaatactcaaaacttctaatgttaacctgaaaatggaaaatttagtcgtggattagatagatagcactatcctatttcaaaaagtttaattacatggtctttagatgagaccttctgctagaaaaatagccacaatgtataccgttagcactatgacttctctctcctctaggatcccctctaaaaaccaacaatgaatatgctcttattacatcagcctgcagtgtaatacggaatcttggaactatcatgccctgcaacaaattctgtcccatatggatgcttgatacggtcactacatgagtgacaacgctcatagtcctgattcctcgtcattacataatcaattctcctgttgatctcatggcatccacctacaattaaagcaacatcaacatatcaaataaatcgctgagaaggtcctacaatcacacgtacaaacatcaataaccttacagtaattacaaataagcaagcatattaatcagaatacagtcaattggtcgacaataataaacataccaaaacaagaaccctggaggttgtggatagagacgacacacatgggctcgatatcatcagcacatccaacaatattaggatcaaggctcaactctgcaaagcgttccatcctctttgccagaagatccggattcaatttgagctctgcaaagtacaggctcttcttagcctgatcatcattctgagccctggcagtaaagttgacatgggcgtatgtggacccacagacctcatgaaaacagtttgataaaagaacagtacaaagctcaatcttaacctgaacaaacaaaaaatagaaaggttagtagtttacaacattaagacttatcatgtcatggaaagcaaaaaaaggaaaagggctattacaatgttcttctcaatattgttgtaatggttaattgctaaattggcgaagcgatgagcttggggacaaactttcttgccagcgagctctgcctccatctcttctgcggtcaaatgttgctcactgcaatatattcaaaagagtaatagattcaacagtgtgttggacaaaaccaattttaggtattcacttaaaagtttaatttcacttcaactattgcattctgtatttctgttgcatatacaggacttcaattgttaatgcgttctatctctgaccaccagctaaatgaatcaactgaagttattttataatttaactgttttagtaaccaagaatggaaatgcagcttaaaaaaaatccacatttcttattaattaaaatggttgcaggttctaatatcagtttacccatttacaggatcgtgcaggattcatctccaaagtaactttggcttttctgtctccacctcttccttgtgtccttaggagatctattctaagctgaattatcgatgtcttgtttgctgtgatcactactgttttataagtgataaaaaaacaatgatagtttttcacatgaattttgtactgaggaatataatgggtgcgcaatttcacgtgtgttaggatctacgaaaggaaagttctatttgtatgatgttttcttagtgatgtagttgacatacccatgagcaaaaaaaaaaaacaagaagaagaagaagaagaagaagaagaagaagaaagaagaaggggtttaacatacggtgtatcggagaggacgcggggtcggaagatttgttcgattttgttcttctcgatgtcgatcatcctctgatagaacctggccatctgcgccttggactcgcggaaagcgggcttatcctcctccctgaagcagtgagccttatcgctcatgtccaagctgtccgcgagaagctcctcccatgtcatgggcctctttctcaggcaaggatggggtagcgtgcgagggatcctcctccacctccctggcgtcctcttcttcctcgccggggcctcgcatgcagaccccgccgccgccggcaggaaggtggaggaattggcccccgattgcgacggcgacggcggcggcggcggcggcagagagtccagccattcccgcgcggtgatcgggacggtggatccctgacgaacctggaacatggagtaggtcgccagtttctcttctatggtgggccttctcatctccgcccgccgaatcgcagtctagggttagggttcttcctcctcgcgaactcgatgggagaaagaaagtggtcctgatatatatatatcgatgcgaaaagaaatttatgcatatgtcacggaaatcaacacacgtacatttggctcctgctcagctgatcctataccatataacgatacaaataaacatattgaaattaaaacaaggaaattatacttctgacagatcaggctccgagtccgccgaccatatgtattgcacggcgtcgcggatcacccggagaaaagcggcggccggcagccggcgcagacgacggcgacgttgtgtccacgcggcgggtttcccggccgctggcgtcggcggagcgtgctgccggccgtcccaccgcgacacgcgcgccatcggagggcggttgcaccggggtgtcgggggccatgccactgcctcctcggcaagccgccaccgtcgtcggcgagctgcatgtgcgtcgcggcacaccggggtaccaaggttgacggcggcggaggagagcggcgcggcctccccagcacgccgtcgtcgtcggccagactgatcggcacggcggaggagagcggctcttcttcgtcctcagcaagccgtcgtcgtcggtcggcagcattataaccggcggcgactcctgcagacgtagtccgccgtgtccgagcggccgtgcttggagcagcggaggggcgagccggacgacgtgaagcatcagcagcagcaacagtgcaaggagatcgagacgaactctccatggcgggaagccgggaaggagaaggaagccaatcgagagatgtgatgtgtacgtgtgttgcaagctgcagcgcttcgttttgggtatatcaccgggaaagtattttctacacatggtacctaggtgtatacatgtaatttaaacagtcatataaaagttttataaaatttaataagataggctatgttaatataaaacactatacaaacatacaagtctaaatttaatcgacatacaaagaaaaaaaataacaaattttatctgcactgtacagggactagtcactgtctgattttattatttttgtttctttagttatagatcaaatttagtcatgcatgtttgtgtatagacttatatcatcacaattgatgttactattttttttttaattttttctataactatttgagtatactctacaaatctcgtcaacgagtatagcccgtcgacaataagcattaatcccaaattctataaagttatcaaaactgaaaatattataattgtgagacccaaactaagtacaaccggatattattaattacaaattttgaaatttattaaatcatggcaaacttataattaagacaccaatctgaatacaacttagtttttattgattcagaatttcagacttattgaaacatcgaaaagatacatgttaattaaggtcgaaatactaccatgaggatcgatagatatatatgctagcctacttagctagtgacgaaattaacatgcatgcaaaataaatatacacatgtgctcgtctacttaagctagacatatattcatacagttggtaattaatggtacagtttatataacttcatcttcttcctcggtctcgatcgatcaggcttcgagttcgccgatcacgtattcgacggcgtcgcggatcaggcggagcaaaccggcggcatcatccgccggcgccggcggccggagcgggggatccgtgcttgttcggagacgtggagacgtgataggcggcttgtttccctgcggcgacggcggagcgatccccagcggcggcttcccgtcgtcgtcggagagcggcttcgtcgacccacccggctgaggcgacggcggagtattggtcggcgccctcccccccgacacgccgccgtcgaccccggccagcggcgtcaccggccgatttgactgaggcggcggcggcgccccgccggatcgtcccagctgtcccggcacatccagtcccggcgaggcggcggccacggcctcgccgtcgtcggtcggcagcattataaccggcggcgacgactccagcagacgatgtccatgtccgagcgcgagcggccgagcttggagcagcggaggagcgagcaggacgacgtgaagcatcagcatcggcagcagcttgcaaatgcagggagatcgagacgaactctccatggcgggaatgaaggagatcagaaggaagctgatcgattcgatcgatggatcgagagatgtatgcatgtgtgtttgcaagatgcagcgctcgcggcgagctctttacataggtagggtttaattgcgtacggcgcttgtacttgtcgacaatgtgtgtggcgattggtgagtcaacggttttgttagttaggctgtgtttagatcgttgtaaagtttggaaaaggactgaaattggagatgatgtgactgaaaagttgtgtgtgtatgacaggttgatgtgatggaaaatgactgaagtttggatccaaactttggatctaaacacagccttagtattgctgaaccatcaaaaaatatatatttaatttggatcaactagtcgtcgttaatgtttagtactccctgtaccataatatatataccataatatgagagattttgagtttttacttgcaacgtttgaccacttgtcttatttaaaaaaatttaaaattattatttattttattcgtgacttactttattatctacagtactttaagcacaacttttcgttttttatatttgcaaaataaaattgaataagacgagtggtgaaacgtagtatggaaaaactcaaaatccgggacggagggagtagtaacaggaaaggagcacgaatgacagtatgttgtcagttagttgctaccgtacgcattttttctctgcgagctaaggttgctagcaacataactgttcaacagctattagttacaaaagagaaaaaaaaatgttcaacagcaaggaagcaaccgcgaaaacccacgtgcgtgaatgaccggagctagtgtcaaacttctgcgctcactcgatcgcgatcgatctggccgtgaattggtgagatttttggcttgcagtcacatgaatcttaatgcgagcattcaaaccatcaaaccatgcgagcattcaacgattttttatgcacttaccacaaaccggttgctagttgctacaggctacagccagtcactagcaggttttggaagcctgatggcgaggagctgacagttttgataattgacaacataatcagccaatcaggccatgtttaagggagcttcttgtaactgcaatttcatcttcggctcttcaaacaatctagcttttcatctagattctaagggtctgtttggaggagcttctagtagctgcaacttctcctagaatctccagttgccaaaaactccctcaaacagtccagttttttacccagattctgaaaatctgtagttgtagaatctgaaaaatgaactaggggtctgtttgagggagcttaagattctgagaaacagctggctggttgccagcttctaagaatctgaaaaaactgggtttcccagcttctagctttttattttctggattctacaactacagcttcttataatttagaccaaaagctagactgtttaggggagcttctgattctgggagaagctgcagtagctaaaaactcccccaaacaggccctaagaataagtagaatttagcttgtttttcgtattctcacccgatggctctcaaatttcccaaacaaaacggcattccaatcacacgaatggcagtgactaccttgtaacatcaaggttacaacaaataactaaacgtctaaaccgtgtatactgccgggcttgggggacgctgtcgcggtgcaggttggccatcatcgtgtcctgccaacggcggagcaacagcaaccggccgccacatcggcggcggcgcgccacctccgccgtgttgatgcggcgctgggtgcttcggcgacggcgggatgtacggcgacggcctcaccagcgcaccaccgtcatccgtgctgacgctgctccgccacgccgacgcacgaagatgtggatgggaggagtaggcttctcctgaagcgacaaaaacagcaggagaaatttcgtcagtgaagaacagacagacaaattagctatcaaaccatttgttatacgtagtatttttcacatggtcaatgcgtgatgcgtttggtcagtgaatgacaaattactagctaccaaatgcactcctctctctctcttttttcacatgatgcatgcgagtgaaagcgtctatgttgcctacctagcatccgtgcttgcaacggctgagcgaagaggaggtagcagaggagaaggagaagactatgagacggtgatctatccatgatcgatagatgcaggagcaagctgaagcttgctgcagatcaatcggtacacggatggagaaaggttttgggaacacggtcagtatatatagcggctagaaaccactgaccttgtgtagttgacgagttgtcgaggtttcgagcattatacactagcaatctaccatgtgcacagtcgaaagatgctctctttttttttttgggcccaaagtgggctacctgctttgtttctcgatgcctgcttaactgtagaatagtaatgaagctagagtatcccctacctggctacctctaaatgataaaatctgagccaacagaactgcttcagtgcttggctatatcagattattgctcatctcgtgtcaagattctcagacttcaaatagattagagtgccaacatttcactagtcacaaattgcagattataattatgatatggcagtgacaatatgacattatatttgacaaaaccatgaagtcagtagcggtactagatcaaccactggataataaaacaagtctaggctctagaatcctataaatgtaacggaagattaccggcctctgccatgttccttcaggcattcttgaaaaatattcaggcgactgaaaccatagtacaaacaacaagcagcagagggacgtcaaaatctcaggtaacaatggagcaaagtttccagcaatttcaatcctcaatctttcgagttttcatgaagcaaaacatactcccggctgcaaaaaaaacaataaaacatttgtcagattttagatgaacggggttagtaaggaggcatatagaagcagaggctgatcatcattatattatatttacttttgggcaactagactcaaaagggccctaaatatggattagaaatagtaccatccatctaagaacaaaaagatgaggcttctgaaggatgaaaaccgtatgaactaggaaggggcactgtgtgcaaacttcaaaatctccacagctccgaacatatgttatacatttatacatgattgagcttgcaagtcaaggctccataaaggaaaattatgtttccataatgtagacattttgagattccttgatatttataaacattaatataccacctaaagattcatttggaaattgtattgagaaaaacaattaggcgtagtttacaaagatattacttagattattggagaaaaaatgtttatcccaagagtaccacaaatcaaaataaaagctctaattaaagagaatgccaaaagccagactgtcactttcataataagttgttaatttaagtcatcacataccaaagatacatatacattgagcaatatacaaataaacaaaaaagtgatgctttctttaattgatcatacctactattgccaaacttaatggtatccttttcaaagagttcataataacggctgggctcaatacgattctcctgaaaaaaaaatcaaaacataaatattgactgggtagaaaatattattagaaatgcgactagtgtatctgattagtagtaaaagtatcactggaggacttacattaatgaaagttccattggtactaccaagatccatcagataaggcctatcaaacaaagcagcaaaaaacatcataatctagactagcatacagaactaagataatcatgaattattagtacttgttattaaaaaaaatatatgcgttactagcaaggagtacctcacttgctttgacatcatgccatctggctgctccttctctacaagtctgaaaaggcaaagagatgagtgaatcacaatattatttctcaatctatactccttttaaaagggagcagtggtgatggtgagtggtgaatctgccaccaccccaccaccagctccctagtttttttggaatagaaaaggggggcctacatgtcaaccacccctaccaccaacttcctactttttgtgagaagaaaataggacagtgcacatgtcagtaacaaatatatacataaattaaggggcgatatacacagaaaatgatgataataatgagttaatgataattttctttatttaaaatcctgttgccacgcacaggcaatatgctagtaaaggcaaaaaacaataagattgctatgcttacctatattgaagaactgcatgttgcttactgcaggagggatgatctgtggggatgtctgcaactttccgttcccttccaaaaaggtagctgctcatccggtgaacatataatggttctgttcaatcaagatagcatcacaagacacagtcaaacaagaagagcaaaactgaagtatttaatcactaatgtaagcacgtgaatttttttaccaccgtacacatttaatttataccactataatgcccaacctttaacttgctgttcatcacaataaacttcattacttcagttatttcacttccgttcaaaactaaaactagtgagctatccatacaataccaatgctcaaacagtatcattggatatattcacaagccagtgtatcgtaaggaactgaacaatagcaaagcactaggcaggcttcattattacaaaccaatggtcctgtgtttgatccatcgattgaacaaaggttctctttcctttccccagggctagacaactaagccacagataagggcatgtttagttctcaaagcatgtgaacaccttttatgagatctagacctccactctagttaggcacgtgcacacacgcatgcatttaacttgggtggctgtgccgtgtacacatatcgaccttactctagaaaagaaagagcccttttactccccggggaaaatgtaaataatgatactgattcaatgcaagctcatatcatagtgacccactcgttagtgcctttgctcacgttaaatggttcgttccaaaactctccgaaattaagctagttcgaaaatgtttttatgttccatactcgcttcatcacagtcagttaagcttactgcttttaacagaacctacttttggtttggccatgttgggaagggaaatagagaaacagctgttgaactagacaagaacatgcctctacagactggcaaatccaaaaaatgtttttttcttctatttattaaaaactattaactcgaacagatagcatgacaaaaggaaaaaagttagcttcatatatagagtaacaagtcaagaataactaccttcgagtggttcaccacccttgaagacgtagagtctccatctaatatctgacttgcgagcctctggaggttctgaatgcaacagatttacacctgaaatggaagtaaattgcaaactctgaggacaatgcaatacagcaaagaacaaggaattacaaattctcattggtggttaaacaaacattaatgtaaagtgtaacatttaggttcatgaccaaaaagaaagatatagggcttcaaaacagcacctgcaactctgttagtctcctcagcaagctttccagacaattcaaatgatggtttttgctgcaaaacaccaatgaaattattaaaatactagtgtatgacaaatgaagagaaaggttaaataaaaagaaagctgacatggcaagtattttgtatctgcgaaaacagcaagcatcatataaataaactgtacacaacaaaaggaagattgttattattttaaatttcatcatggagtatgccctaccttttcttttgcttccagagcttctgcagtagcattcatcttcaccaaagaatcaggatcaacactcctggccaaaatagtatcaaatataatattttcagttctaaaatttcaggtacaaaaacattgcgctcatgtagctggtcaaatatacatttgtttgttttaggtactactgctacagttgcttaacggatatgctgatatgcatcaaaagttcaaaaccattccagcaagagggtatgacacccataacacgcgtagccccattgatacaacaagaaaacaattgcaagcaatgcttctactaaaaatttacaattcgtattgaatatagagttttgcatgcttaccgtgacgctgcatctgttacagagcttgtatcctgaaataaatcaaaacaaagtttaggttgcaactaacgggccatatatgatagcaaacatgaaaagaaaccaaattggtatgaaatgaaaaggatagcgggcaactaattatatcctctagaatctgaactctgaagcaagaagggtttacatggaatacagacccacaagtttagtgtcaacaatgctgataacaaggcgtactccctctgtactcgtaaaggaagtcgttttggacagcgacacggtctccaaaacataactttgacttcttgtttctataaaaatatttaatgaaaagtgatatatgtatacttttataaaagtatttttcaagacaaatctattcgtataatttttacattttcaaactcaacttgagagttattcatgatttatattcccaaggtttgacttaaacattgtcctaaactacttcctttacaagtacggaggtagtaattttttttcacttctattcatttgggtgcaggttatcagacaaagaacagaaacaagggacaatcatgaaacaaaagaacacactacgccaactaacaggtggatatgtataagaaaagggtcagatatcattacacacctcaccatgtgctgcacttctagatgacctcggtgactggcgggattcacgtctacccctatgcctatgctcttctggagacactgatcgcccacgcctagatgatctccctgattcaccattgctctcatcccggtctgcccttctctctcttgcagaatcccttctatcatcatgatctgccctttgctccctggaattgacttttcgatcatccccatcagaccttctaccccttgaatcacgcctttcatcatctcggcttgaccatgtctcccttgaagcacccgaccgatcagaccttctatctcttgagtgatccctatcatcatcatgatccagtttcctgtccttaaaagagcccctactatcctccctctcagtctttctatcccttgacacatcctttccctcatcacgctccctgtacctccccgagtcccgctcttccctgctggtggtcttccgacggtcaccctcagtagcatctgcaccttcccgctcactctgagcccttctcaatcgtttgctccgtggtgagggcgaccgagactcccgtttcctggcaggtgacggagaccgtgaccgtgactgagcttgtttcggcgacctgacctgctccttcaccctatctctctgtggcgacctcccaatactcctaacaggagacctcctaggtgagccattcctccgaacaggcgacctctccctatgtgagctagtagtcttaacaggagacctcctcctaggcgagcgactcctcggagccggtgacctctccctccgagcaggcgggctccgcctgcgcggcggcgagccacggtccctcgccggcgagcgcgacctcgagcgccccgacctccgcgaatgctccctccgctccaccgccgaagccattccccacctggagcagcatcacccccaaaccaaaccgattcagaacagcactacgaagaaaaatcgcggaatcgctagggttttgtgcggcctcagtccgaggagccgccaaaaaaaaaaagagggagggagggagggaggaaggggagcgtaccgggtgcggcggaagcggatgcggagtcgtcggcggcgaggttatcgccggtggcgaccggccagcggcgaccgcgaaccgagggtttcttctctgtgagggctcggcttcagagaacaatccggaaccggaggcggagtccgggaaggctgtacaatatcaagacgaccgcgaaagcccaatagagagcccaagttgctaagcgacggcggcccagttagatgagggcccatatggaagactctgtggtggcccatagggaataagttcatctagggtcccttaacttgtcaaggaatccgattttcgtccttcaaccgtaaaaccagatactatgggtccctgaactatcaaaaccgatgcatattaggtccctcggcggtttcgatggtggttttggctgacgtggcacctacgtggctaatttgactcgatcacgatctgacgtggcactgatgtggcaatttgatccggaaaaataataaattccgtgggacctaaatatcagtttcacacacaaattaataaaagaatggcggggtccacgtgaccccacatgtcagtcaaaatcacccctcctcttctgcttccggcttgccgctcgccgcgacgacgacgacgaccgtggatgcggcgccggcgctggcctcgacgtccttgctggccggcgtcgtcgtcgtcgacgacgactcgtcggaggacgaggtgccgtcgacgtacatcccgatggcggccttcctgacctcgagcacgaacagcagcagtgtgagccagacgatggcctagaagacggagagctggacaacgagctgctgcgccccctcaccgtacatggaaggccgtgaagatcgagagggcaacggccatgaaccaccagctccaccgctgctttgtatccacgagcaccggcaccaattgcgggtcccacgccagccgccgggtctgctcctccgcctgccggcacgcgtcgttgtcgggcatcaggaactggatcagcaggaggtccagcgactgcgccgtccctccctgttgccagcggcagcttcctcctccctttaccttgctgcaatcgcccggcaccggcggcgggggtgagcaggcagcaaccacccgccggcgctacccgcctccgcgccgtctcgccgtcaccgacaccgcccgcgccggcggaggcgttcgggtccgatgccctcaaggagactttctccgttgacgtggtggcggccgaggcgcggccgctgaacgtgcccctggccgcgcccttcaccatcgcgtcgtcgcggctggagaccgtgtcctacgtcgccgttcgggtggagctccgcagcggcgcggtcgagtggggggaggcgcctgtgctgccctccgtcaccgccgaggaccagcccggccgcctttggtgcccatcccatccgcatctggcgcaagagagatgaagagaggggagctggggagaggaggaagatgggaaggggtgagttagcctgacatgtggggcccacatgggtcccattgttttttattcttttgtgtgaaactgacacgtgggtcccataggttttattttttttctggatcaaattgccacgtaagcgccacgtcaatgccacatcagatgaagaccgagttaaactagccacgtagacgccacgtcagccaaaaccgccatcgaaaccgccgagggacctaatccgcaccggttttgatagttcagggacccattgtacctggttttatggttgaaggatgaaaatcggattcgttgacaagttaagggacctaagatgaacttattcccacccccataattttgaagaggaaaaagttcactttgggtccctctatttgtcgccccgtccgattttcgtcccttgaccgcaaaaccgggtactacccatcccccaacttacgaaaccgggcaaacaaggtccctcggtgattttggatgacgtggtgcctacgtggcttgtttgactaggtctccgtcccacgtgacattgacgtggcaattaaacctgaaaaataaataaaccttgtgggacccacatgtcagttttacacagaaattataaaaaaggtggggcccacgtgggcccacatgtcattctctcccccttttcctccaccccatgttccaccgcattctcgccgcccgcgcccaccgacgacacgaccccagccgccaccgcagcccggcgaccggtggcgccgcccacctccctgactcgccgtggccgctcggggtaaggcggttcccctgttgccgctcccgctcccgctcccgccgtgccgacgcaagagaggaccgcgcccgcccggctgtcgacaccccatcggtggaggaagtcggccaactgcagcagccacggcacccggcagctccgcccgcctcggcggcgctaccgcggacagcgacgcacctgacgacgacgccgcggccgctccccccaccgccgagtcaacgctcctctgcacacgctcgcctgcagagcgcgacgcccgtgggctcaacgactgcggcagccagggccacctcccaccaccccttcctctcctgccggccgccgcgcgccgagcaccactgcctctccaccgcgagagagaggggagaaagagagctgaagagagggagatgtggatagaggagaaagaaggtggggctgaggatgacatgtggggcccatgtgggccccacctttttattatctgacttgtgggccccgctattttaaaattatttttttgtgtgtagctgataggtgggcccatggtttttattattttttcaagatataattgccacgtaagcgccacgtcaaatgccacgtgggacagagaactagtcaaacaagtcatgtaggtgccacatcagccaaaaccgcctttaaaaccgcagagggacctcgtttgcccagttttcgtaagttgggggacgggtcgtatccggttttgcggtcaagggacgaaaatcggaccgggcgacaaatagagggacccaaagtgaacttattccttttgaagagaaaatccaagaaatgacaagcaccaaatttcaaaaaaaataccatcaataaatacgagttctatgaaatatcatcgtacaagtgaattcgtcctagaaatgtcatcaccgttaaggttccgttagcagtccatcctgcagcattagatgtgttgtttatcctatagcatttaacgggaggctactaacagaatcttaatggctatagcatttctaggataatcctcttgtacgatgatattttatggaacatacactcatatatcgtatttcttggatttggttgattgtcggtggtatttcttggattttctcaaccacaaactagtccagcccaacacttttggcagtgcctctccttttttttttcttttccttttttgcgggtaatgcaacttttcattttatttcactagggaaaggaagaatttgagacacttaacccgtcagatacactgttctttttggactatggaacgtggggacttcataagaaatgtttttttcaaaacagtcaaaattcattatggattattgagtctacatcttatgttaaatatatataatgaaatcagtttatactgtaattgtcaatcactaccagaactcaccatcaccatgtcccctactgttttttctgctagggaacagcctgaaactagtagggaaacagtttccctacactttttcgtagggaaaccttccatgggaacatattcgtggggaaataaaagtgccctacgatttcagctataaaagctagattcctaggatatgaaatggtagggaacattgcttacatggcatttgtgatccacattacatggcatttgtgatccacatgtaaagtgacttcccctatgtttctaaaactgtagggactttttatttaatatatttctcctagctgtgccatcacacaattatttccttttaaaatgttcaaatagtagggatatttttatatgcaatatatatctgaatattgcaccaaataggcgattcactcaaattaaaaataattaaataggtaatatatatcactaatcttacaaaccaaatcaacacgagctctcacaaatcttccatgaataatcattacttagataagcataaagatcactgagacactaatagaatcagttacatagttacataggccgtgtttagttcgcgccaaatttagaagtttagttgaaattgaaacgatgtgatggaaaagttagaagtttgtctgtatagaaaagttttgatgtgatgaaaaagttggaagttcgaagaaaaactttgaaactaaacacggcctatagtgaatcacaaggtttggcaaaaggtttgcaagcagtaaacacaagattccagatttgcccatatttaatgctgccttaatgccaatcacacagacaaccatcacatgtattcaggtcacaaaacatgatggtcaatcccacagctgctgttgcttcacaaaatacaatcatccagatgcagagggagggctggcagtgaacctagtgcttcggcttctgctgttgctgttggtgctcccatacaacaacaagaacatggcatacataatcacagcaaaaaagtgaaaccacaattattcatgcaataggaaccgaaaaaatgttctcaaacatacacagcagtcgcaagcattacagtacataaccatgtttgtgctttacaaacaactttcaagaacggttaaccaaacaaagtgcaatggaatcatgaaatgcattcatcggatcgcaatcatcaaacacttcttctgtctcaggctgatcggcagtagcttgtgagggcacatagttctcatcacggtcacaacgatcaaagtgcttatcccgtatgccactaaccctaatgaagttatggagagcacagcatgcaactatgattttggcctgtttattaggagcataactagagacctttttccaacatgcgccacttcattttcaaaactccaaatgatctttcaatgacattcctaagagatgagtgtgcatagttgaatttttcttccttaccttgaggttcagggctgtctcgatactcctgtagatgatatttggttcccttgtaaggtgcaaggtaacctggccggttagggtagccggagtccacaaggtaatactttcctacagcaagaaacatcagttagtgccacattctacaactaacaaatcaaaatgaagtacaatgcaacactatacctgtaggaggatgtggaaacacatggttgtatgttgagtgtgcatcatcaaatactctcatgtcatgtaccgaaccaggcccatccagatagtacaaatgtaaacctcatgtcgaagtcacatgcagccatgacattttgtgtggtcatgcccttgcggcacaagtactgcatgaacttgttgtttggcaccacgcaagggacatgagtcccatctatagcccctatgcaatccttgaagtagggatagaacctacggttcctcagtcttgggtgcattgttctgaattgcgggtccacaggctttatgacatcaacagcaagcttgaccacagactgcaacactttgttaaacaagctacttacagtccccatggacctctcaaatctgtcctcagcttgcctaactgattgtggggtgccaaccatccaaagaaacatcgcaagagcttctaccgaggtggatttgctactagattttaggccataggactgaaccaataggtcatgcaggaggaggaacatagttggactcattctaaacatgttataacatgcctttctatccccaagcttattatgtacccattacaacccagtcaaggcaggttgcctatactcactctagtcaaatgcttgtcaatgtggatggcatactgaaacataacgtggaagaaaccttcgtcatcatcgtccaacaagtccaacatcatcttgtttaagtcttcatccatgcgctgtcttcgagcacgacgattgtgggatgctgacaacgaccacgacgagaatgacgagaataacgacgaccgcgacgagaatgatgacgacaacgactgccctgcatcctgtcaaagcaaacaatgagttatgttagtaaagaataacaaaacatttgcaaataaatctcagccatgcagcacatagttcaaatcagcaatgtattaaaagtgcatcacacttagtaccataacaatgttcatataacagacatcacaaccatagtacacacatacataatcatacacaggattgaacaaacagacaataatacatgaacttaaaattaatgacacaacagaacatgagatggactagttgtcgacctcaacatatttcttgatgatgagcatccttcctgctggacaggtgtgaatgaatgcatccatcgcgctaccattctgggtaatgttgaccacgcccatgaacagctttgggcttccttctggagtgaccccacactccggccatctcgagtacctttttaatcttcatctcatgagcgttggcttgagcttcggcggctatcatatgggcttccgcggctctcctttcggcttcggcggctttccgtttggcttcggcgacatcctgcataacttgcaacatggattgcattaggctgattttgctcctttgaaggtcattgtactccctcatgttgctaaccattgccctcactgctggactcttggactttttacttggactcgtccttttgttgccaacactaagaggggtcagctcgtcctcttgctcatcaccatccgcttcgtcagagctatcacactctataggctcctcggcagtggccacaaacgatgcggaaccatccacagcaacaccctcaaacattcggtccatttcaggcaaatattccggcaagcctggcctaaacttcttccaatcagaatgtccctgcacaaagaagtcatatggcatgaagtcctgaaacaaatcaaatacaaagtttaggttgcaacttacgggccacatatgatagcaaacatgaaaagaaaccacattagtatgaaatgaaaaggatagcgggtaactaattatatcctctagaatctgaactctgaagcaagaagggtttacatggaatacagacccacaagtttagtgtcaacaatgctgataacaaggcataatttttttcactttctattcatttgggtgcaggttatcagacaaagaacagcaacaagggacaaacatgaaacaaaagaacatagtatgccaactaacaggtggatatgtataagaaaagggtcagatatcattacacacctcaccacgtgctgcacttctagatgacctcggtgactggtgggattgggattcatgtctacccctatgcctatgctcttctggagacactgatcgcccacgcctagatgatctccctgattcaccattgctctcatcccggtctgcccttctctctcttgcagaatcctttctatcatcatgatctgccctttgctccctgcaaatgcctttttgatcatccccatcagaccttctaccccttgaatcacgcccttcataatctcggcttgaccatgtctcccttgaagcacccgaccgatcagaccttctatctcttgagtgatccctatcatcatcgcaatccagtttcctgtccttaaaagagccctcctccctctcagcctttctatcccttgacacatcctttccctcatcacgctccctggtggtcttccggcggtcaccctcagtagcatctgcaccttcccgctcactctgagcccttctcagccgtttgctctgcggcgatggcgaccaagactcccgtttcctggcaggtgacggagaccgtgaccatgactgtttcggtgacctgacctgctccttcaccctatctctttgtggcgacctcccaatactcctaacaggagacctcctaggtgagccattcctccgaacaggcgacctctccctatgtgagctagtagacttaacaggagacctcctcctaggcgaccgactcctcgcagccggcgacctctccctcctgcgcggcggcgagccccggtccctcgccggcgagcgcgacctcgagcgccccgacctccgggaatgctccctccgctccaccgccgaagccattccccacctggagcagcatcacccccaaaccaaaccgattcagaacagcactacgaagaaaaatcgcggaatcgctagggttttgtgcggcctcagtccgaggagccgccaaaaaaaagagagagggagggaggaaggggagcgtaccgggtgcggcggactgcggcggaagcggatgcggagtcgtcggcggcgaggttatcgccggtggcggccggccagccgcgccggcgaagcggcgaagcgagggtttcttctctatctgtgagggctcggcttcgcagagcaatccggaaccggagtccgcgaaggctctacaatatcaaggcgacgcgaaagcccaatagagagcccaagttgctaagagacggtggcccagttagatgagagcccatatgggagattctgtggtggcacattttactagcgtcaccacataattttgtagagaaaaatccaagaaaaaccattgacaaacacccaaatctaaagaaatgtcatcgacgagtgcaagtttaataaaatatcatcgtacaaatgattttgtcccaaaaatactatcgtcgttagggttccgtccatcctgtgacgttaaatgtattgtttatcctatatcactaaaggaaagctgctaacagatccctagcggcgataccatttttgtgacaaatacgcttatacaatgatattttatgtaactcgtacttgttgatagcatttcttggaattatgtgattgttaatggcatttcttaaatttttctcaacctcaaactagtccggcacagtacttttggcagcgcctccccttttctctttttttttccttttttgcggttaatgcaactttttatttcattaacccgtcagatacgctgttctttttggactttggaacgtggggacttcataagaatttttttttcaaaacagtcaaaattcaatatggattattgagtctacatcttgtgttaaatataatgaaatcagtttatactgtaattgtcaaattatggactactaagagacaatgttccacttgtttaagcacggactgttcttgtgaaatatccttggtaaaaaagggaaaaagatcatgatatctccagcattccacagtcaaaagttcatcctactatcctatataggggtggacaaaaaagcttgggctcgtgagcaggctcgggcttggctcgagctcgcaaaagctcggctcggcttgaaacctaaacaagccgagctcaagccgcctgcgcagctcgtttctaaatcaagccgcgcccaagctagcttgcaagccgctcgttcagctcgtcaagcttttgcataaaaatggcctagcccattattgtcgctggtgtggcccaaggcccatcaaaaatcctaagtccctaacctattcccccaatctcccacccaccccacgcataggcagccgttcttctccccttcccaccacgcgagacagcgagtccgccactgaagcctttcaacgagtccgcccgcctccttcaacacgaagtcgcgccgcgactgcatgaggaactgagggagtgaggacatcgaggcactgcgctgtgtcgtctcctgcctcccctgcggcgcctcttccctccgctacaccgccggtctgctgcctccctcccctatggcgccgcctccatcccagcgccgacagcccaccatctccctcccctgtgtggctgcgccgcggccttgctccccaacggcgtcgcctccatccccagcggccaacaccgccggtctaccgcctccatccccagcgccaccggtccaccgcctccctcccctacggtgtcgatgccatccatcgcctcgctgcctgtatctgaaccaagctagctcgagctttgaaacgagccgagccgagccgctattttagctcgtttcattaatcaagccgagcctattctttgtcaagctttcacgagccgagccaagtctggctcggctcggtttggctcggctcggctcgatttcacccctaatcctatacgcccacttgttatgcgaactttctatcgactattgaccttcagtgtaaggcaataactgcttccaccgaacaagatacagtgcttagcaccaccaatctgacaaaatcagttacttgattactcatctcaagaagagaaaaacacttgatcttcagaggtagagacgctgagtgtgagtggttagccaactgccttatccaacatcccaatgtgacaacggtttaatgccagtgcgactggccggaatcaattcagaattacgattggatgaaagattttggtggagttggccaaaagcccatgtatacgcttctctactgcattcctgtttcgtcaatcaaatgatcacccacaatcacattgatgctgatacaattattcccctaaagaacgtagatatacaatatcaaatggcatcttttcactttggtcaacttcttcatcgaataaactatatctgcagcctcatcaaaagtcaacatccattgcctaaagactgaagttcgaggtgcccttttccctgtacctcctctttttgggacggctgttgaccccctttatttcagaataagaataactcggacgttgactctgccagtatctgaaacaccaagtaaagcacgcagacatttttcgtcgactgcgcatcgttgtcaagcaacagatgttgacaaatccctcaaaagcataatctttcagctcaccttcgtcagagatcagagtgaggcataacacaagtacacagcatatgtaccttctgctcttgcgagccacaagaaataaaccaagaattcacggtcgaaaatccgagctgaaaacgaagctgaaaccacagcacaattcagagagtgatcaccaatgatcggtgaaatgcagtgctaaacggcaaaaaggatggaacagatcgtccaaagtggcactctgctggcattggtgtcacttgtccgtacacacggttcatactactttcagagctcgtgtccatcactttcttatctgctcatccctaccgatctcgcagatcaaaccggacgcacaatggccgatctctcgtatccctgtccgatccatcactcgtcaactgcaaagttttcgcgttcatgcctgcacatctgcttttggtcaaatggcaaactgagttcttgtgcacttggataagaccagttgaaacgagttcttctttcagagcggttgacctgctacagagctggagccggtgtaacgaaaaggggcccttcaacttttggcatgattgtaacaggcgcaatagtggattaaacaagtggaatgcccaatggaattgcactgggactggaaggaatttttctacaagaaaatacttcgatgcaatcattggttgatgagccttgatgtcctgtaccgtaagagcaggtacaatagcaaggctattagccagctataaacatattttaataagataaaagatgagatattttaatgagataaaagatgagagagaagagtagcgggctacagatctgtagccagctgtaggaaggactccaagacgcaatgtgtatatgacatgtgagatcatatgttaatagtgtagtaagcaactattgtatgaattggctattagatcggctatagataaattggagctagtagtgggctatactattaaacttgctctaagaaacaagaaactgtaatgaaaggttgacctgtagtggtgagagtattgctggatttttcacattttggtgcttttaaaaaacttatttcgcaaatagacccctgaaaaaacttatcccagaaatggtcctttttggggcgccagagcgggacggcgccagcctctctggcgtcgtcctcctgccaccgtggcgcacgcgaaccgacgtggcaggaggagggcgccagccatgctggcgccgccccagggaggagggcgccagcatggctggcgccgccgcctccattcctgtttctctgtatggagttgcaacggtgtcatttttattttattttttcggatgttttttcacactcaggatcacgatacaacaaaccacaaaaaaaatttaaactcgaactaccacttagtctgaaaatatctagcataccacttaatctactttgcaccttcactaaaattagaccataactcttttaataaaaccctttgatcagcatgttaaacataatgcactctaccactatatgaaattacttaatctaattcaaaatataaccacatgaaatgacatatataagttaaacagtacatagagatgcaattttttatttttattttatttttttgatattttttttatacttaggagaacataggaaccaaccgtataaaaaataaactcaaacggacaaaatatgtgacatgtagaattttccaaaactctaccgaaacggacaaaatatgtcatctattaaaataggcgtaactttctcatacggactcggaatcaggcaagtaatatatgcacggacatctacagaaaaagttacatccgattctccctgcttcgccgggttcggcgatattaaaacctccaaattccgcttgcaagattgtattttcgaggagagaagtttttcggtagagctttggaaaattccacatgttatatatttcgtccgtttgagtttattttttatatggttggttcctgtgagttcctaagtgtgaaaaaaatatcaaaaaataaaataaaaataaaaaagttgcacatctctctcctctgcactagttcggagagagaggagaggagaggagaggaaaaattctacatgtcacatattacgttcatttgagttcaatttttctatggttggtttttgtgtgtccctaagcgtgaaaaaaatatcaaacaaataaaacaagaataaaaaatttcggggggtggcgccagccactctgacgcactccccctagccacctcagcatcgccccgccacgtcggcagggggacggcgtcaaagaggctggcaccatcctgttgaacgacggcgccagccactctggcgcccaaaaaggaccatttttagaagaagtttttcttggggtctatttacgaaataatttttttaaaaggaccaaaatgtgaaaaatccaggagagtattgccatccttgctgtttgacttcggcgaagcaaaggcaggtttttttggatcccaaaatgttcagttttcatgggcacgagccgtctgaacaacgccgctagcttttttcacaccgtgagatctgacgcgcttgcagctctgcaaaggcttcgagcagctgccgctgccagcaccggcgctagctgcatcctactcatcgtataatctgtgtgctatatactcactgatcatgcaagcctgaatcagaatcaggatatcccgatcagcgtctttgtcttgtaaaagagaaaaaaaaacatatatagattttcagttcccggcacgacatgatccgtgaacagtagctacatagccgcggctgtatttttttttcctctcttgggaacaaacggtgtgccatggcatggtggtttgtagaatccaccgaaaacggtagaattttcggcaatctgtatcgtgaacgacggcaaaattaaaggggttggattcttgcttttgcttggctcggcggtgaagtggagtggagtgagagggaatcaaccgaccgcggcgaaaaggggagggaccgggccaccgatcgacgcaaggcaggcggcggcaagggaggacaagcacgcgcgctggtgatctcacgctggacaagcaagcaaacgcatctgactcctcacacgcgacgacgagccgtccaccccatccatccgcttggccgccccgcgccgcaaagcgccgcgctctcgctcgcaccactttcggtcggcgcgcaggcgcagggcatgggccacgccacggtgcccccccccccccccccccccacacacacacacacacgctcgctcgctcgctcgaagcgccacttgtcccggccctgcgctcgacgtggccagcgacaccgagccagcgcgagtacacgtcgacgacgtcgtcgtctgtccctgtccggccccgcctcggcgtcgtcggctcgtcgcagcggaattcctgcctgcgtgcgcgcgccgtggcgtgttagtgcactaccaaggctgtgtttaattcacgccgaagttggaagtttggttgaaagttggaacgatatgattgaaagtttacgtgtgtaggacaggttaatatgatggaaaaagttagcgcatgtctagattcgtagtactagtaaatgtctcatccaatcctagattattatattatgggacggagggagtaggcaaagactgtatttagattcaaaattttttcttcaaacttctaacttttccgtcacatcaaatgtttgcacaatgcatagagcattaaatgtggaaaaaaaccaattacactgtttgcatgtaaatcggagacgaatcttttaagcctaattacgtcataatttgacaatgtgatgctacaataaacatttgctaatgacgaattaattatgcttaataaattcgtctcgcagtttacatgcagaatctgtaatttattttgttattagtttacgtttaatacatcaaatgtgtgtccgtatactttaaaaaaaatttggcacacgaactaaacacagccaaaaattgatcacaatccaaataatatcaaagtgactatttgaaactaccatattttgacatggcacaaattggcactaaggttatgtacaatggtttttgttagcggtctctctttattgtcatgcaagaatatttggtgacgtgaaaaagagaggaagaaggaaagagaaagatggttgctacgcatgacaacggcgtagagtcgagtcttaatatttattaggaaatttttttgttgcgttgagtctaataaaggaaagatgactagtaagaaagtattttggtatattaatggttagagaccgtattgtcctaactattgtaacgtgatagcctctaattaacgtagtccatatcgatctctatttttgtacttgccctaatccaaacatgctctgcgttacgttggtgcagtgaacatgcatgccgcggctggtggatggatagcttgtgcatcgtgcataaactgcatatgcagcgaacgggtgcgggaatatgcatgtgtgcgcgcggcgcacatgccgccgaggagaagcaggggaatttattactcatccgatgatcaggagttaaaaatatgaatattatactactactccggtcgaggagccgccgacgtgagaagctttttacgggtgaatttaatgaacgtactgtagtattgaatactggtaactgtcacagtactccttcacaaccgtgtccttgattctggaacaagacacggagtacgtatatctagctgatgtatctcggtgcgtttacctttttttgtggaaacgaatttcatcttccaagtctttgcaaaaaaacggtttctagatacgaacaagctgttggaatttggatggaggttggaagaaacctggtgttggtggcgctagaccataaaaaaaacaatcctgtggtggactcgcaacaggccacagtgtcaagccacccaccgtggcccccccgaagagcatcctgcatccaacacccacagcgccgcgcctttcaggtgcacccgctgacttcgaccatcaaaattcgtttatacccgtaggtctccgcttcccatcccaaatcaccaattgcatttcaccaaaaaaaaaacctgtattcgaacgaacgacccaggactttgacaagtaaattcccagtgacctaaaaaaacgccaaagaaaatttcagaacacttgaaccagtagcgagacggaggaggaggtgagattgacgcggagggagacggacggaagaagccgcgcgttcccacggcacaacggagtcgacgctcgtccatccatccatccacaccgcgagcaaccgcgtgcgcgaaaaaatcccccttgcttcccacgctttcttttccttcttccgtattttcccataatccccctcactttttacacacgccaaaacgaatttcccccatgttccaaacttccaaagcttcccaaataaatccacaagcacaagtctcccctgccctatatttctccccctctccctatatataactctcacccgccacaaaacaggtaaacaactcgccacaagttagctcaagctcgagacaaagagggaaccaacagaaaccaccacggcggcggcggcgcgacacatcaccggagagatggcggtggcggtggcggcggcggcggcggtgagcaggcaatggacgagggtgcggacgctggggcgcggggcgtccggggcggaggtgttcctggcggcggacgacgcgtcgggggagctgttcgccgtcaagtccgtgggcgcggcgggcgcggcggcgctgaggcgggagcagggggtgatggccgggctgagctcgccgcacgtcgtcccctgcatcggcggacgcgtggggcgcgacgggtcgtaccagatgttcctcgagttcgcccccggcgggtcgctcgccgacgtggcggcgaggtgcggcgggcggatggaggagtgcgccgtcggggagtacgcggtggacgtggccagggggctcgcgtacctccacgggatggggctggtgcacggggacgtcaaggcgaggaatgtcgtgatcggcggcgacggccgggcgaagctcgcggacttcgggtgcgcgaggtgggcggattcgggccggccgatcggcggcacgccggcgttcatggcgcccgaggtcgcgcgcggggaggagcagagcccagccgccgacgtctgggcgctcggctgcacggtcatcgagatggccaccggccgcgcgccgtggagcgacatggacgacgtgctcgcggcggtgcaccggattggctacacggaggccgtccccgaggtccccggttggctgtccgccgacgcgaaggacttcttggccaggtgcttgcaacggcgccccattgaccggagcacggcggcgcagctgctagaacacccgttcgtcgcctccgccgccggcgacggcaagccggaggccgcgaagtccaaatgggtgtcccccaagagcaccctggacgccgcattgtgggagtccgacaccgacgaggaggaagacgacgagctgtcgcagagcacggccgagaggatcggttcactggcctgcgccgcctcgtcgctgccggattgggactccgacgacggctggatcgatgtgatctccacccctaccgaagaatcctgcgagaccaccacctcgccggccgacgaggagacgacgactgacctcaacggcgacatcagaaccgcagaattcgagcttccccacattgacgtggacagcggcaatggcaacaccacccacaatgtgggagaagccaatgctcagcacattatttccccttcgaatttagttttcgatcaagtactatgtaaaacaccattttgtaacaaacacattgcaattgaattcataccatgttttctcctcacaaatgtttttctccccctttcgctgctctgttcatacgctcctcacccttagtctctgccctcctcctatcgcgccacgtgtccgcgaatttaccggccaaaattaactgcggtgaccaatacgtgcgggagtgaaactgcgcggcagcttgcttgctctgcaagtgcaacactgcgcccgcgtagtaggaatgagaaatcgatcagcttcagcagttcagcttccccaccacggcacatacacacgcccgaagcttcgcttccgacgcgaaagggatcgagtcgagtcgacacggaaagcgcatcgcagcagcgcagcgtcagggcggacgcagaaagggggccgcgcgcgcgcgcggtcaatagccttcggcctctcgtggcgccgcggcagcacagacagcagcatatgggcccgtgtccattcagcaaaggcgagagagagcgagccgacggtgaaaggcgcacaaggggaagaaccgaagaaaaggagttaacaaaaggtgcccattttacaagtaagcgtcgcgtcctactactgcgagcgagcgtgcgtgcgtgcgtcgttgcggttgcttccaccggtggggatccggcatgggaacgggatatgctactactgccaacttcggtgtgacggtgtcacggtccgattcgtgattcgtccccccgttgtttttttcctctctctctctacgtgcaattcaccgcggcgcggactcctcctcgatcccgtcgtgcgcttctggatggcgtacgtgtcgggtgcgggatgaggcggagtcggtgttccggtgggtttaacggttgacgcccatatgcttttagcttttccgatgtttgcaagactgcgaaaaggctccgtgtagattttattattagtcgacgcgatgacacgacgcgtacgggacgccgccgcccgttttatcacaaaagcgagcgatttgagcggaagtcctatgcccgtcatttttggcgggtagaagtagaacagtgatcgattggattagcatgagagcatggatgaacattacacatgctcatcgtgcctggaccgccgtcagcaattgaaatcaacgatgcaacactctccctctggttttttaatttgtagtgatgttgacttttgcatttatatttaaccaaacattttattaaaaaaattatatgtaaaataaaaaaataatgcttaaaatttttttagtgataaaataaatcacaacaaaacaaatatatgataattatgtaatttttgatatgatgaatggttaaacatatttctaaagtaaatgttaccgtgcattaaaaatcaaggagagtacttcttacgacttacaagtaattacagataagattgttaaatcgcagattctaaatcaaattaacataaggtgtcatggtgcttaccagctgatgattatatagtactcccaggcgatacatttaactacagagaggtagttgcatatcagacgtttgatagattgcccctctcgttaattaaccacccgcaatgcaaacgtaagagccagcgtcatccacgcataacgcatacgtcgatcgaaatcgcccggtttggatttggtcggcgtctccgcaagcgcgtcaacacaatcccggtcgccaccgcgagccgtacaaccctgaaagctgtggacgccatcacgccatcgagctgggcgcctgggccacagtgccacttcccccgcaccggcaccgcggcgccacgacggagtacgtacgtgcgtgtggagtccacgcgcagccgagcgcgcggcgcggcgtggcgttgcgcatctcaccgccaccaccaccgcgcctcctcgccgtgcgtgctcatcatctcgttctcatccggttgccgagacggacgagatgccgagccgccaacccgagcagcgcagtgcgatgcgaggcgcggcccgggctttcggttgctgatttatttattatttttttcgtttttcttttcctccgggagggtgtgcgggtgccgctttctggacgctttgtgcttttctgttgctttcgccgccattctcctccctttcaagcaacggggccgcccgatcgatcgatcgatcgagtgaaggaatcttaaaggtccggagagatcttccggaccatcggatgtgcatatcgatcgctgtcctggctgcgcaattaaaaccagctcatggaattggcgtaataatgactgattagagagagagagagagctcttttacgcggaggggttatctcacatgacatgacaggatcatcaccacagatattttattgttccaggctgtagccaaaatcttcttgggagccaagcaaaaccaagtactactactagtactagacctgtagtggtagtgcatctgatagaatattcccttagcttaaacatgattggggcaaatgacagttgtgatttatactatctcttgtgcaagatgagttaggtatgcggcaaaacggtggtgacaattgttgggcacgcacagtcggactgggatgggtttggttggcagccggttggcactagttagttaagcttgcttggtgtgtagttatctgaacaaacccaagtcaaaaattacgttgtaatattctaacttgaccggtaattgatcgagctagatacaaatatccaaaccccaaattgatgtcccaatacaggccttccaatcattagaccccatgataccaccgaactaattaaccaaaataatcaccagctcagcctaattaagttcggtggcgtcaaaatatggcagccaacatagatcagcaatataatagtggtactactagtagtatactcacgcgacgagccaaagccaaacggccaatcatgaggcggcgaaccgggccgcgccatgtgtgcgcggtcgatcgcttgtgcaacccaccaaaaccgcgcgtttttcatctggaatttttttgccgtttctccgtaggatttgccgtttgtccccaccgtctcgctctcgcgtgcgcgatcgttaggccaccggcgcgcgcggtgccggcgtgccaactggataggcattggctacgtgtatcgcaccgtctcgtttcgtctcgtctcagccagccagatggtcattattgctctccgttgcagctgttcgggcagaaaccaaccgatcgagcgagattttgctaaggacttgactcggctgggctgacttcacactggcgaccctggctggctggctggctcccattgtttaattagccgggggaatttgattactcgctggtcaaaaatcaaattcgttattgtttttaaaacgagagaccatcgatcgtaggtcagaggagatacaccgacaaagacacaaagtgtttaggacatgtgctactacttctcagaagcactcctataaactattcttactgtgtgtactgtgttggtcaatgatcttatgcgttctctttgaagcccacagcttcgcgtttctgatcttccagtcgtactacctcctacctcgcgtgcttccggcatgataattgcaggatgttgctattcatttcttgcaatgcctaatattttccacgaggatgatgcgaaggacaaatgtgaattatactagtctactactatggcctgtttagatttaaaatattttctttaaactttaaatttttccgtcacatcaaatgttttaacacatacatagagtattaaatgtagacgaaaaaaaatcaattgcacagtttatatgtaaatcatgagacgaatcttttgaacctaattacgtcatgatttgacaatgtgattctacggtaaacatttgctaatgacggattaattagccttaatagattcgtctcgcagtttacagacggaatctataatttattttactattagtttatgtttaatattttaaatatgggtccatatactttaaaaaaattggcacaccaccaaaacacacggtatatgagaaaggaaaacagtgagcagcaacaaacaatcgctgcagcttcttcacacttgtcaggaccccagcaagaagatccgtgaactgatgaacctaccaacctgcactttgcccgcgtacaggcacaggtgccacgttcaagaagagagagagagagagagacagagagagagagagttagatgggaaccgaaggaacgtgagccagatggcagaaatgcagccaagtgatcggtccagaaaacaaaagagatatagctggggcggtagcgaggttggatcaactacgctggtgcatacttgcataatctgagaaaattgacaagagttgtataccatttgatggaagcagatccgaaaagcaactcaattttagtgggtaatgcaatgaacatgattttatcattttaagtttgttcacttcgctaccatttttaactctatcaattttgacattactaaattttagtaaggcaacaaatcaaacacatttttgccattgctaccatgccaaaattagaaaacccagaagctcttactctcaaaacctcaatcaatatttggtaagactttaaactaaacgttgataccaaaatttagtaacaccaaaacgtgctaaatattagtaacattgaaaataacaataaaatgaacaaagcatttacttcgttgttaaaagcattgggtaggataaattaagcactgttatttcaagattttaaattcaaccattaatagagtagtatcatttgacagtcccacctcgaataaaatcacacaatcccgtcaattcaattgaaggattaaatttctcattttatgtaaaaggattaacttagagcatcgaaactcatatgattattgaggatttggggcgtctccacgtatacacattatggccaatgaaattgtaaatttctaatacaccacatatacacattatgacctacatgttagctctatactttcatgtttcgtatacttgccaagaaatttatgactaggtgtcaatattttttcgcacctccacgtaacttcatgatccttataccaaaattaggtatgtttggctgcactacttcagctgtgacatagcaatattgcacactactttgtgtcactacaagcagttgtgtggctgtgtggtagcggctgcaaaacgtgcatccgaacacacctatcaaggtgaaaataaataaataaaaatcttatatagaattctttaactaaattgattgtttataacattccaaagaggagataacttttgcgatactatatttgccttttagatagtctccacgcagtatatctatcttcaagcaaaactgcatgcaatttctctgtacacaagggtatatacttcttcacccaatcaccaaaactgcatggatccttccactttcaactggcatttcccggctcattcttctccttctagagtacaccgccagtccgcaaccctcacacccaacatttttttaaaaaattacacagttccatgtttgtttattttttctaatgaaatcaatttcatatttcgagtttcgactatcatttccttgctgattcttcgtatattctccagtacacagccaccgttgcatagttgcacccaacatccgatttttttgttagttgctgtcatgctaatccaattgccaaacccagatacccaagatttgtgtagtagtagtaacatctgtccatagtaaagagccccgatccgtcaatgcaagcaacacgtttcccccaatccaccagagtttttgggcgaaaaaaccccaaaccgacacgccgaatccctcctcgtgctgcaattctccctcgttttccacttgcctcgcgcgcaaatcccacgttccgttccacccaaagccaccaccacgtggcccccccgcgatcaggatggccccacacgccagtgtctctaccccgcacgaggcttcgctcacgtgcttttcccgcgcccatgcgtccggcgcgccacaactcgcgccgaactcgcgtataagtagcgcgcgctcggctgcggccatggccaggcaaaaaacaaaaaaaaattccgagacatacatagccagaggaggaaatcaatcgatagtgggcatggatgcggcggggatgatcatcggcggcggcgggcggcggaggctgacgagggtgaggacgctcgggcgcggggcgtcgggggccgtggtgtcgctgttcgcggcgggggacgacgagctgctcgccgtgaagtcggcggcggggccggcgggggcggcgcagctgcggcgggaggcgggcatcctcgcctcgctctgctcgccgcacgtgctcccctgcttcgggttcggcgccgtcgccggcggggagtacgggctgcttctcgagttcgcccccggtgggtcgctcgccgacgaggttgcgaggaatgggggccgcctcgaggaggacgatgtccgggcttacgcggcggatgtcgcgagcgggctcgcgtacctccatggggtgggcatggtgcatggggatgtgaaggggaggaacgtggtgatcggcgccaacgggcgcgccaagctcgcggacttcgggtgcgcgaggcgcgccgactcggctgggccgatcggcggcacgccggcgttcatggcgccggaggtggcgcgcggggaggagcaggggccggcggccgacgtctgggcgctgggctgcaccgtcatcgagatggccaccggccgcgccccctggagcggcgtggacgacgtggtcgccgccgtgcgcctgatcgggttcaccgacgccgtgccggagccccccgagtggctgtcgccggaggcgaacgacttcctggacaagtgcctcaggcgccgcgccggcgagcggtggacagccgcgcagctgctggagcatccgttcttggcgctcgccggatgccgcgccgtggccgccgaggagacgaagcccaagtgggtctctcccaagagcacgctggatgccgcattttgggagtcggacgccgacgacgaggacgacgacatgccggagagctgggccgagaggatcatggcgctggccgtcccctgctctgccgtgccggattgggaatcagacgatggctggatcgacgtcatgagcagccaatccgaacttcccatcgcggcggctgaaacgccggccgagcagacgcgcagcgaagtttctgaatcgccggtggcttcgccggctttggagacgacgagctacgcgagtgcttgggatgaaagatcggaagctgtaatggatgctgacgtggacgatgacgatgatgagctcgtgcacaatgtacgaactgttgatacctttgtggatgaacagctccgccaagatatttatttagattttactactagtgacccaattgtacttcatgttgatgtttctgatgaaagaaaagtaaaattattgcctccaattcctgactgcctctgttcctccccttctctttcttttttcgattttattcactcaaatctgataacactacaaactcaaactacaaatctgaaacttcaaacctccaaaaatgtgaaatcgagggcagcggcatcagcattaattcttcagaacgatggaacgtagacctaaacctctgaattttcagaaccagtgataaccatttcagttactgctggaactgagacgtgttcgttggaactcatgaaaatgacagcctctgtagccgtgacccccctttatgacaactcaccacaaaaccaattcgttcaaccacatctcctcatctactacccgtatacacaacaatctcaaactcaaagcaacagcaacaaaagctgcataatcccattccaatggcaacctttttcatccaattgccgccaaatgtggcaaccaactgaactcaatctagacatgaatccaattcaccgtctctgcagcaacatcactgtctcctcctgctgctgccgtcggtacaagtggcggcggcggcggccgaggagaagtgcttctgctgcaatgctgttgctccggcgacgatgtggtggtagtgtgcacgtttgctggcaggttggtggtggctgcaggaaagctggggagatgaagatgatgcagatcaggggtgacacttggccaaaatctctggattacctcaccccggacaggtgtacactggatggatagatagatttccctagctgcctaccgtcttggagtggagtgtttgctcttgtttctagatccctacaattgtttgtggagtacttgaactaccacaacattttttttacttggcaccaaattaatcatatatatttctctatgatcttgtgcatgaattactacagaattagtagtttagtactagtggtacagttcttaagaacaccacttgactagctaaaattttcagctgcaataattttcagctgtaatggtagaacatgtgttcatacatgtactggtcaaacttttttttttatgttccattacataattattacagagtgcctctcaagaaaaataagggcatcactgcatctacacttctactacatctgagagtagtagtagattcagtaattcggttgccagctcaacatctgataaaaactgtcaaaagcatcgccatgtgtcattgtcacttataccttgatgctatgaacaaccttgtagttgtagtactacttggcatgaactttctccatgtttcttgaagagcaagggagataggagttatagtagtggccatgccagctgcataattctagagagatatccaggtgtacaagttgccagtatgccacagagcccagaggcaggaacacctaactaaactgtattcgctgggttacctccatgatccattttaaagtcagcatcctgctgcagaaaaagaaaatggataatgagatcttctatttgacgaaaactatcaccctaaatttgacttctagaagttagttgagtttccacaattaatttatctgaataagttctggactggtggaagtctgcatgccaaagactccagttttcagagagagttctgaagacaacaattcgaattccaggtctctcgagagaagattcaggcttctcgaacaactagatgttttggcacgaagctgcgtggtgcgtcagcgcttaattcgattgcacgcagggcaggcttcgtcgttgacgacggctgtgacgcactgcagctaccacctgcaggtcaggtgtatcatcatcttcttcttcttcctttcagaattttccaagtcagcccctcccgtttcagaactttccaagtcattcttggaaggtaacaatagcagtagcagtattattctctggtggaggcttcagaaattcagacaaagccgcctcctccgatccacgcagtggtgcaccagcggtaataaaatgatgaactgaattgactcatactcgcaagtggataaaggaaaaaaaaacaaaaaacaaagaacatatttcgacaaacgcaattccaagtcagcacaacttgcacagaagtgagatctttctatagtctatttaaactgtacagcactactgttcagcaaagtacatatgaacatatccaaagaaccaaacggagtcaagctactagaaagattatattaatgttgtaagctcgtgcttaatagtaatagaccatggatctgtgccatgttctcgtctacggaagctcgaaactttttacacgatagcaaattagcaagtggaagctgcaggcgagcttcagttagcagttggtgagcgcaggggaaagctcaaaaaacggcgacccgagtgagtcaaatgccaagtgcggggctgcgtgccgttttggtggccggcgacggaggcaacacgggctcgtcgactcggcgaagcgccctcgcgcgagctcacatttagttctcattggcattgaccggagacattcagcctcatcgtttggctgataaagatgagaaagcgaaaccgctgataaagatgaaaaagtgaaacagtatatttacaaatggaaagtattttgtgtatattcacaatttgatcagctaggcttaggcaaaaatagaagatttgacgttctgatcttaaagctgcttcctttgtggacttgttttctttgctttatctctagcttgtttggctatgccagcagcactagtcctccttttattttgaactgtgttgcttcttgtaaagctggaaaccccagcattctgtactctctgttatgctttatgaaaagctgggcgtctgccttttctctaaaagtattttgtgaatgagacttttatatatgtgttcttaacgaattaaaagcaaaagctgaaaatgaactatgatgaaaaaaaataattccaaaatctactctaaatttaaggttgaaaatttaatttttggctgataagtaaagatgaggcttttgtacgagttgacgataactcttagaatattcctgatcatagcttccagatcatttttttaaaaagagtaacagatgtgccataaaacaaacaagatttctcttggattaaaacttacgtcagcctgatgtcaaaatggcccattaagtttcagttcgcgtttcctccagcactggatcacagagaaattattgaaggaaaatgtgcaaaccaaggttctgaaatataaacatgcgggcaatagtggttcagattatggagcaatgtgcgtggttctcttctcacctccagtttctcagggagggctgaaagtttaagcctgtgaaaatccaattgtaagctctgctgcggaaatggtactgctccaatagcaatagccaacattggtggtgtttgaatcttctcaagatgaagatgaagataaagattaagtgtttcacgcaaaatgaggtggtaataacgtgcgattaattaagttttaattattacaaacttgaaaaatggattaatctaatattttagaacaactttcatatataaagttttcacacaaaacacactgtttagcagtttgaaaagcgtgccacgagtatccaaaagtttatctaacttttgtgcaacagagtcacctgatatacacacagtccatgagattatagcagctgcagcttccagtcgtctgaactttggctctccaaacaatttagattctcacccaacttttgataatctgtagctaacaatctagaaaattaattagaaaacaaaggctgagaaaccaagcttttcttctggattcctaaaagttgattgccaaacaattgatttttaaaatcttaaacttttcaaacagggtctatgctagctctatatagattatggtgctccatcagcatcttcttagaaacactgaatgttctgtgtgcacgtgcaaacaaaacaaaaaccgtgtaagagcaacccattgttgttgattcataaaaggaggattggttctcggaagatcatcacaataaagcaatgtgatggcttagtcaatctcaaaatatataccggttcaatctattggaggtacatgtgcttatagggcacatcatacatgcatgaaccatgctggtttaaaatttaatgattttcagttggagtaaactgtcatgggattacctagatatttgttgataatatttctctcagaaaattgtgagatgtaaatataggacaatcacattgcaattacattgtaacctgcaactgcaatatagcttggatgtaacttttaaaaatcccatcataaaacgctatttctgcaatggcgtaggttggggaccaaatcccctcatccgtgcctgtgctatgtgatttttttccttctctgcttgcacaaatcttgaagagttcaaaccaaattatatgaaagtacatgcaaattacaacataattatactatttatatttgacaaattttaaggaaaaagttgtcggcgaatgtatagcaaaacaatacttcctttgtcccaaaatattgaacctatgatgagatttgattcatcttaggacaacgaatcaggatatactagattgtagttgtactccctccgtttcatattataagttgttttacttttttattagtcattttttatggctaagtttatagaaaaaattagcaacatttataataccaaattagtttcattaaatttaacattgaatatattttgataatatatttattttgtatagaaaatattaagtttgattattaaaaagtcaaacaacttataatataaaataaaagggagtaatattttaggatggagatgtcctaaagtatccagagtttcggactgttgtcagccatccatgatcaatccaaaggcaaaaagaaatggagaaggctatacgtcctagcattttcttactaaattcttactgatgtgtcatgctacaatcgaatcgtgaattggagaagtaatataagagaaaaaatagtttaaactttgctcgaataaacttaaaccaacctaattattgtttttctagtatggatgcatggcttccgatgcatgtagtgggctgcacctggtgcgtctgcatgcgtgggggatgcaggtcgtctgcagtacggtaggaaatctcaattgatgcgtgggtggaagctaaaatcggacgcccgatccgcagtcacttccaaaaaaaaaatagtacgtgtattaatgctcgaaagaaatctagcgccctgttggtgttggagttggagatgaacccaaccaacggtcacactcacacgccctcctctcctccatccatccatccatgcgtgaatgcatgatgcgtctcccgcgtccggcgccgctgaaccctcctctcctctctctcttccctcctgctggattgctttggtttctttcatttgttggctacgacttccttctgctcctcttttttcgtcgtcctcctctcaacgggaatccggtgatgcgcaatcatcgatcggcgacctcaccgccggcgaccggacacgggaacccacgcggccttcctccgccggagtatcctcctctcctaggcgccgccggctcggatcgttctcttctttgttggtaaggaacagtacgctgcccctcatgtccatcccatctgcagtagattcagcatttacatttcgttttgtgtatctgtggcgacgtgttcttggtgaaaaatatgtatcgttcaaatttcaagcaacccaacgaaatacatatcataagtttgaaatttttcacattaaaaaaacaaaaaaaatcccaaaacaggacgagcattttatccagcactaataatatgaagcaaaccggccgctacttgtcatttgatatcgagattgtgaaggttgtgtacatatacatcgcttgcagtgtttttcgttttgttgctgtctgaaatgctcttctagcaaacgggatgaaggatctctgtctccctgggcacaaaaaccacatcaactctctcatatatgtcattgaaaacaaaatccattattgtctctctgataactcagtgttagtttatctgcatagtttcaggtgatcaagagttgcaaatagaatgttgacctgttgctgtttagatgacaccagatgataatgtgagcttctacacaatgctttcctgtttcatttccctctattttgcctcaacacaaatttgtccgctaaagatttttttagtgttgatcctggctatttttcacattctctgaaatctgaaggcccttattactttaaagaaaggcagcaagcttatcaagtatagccggaagggaaaacccaagattcgtgagttcagactttctagtgtaagttcatatgtatgttcgtttgcaatcaatgtcagctctttgctacaggatgaaagtaacgatatttttttttatcgcaggacgaaaatacattagtttggtactcccacaacaaggaaaagtgcctcagactgtcttctgtgtctaaagttatacctggacagagaactgtaagttgaattgccaccggacagttaactgttggtggttaatttgctggtaaacatgaagcaagaaaaatatatgttgttggtgatactccaagagtaaactgtttcattttaaacatgcagcaagaaaaatatatcttgttggtgatactccgagagtaaattgtttcattttaatgaatttttacattttttttcgagccaaagaacttttacgttttaagttgtgatcttatggattttcaatttttaacaggctgtttttaggaggtttttacgccctgagaaggattacctatcattttcccttatatacaagaacggccaacgttcccttgatctggtaaaatataaattctttgtactcgttttcattaactggggttaaatgattttacccctaggtgctatagtttatggaacacaataattttcttacaggtttgcaaggatcaagctgaagtagaagtgtggttttcgacacttgagtcactgattacttcatgccgtctaaattttctgaatgatggtcaaactgatagagtatcattttctgaagtgagttattctcctttccccatttacattattttaatttatattaaagtcgagtacaaacaaaaattcaccttcattttctacaacaatttataatccaatccttgtacaaatgtggccatcccttttaaggatttgattggactgttggaggtttcagcttccttgagattccgatgagctaataaaaatataggatgcacaaaaaccatatttgagcatacaaaatcattattgttaaacaattatagagaattaatatacctagtaaatcacttctgtcattatgacaccgactaattctgtaatagttgtttgacttagctagaatatcatcaccttactgttcttgtttaacaaatgtttcttttttcaggacgtaacaatctatcaagatagcacttcctatgatacaacgctagatatcgcctcaagtattacacgtagttttaactcagctggttatagcacaccgaattcattgaattctattagagcagatgttggatcagaccgcgtaaatatgctaagagcaagtacaggagacaatagccgagttagtatttccagtgcccctagttcttccagtcaaagttctggactagatgacatcgaatccctcggcgatgtttatgtatggggtgaggtgtggactgaggtgctaccctctgaaggatcctccaactatttgtgcagcaaaacagattttttaattccaaaacctctagaatcagatgttgttttggatgttcagcaaatagcatgtggctctaggcacattggccttactactcggcaaggagaagtattcacttggggtgaagaacttggtggacggctaggccatggtactgatactgatatctgtcgtcccaaacttgtcgaatccttggcagtgtccaatgtggaatacattgcgtgtggggagtttcatacttgtgttgtaactgcatctggtgatctgtatgattggggtgatggatcatacaatgctggattacttgggcacggaactggagttagccattggcttccgaaaagagtttcagggcctctagaagggcttcaggtactctctgttgcatgtggctcatggcattcagcactgaccatgtcaagtggaaaacttttcacatttggtgatggcacatttggttctcttggtcatggagaccgtgaaagcgttgcatatccaaaggaggtagaagctttgagtggattcagagcaatgaaagttgcatgtggagtatggcattctgcagcaattgtggaaatcagtggtcaggcaagcacaaatgcaatgtcaagaaagctgtttacatggggagatggagataagaatcgcttgggccatggcgataaagaagcgaagctagttccaacatgtgttcaagcactcgttgaccataatttccatcaggtggcctgtggacatagcatgactgttgctcttgccacatctggccatgttttcacaatgggtagctctaacaatggccagcttgggaatccaaaagctgatggtaaacaaccatgtatggtgcaagataagttgggtaatgagttggttgaagagatctcatgtggctctaaccatgtagcagccttgacttcaagaagtgaagtatatacatggggcatgggagccaatggaaggttgggacatggtagtgttgaagacaaaaagaagccaactcttgttgacgcattgaaagatcgtcatgttaagagcatttcatgtggttcaaatttcactacatgcatttgcatacataagtgggtttcaggtgcagatcagtctgtttgctctggatgcaggcagccatttggtttcacaagaaagaggcacaattgctacaactgtggacttgtccattgtcatgcatgcagttctaggaaagtgctcaaggctgctttggcaccaactcctggcaagccacaccgtgtatgtgattcatgtttcatgaaactgaaagccgcggataccggcgttatcagttcatataacaaaaggaatgtcatcaccaggcgatccattgatatcaaagataagttagagagaccagaaataaggccttccagacttgcaacgacatcaccagcagagccagtcaagtatcaagaaacaaaaaatgttagaaatgagacaaaaccagccgatcctatgtccatgatgaaagcatcacaagttcctgccatgttgcagttcaaagatatggcttttgcaggaacatttggtacagttccaactaccgtaaaatctatgacaatgggaggtcaaatgcaaatgggcatgccaatgttttcaccatcgccaccgtcaaagaagccaagtccacctccagcgaccgcaagtcctctgatcggtaaagtggacaatgatggcttgaagaagactaacgagttgctgaatcaagacatttccaagttgcaatctcaggtatgaaagaacactctagattgttctatttcttcaatgtgattagctgaatttgttaaaaccattttttatgttgacaggttaataagttgaaacagaaatgtgaaactcaagatgagcaactacagaaagcagaaagaaaagctaaacaggctgcctctatggcttcagaagaatctgctaggcgcaatactgtcttggattttgttaagcatcttgacagtgaggtacattaaactactattactgtgcaactcttcatctattattatactttccatgatagtgtacgtatttgttctactgtatagtttggagtatagtagctctattgtgttccatttatattactgacacgtttctatagctcaatcaaaatacaataaagggcgcacgatataaaatcatgtttatcatgttatcctagtgtcttgtatgatcataattgcttcaaagttcatgtttatttatcattattagaggatatactcatgatatcacaaccctccattcttcagctcaaggttattgcagacagggtgcccggtgatgttgctgacaacttaaaaactttgcaaagccagtcggagagatttcttgcaggacaaagtagtaatctagtggagattactggccttactggacatgatatcggacaccataggtcaagtagcacgggtagcctgccagtgtctcaagatggcagttctggaaatgctagtggctcttccattgccatggctagtgactctccatgtcaccgtatcatggaaaacaacttgaaggctccaggtgacttcgcaccaaagtatggtactcatggagaagtgcagttgattgagcagtttgagccaggagtgtatgtgacgcttatccagctgagggatggcaccaaagtattcaagcgtgtcaggttcaggtattccatcctcaaatccttcttggatgtaaaatatatcttccaacttgattaatctatcaatagtccatctttcaaaaaacaacacttgcaccatccacacttttgaaggaaaaacttcgaagcttttgtttacaattgaagtgtgttcagttcaagatgtgcactgaaagcatagttctttctatgtttttgtttgaagcaacaactccaggtgatcatttatttatggttcattcttctacaatcttttttttttgtttagcaagaggaggtttgctgagcagcaggctgaggaatggtggagggaaaaccaagagagagtgttcaagaaatacaaccatccaactaactaggttccaaagaaatagcagtgaaagcaacaacccatgtgaaattacttgtcatttttagaatgagctactgggtaagaatcttgtttttctcttatgcttagtaaatttcttttcttttttaagataatggaagtataacttctggcctctagaccaattagcaatgcacacaaccatatttgtggatgaactttggtggatagagtcagatactaatgcctccacaaccacacggatggtgcctactgaattgctgatatacatcttgaagagtattgatgattgtccattcttttgttcgttcacagttttttatttgtattagtacatatacacactaagtacattagttattgtaagagaggaatctttgtaaacaaacagtgtgagttgtaactagtatttcatgaaggaagatcatcatttgatatttgtcaaccttaatgttcattaaattttgagtgaagtgtacaagcaatctctaaacttgtgcatgcgtatcgtctaggtccttcaactcttaaatatattttcggatccctgaacttgtcctaagtgtcatataagtccaaacgttctctaatccactttgtgcgctgacatgatatgccatggtgatgtctacatgttggtgggatccacaggtcagtcacatctggatcatccatcgatgaccagcagagccaccatggtgttagatgtttattttggctttatattcctttatttgtaaaggtttttttttctgcatatttgtatgcacatgtacctgtatatatttgggcttattgcccttagacgaatacaagtgctatctataacatggtatcgagagcaaaactagggttagactcttcttcttcccctagatgatcatttttttctctctacgtacgtcttcacttacgtgcatcaattcttctatctcgtacctcagtttttgttttacgttgtggtcacgggcctataactaccgtggcagttggttattgctgcctctttgccggctaccaccatcattgtcggttgccacctgttcgccgatgccgcccatccccggccactgcctgctgaccgccgctcattcttggctgcgccgcccttcgctggtcgtctctcgtcttcgcgtgcttgcttgttcgcgtgtcacttcttttttggtcggattctttttgaccgatcagatccgagtgaaaaaaaagttaaaaatttactttgggtcatgttttattgcaaaagtttcagtttggaccataatttgtccaatcattttattttggactagataactttatctttgttgcacaagtgaccaccccaagccacatctttagcacttcaatgacttcgagcaaattgttaatgacatgtcgacgaattttcatacctatatgcatgtcatacctttatcgagggagacactagacatgattagaaaatagagttagggtggtctattatgcaacaaaggtaaagttatctggtctaatgtgaaaagattaggtataggatggtccaagtaatattttggcaataaaacatggcccgaagtgcaattcactaaaaaaacgagcgactctcgtagttgcggtaatgcggtgcggtcttctccactgctgactcgtggtcttcttcttgaccgaggcttgttacttaaaaaaaaagaaaggaaaagatagaaagaaagacatttcctgcctctgcttgctgccactttatttttgcgctttctccgtcacccattgatctttgatgatgtcttctttgtcaagcacaatttcagtttctcattgcccggatatttttgatggtgtcaactacaatcactgggttcagcatatgcgtcatcacatgcatgataagaaacttcacatgagggggaacagtagtgcggtgtcgatctactcatgggtgaacactcaaacatatgatagtaaacttctccaggtagatgaacacctgacatcaatcatctggaaaactagttgacaccccgtgctttactgaggaatatgtggatgaatgcatgttatacattatagaaatgttagatgtgtatgtttaaataatgtgaaaatgatgtggagataatgagttgacattgcttacatattgagttctaaaaatacaataaaattttaaatgatatgtcatgtttgcatgatatttaaaatactctagataataattgctagtgggtgatgatctggtatacttgcatatgatttaaaatactctagataataattgctagtggatgatgatgtgatacacttgcatgttgagttttagaagttagtggacattaattttattataagataggattccctgtcaaaaaaaatcatatggaaaaattcagattcaggtactgaaaaggatttggaaagacactcccccttatttgcttggcctgattagtgggcgcttatccaacctcgctggcattccttccttctctggatgggttgggcctaattaattattttagccaattaatgtgtgtacatgctcggaaattcgaacataaatcagaactccgtatatgcttataggtcaagattgcgtcccatataaacaaacaaggccaaactctttttctttatttctttcttgttagatcgttccagatgcacagtcggcggaaccaaaccgaatcctgcatgtaagccaacgccacgcgatctgtaggtttgtttagtgatggacaacgacggcgacaacagtggagacataagaaatcacctcgattctgccgatgctacttacgctgctcttcacccgcttcccccttctccgccgctacaaaggcaatgcaaaaattctcgtctctaatatttttacaattcactggtatgatgtatgaaacgcttgacgatcttacttgtgtttttatgtgcaatagctttcaaatttgtttttaaatataggtattctcagagtgagtgtgatacagacgaagataatgttgtgcattccaactatttggtcgtagacagtttcacgaatgttgctacagaattagtccaaccaaatcaatcggatcatgatagtaatagtgactttgaggaggttcttcagtgtattttttatgtatatgtagagactgctctgaaacattacaacaatgatgagaaaaacaacgtaaattaagtttgtcaatgaagcattacaacaatgatgagaaaaacattacaataatgatcactatgctattatcgttaatttgtcaatggtagaaacattcatattcatatccgtgtatgagtcagttcttaagttcgttcgcttttgaaaatgcagatccatatttgagtcggttttaagttcgcttttggaaatacagaatgagtcgtataaaaaatctctttaaaaaactcgcatgctaacttgagatgatcgaactcctaattacatctcatgattttgtagagaaacataaatccaatcgaattctcatagtgaattttaccttaactaaaatgtataataataataagattaaaataagcttcacccgttgcaacgcacggacattttttctagtcattctagtaaataataaaagttaatagaaagagagaatagagagagacatattatatcatatatggtataggtaaaaccgactcgtattcttcctttttatctttagttttctacacttaacggtcgtactcgtattcttaagagtattgttttgtggtgaggagtcggagttgaagtcgtatttggatcgaacgttcagtcccttatattgagttgagttattattattcacgaatagctaagcaatgtctcttgtcaggccggccgtatcaaaattcgaaaccacaggaacttcacctagaaagcgagagcgagaggatgcggccttcgttgtcttcacctctagtaacgacggggtaaaacacaaatacgccattgtttttttttacaagttgtaacaaaacaaataaattaaactcaaattgtgcccatctgtgtttttcggatgactagcaacaaggtcttctttgtaactccggcccatcaaagcttgtaaaattacacatggatgggcctgaattgaggcccataaaaacgaggcctggccaacgtaagtccgtaaccaaacccgactccggacaggagggcagcggcgagggtgtcgttccgatgggggaggagcggccacaagcgtggctttgacaggagggcataattccccatcgttaatttatagcgatcccattactgggaagatagtggaacttcctcccttcccctatcgtcgttcgtaagaaaaaaaatcttatctgaattctccatttcatcattatcactaccaagcctgaaatgattgattgattgtggtagaaaacccgccaaagtcaaagtagatacccgaggtgtccctaaggccaatgtcaaagtaagctactacctctatcttaaaataagtataaccgtgggtatttgtgtccaacgttcgaccgtctatcttatttgaaaaaaatagtcacatataaattattgttcatattttatcatttagtaatcatgaaaatactaatcatgaaaaatattcaaataagacgaacgatcaaacgttaaacatgatcaatgtaaaattgtaattattttgggacggatggagtacacaatactacttcctccacctcatctcaaagggcaagcctcttgtcgtatatgtatgtgatggcgttgtgacagtagtaattagcttctcttcactgtctagttgtgctactagttcataaaaaccgtggttgcattaatgtctgaaccaaagtaacatcttttatcttatgatccctagccgtggtgaatccatgataatttaatgtctgaaccaaagtaacatcttctatcttatgatccctagccgtggtgaatccatgataatgatattggataggctcaaagcctaggctaagcctgaaactgaaacaaagttgcaaatcaaattcaatgtttacatgatctaaaacaaaacaaaacaaaacaaaggagtaccttgccagcaccaagttcactcttttaggtcttagcaaaaagtcaagtgagctgccacatgtatatacaaagtagtaaaattagtggcaaatcaatggcaatgttgagaaaactatttggaccttgaaacatttgaaacccaacatgttagaaatacttgcataattttctagtggtattcgttgtcctggattggcaaaaaaaatcattaggatcaaattatagatagttgaagcctcttttatcgatttgtgctctcatcatttggcaagtgtcaactgaactgtaagtaattaagcaatgttagaacttctccattgtgaatccaccaataaatcaaatatatttttcataaatctcaatatcccatcatctcgtattctcattcaatagacaaataccttctcttgccgtatatgcatgcatattctcattcaatacacttctcctgccgccatatatgcatgcataatctcattcaatagacttctcctgccatatatgcatgtatgtgattatccattaatctttgctatggtctcttgctgtatatgcatgtatgtgatggtgttgtgacagtagtagactaatagcttctctttactgtctagttgtgctattaattcataacactgtttgttatattaattgtgtgattttatgatgcttagatcctttgtttgatcattctgtattagtatcacccccttagtaattattcatgttcatcacggttataaaaagatggtgtttgcattactatggacactgttacacttaccaacttgattaataaaaacacttatttttcatcaccccgccatatttagatttattctccacctctatcacatcgaatgaatatcttcatgtcttcaccacctcttgatacacatacactaccactcatattgctagcaacaggagtgcaataattttcttttacacttctataatttctctggtatgtatgcttaaactacttgtatgcctaacttattcagattctttttaaatataggtatcatgagagcgagtctgatgcagaagaagacaatgatgtgtacttcaattatttggtaaacaagttcatcaatgttgctacaaatgtagtccaaccaaatcaatcggatgatgatagtgatggtgacttcgaggaggctcttcagcgtatttctaatgaatatgcagagagctctctgaaaaattataacaatgatgagaagaacaaaatatagtttagcttgtgttttttaggtaaaatgtgttcacttttttatttatgtttaatatttaaaaataattaaaacatatgcatcgataatttaaaatatttacatctttttttaccattcaatattcatatatgtggaattataaaaaaaaagttagaattgagtatataatctagacgagagcaaattatccacctacctaatgatttataataggactatgtttatattgtgctgcttttctagtatataatctgttgtttagtacttcctccatttcatattataagactttttagcattgtccatattcatatatgtgtgcctagattcattaatatctaaatgaatgtggacaatgctagaaagtcttataacctgaaacggatgtaatatttttttaactacttaagcccacatcaaaattatctattttgtttttttgtttgcaatatatcagattaaatacagtttaatcaaagctataatatttttcgctgaagtgtattgggactgtaacacatatgatatgataccacattgcatggtttgtctggaggggaaaaataatactggttagttctgaaaccttgagtccatagtatcttatagtgtgtatattttaattttattatagtattatattgctaacgaccacaacgtgacatctggtaatacaacaaagagattttcctccctaggaaggtagtgcaacaaaaggacaaatatatatagtataaagcacatatgtactaagaacatgcaggtgtgagaacaaagtcggtgttagtccaccctcaattttagataaaaatgccttacttttggatggagggagtattgtttgaatagaatacatagacatagattgacataaatttaataactatgtgtagcattttttttaaatgataaacatatttctcttatagagattattgtcgaaatacaactgcatcacatcgaagggcgtggttcactcagtgagttaatgaaataataaaagaaatatattaattggtaaaattttgttgggatcccccattacatggccctatgggcctatttatagtcttagtacgggctcataccctctagggtttagttagtacatgggaatttacatggatacccttatgatagggatattagtgtgggtacatagtgtcttttgtattcatgggctcttaggcggtctcgttgggccggcccattaatgatggccgaacctacgggccacaaggcctcccaggcctatggtcgaaggccccttctacccaggcgaaggcctcttgcttcgccttatggccttcgcccttagcggtgacttggccaagtggtgggcttgggggcggacccttcgttcttcgtcgttcggcttcgcccaaaacgcttcgccctggggttgtgagcctaggggcgaacccttcgatcttcatcgttcggcttcgccctatgactttgccccgggcacaccctctggacttagtcagtgtctagcggatttggtggtttcggcaggtccggtcgaaggcccttgtgacatacctccaacagagatctagaatatataacatgtgacaaatatattgaactaccataatatattttctaaatatactccttaataaataaataaataaatgttatttttcttttattattatatctcgtgaaacaaagtcataaatataaatacataatagtcttatataacaaacttatactttgccgttgcttgtagttcattagaccaagccaccataagatggggtcgtggcccatggttatgctgggcctaggcccacctaatgatcgaggtctcacataatggtgggccacaacccaccatatgcttgtttcttgttgtttatgatgtaataattaagcaggaatggtctcattagttcaacgtgctagaaatcacaaattatgtcatgtcggatccatgttgtcaagttgtcctgcgatgacaccggagcaggtggttctattgttttagtttgcctaatgatggttcagtgcgtcactaattcgtgacgacggaaaatcgttagagccatttgttggtatttttttttaagttgcacatggtaatttcagacggggcttctgcaacgacagtgtcatttcatcacaagattgtcaaagaatatggtttgtgacgagctttcgctatttattgatgaaagtgactcatcaagtaaggctagaccattgtagtgacttctagtaatatactccacgtctacaaattttcatatttctttcatgccaaaagacaaaatgtacctttttttagcaatttaacaatcaactaacgaagaagagattaaacccaaaattcaaagacacataaaggagtgtacaaaactcaaacacctagaaggtatactaacattttaggggcgtagaagtaattttctcttagcgaatataggagtaccaagaaacaatctaagtcaaattattagtatagtacgtgggtagtccctagcgtcgattgtttcttcaatctctattattataaaaactgaagatgttttttctggtactttagtatgttattcgtgtatgagtcagttcttaagttcgatcacttttgaaaatacaaatccgtatttattatataatgacttagaattttcatgtaaaacgatggatgaatgaaaaaaaattgcgaatatacctatttttttaataatttacgtttatataactacatgggatggatttaaaaaatacacccgtcctgcgggatgagaatgcgcgaccgctacggtcccgcaactccaaaacacgggacggtcggtcccgcgggacggtcacgccgcaccacgacggtcccgcagcttcaaaacatggaccgtcacggtcccacagctccaaaacacgccaccgcaatagacagcaaattaacattgtttgatctttaatccaattagatgtatgcattatatttattagggtgatctaaacgaaggggtaatattttttttattagattagtggttgttgtgccttatattttaggatacagggaatatctgaactcaacgcagataagatgatgagaagatgcatgattccaaggtgaagtccatttacaacgattttaactcacatttgtgctatatatgttacaagtcacaagattaattacaggcttaatttacagcagccaggaccctccagcacaagacgatgcatcgtctggattctgaatgaccagccaacaacacctcaaggtccaccttgtaactcacataccgataccgtggtgttattgttggattctcaatttgccatatgcacacttttaattttacactccaaactagctgcattcattcatattcgtggtgattaattgatccaaatatacacgaacagctctgtgtatggagaattaactcgtcgttgagctgctagaagcagaatttctttttctgcaaaggcatatataaaagaacagaattagatggctctgctgctcttatctcaatagcaagaaaaagagtgtaagaaagctgtaacgtacacgaaacttgatcatatcttgcttgtcaatgtacgcaagcagctcgtcctgccgcatcagggcttcatagagagcctgctcatgaaaattgaagtacttcatcaccttctttttataaggtagtaatatttttacatatacctaaaccaatatagtttatgccaagctgccaattcactcagaatgaagctgaaaaaggtaccatcttgagcaaaacaagcctaccttctttgtagagattaactcggcttctaatgcatccacacggcggacggctgcattcagcaattcctccttttcaaatggcatctcggatggcttcgtttcgagcgcctgcaccttctcctccaactcgcctagtcgtcttaccatagatgagaggacatccttttcagtataagacggagcaggagacggtggccggaattcttccttgtactctgcttcttgaggatactccacataggagtgatcatggtcagtggattggcttgagaatcttttagccatcctgcttgggacagagcgaaccatagcaaaaaggctcacgatcaagacagtcagccatgtgataacttgtgtccagaggccatcaaatgtgataggcaaacttctcgagggtgatgaacctggcgtgaatcatgtgaaagttcaggttcaggttcagcaaaaagaaaagttcagcgaataattattcaacagtttagcgaatatttctcaatcggttcattcagtataacaataaaaatggtcaacaacgatttgagtattaatttcaactttgaacgagattatggataagagaaacaaccaaattaagaatgtaaaagagctgaggaagaaattgccatactagctctaggactgccccatccatcatccacaaccttgtcaacaacaggaatgctttcttcaataatggaaggggaagcagatgtaaatccatgtgctgccaattttgactgaaatagcaaaatgagattacctattagcaatagctacatagtcagaaatgctgcatcattacaagaatgctgcagtaacccaaagatccttccatggttccttggattaaggatagcctacttacagaagcttgtataacaatgtaatggtgtaatgtaatgaaatataaaaatccacatgttattcacaaaaaaaatgtttcaatttgatggtcaatgattttttagtccatgtggtgctattattcaatttttagtcagtgtagattatgcagttatgctgacaaatatcatatttgcacttctcctattttataaggtaaactgcaatatgatcacagtgatacagcatggcaacttgcctcctcatgaacaggggtcaaaaggggatttgttatcaggttccttgatgccataggtgacgcgccatcttccacttcagacccagactccgctgagccatcacttccttttctctgcattggcatgacaacataacaataaatttcaatagaatagtttgaacacaatgctcctaaaaatctccacattaaccatgcttgtagacttactgttgggtattgtggcccagcataacgaattatttttccatcagtgcttgatatggtcacaatttgcctcccataatttgcttcgccattcaggaccctctggacaagccaaattcaaaatccatcatgttagatatatcaacaccaacgcaaagatagtgtgcatgtaataatacaccagcaagcatctattatttttctccctctttctattttcctttcagtaagcggtggactggtgatttggtttcaagatataacctttattatgttaggatccttccaaggacctttatctgattttttgcaacctccaaatgcctcgcacttgcattttccaccaaaaaactctggcaattcactgaatacatggagcggacagaaattaggatggaggatggcatgaacatgaaacatatatggacaagattgtagatactgacttctcatcaattatttcaagtaacttattttggtacttgcttcctagaaccttcaagagaaaaaaaaaatagaacatgaaagtcgttaactactaactatataacggtcaaaaatcttgattaagtatataacagattactcaataatcctacaataaaaaaaatatataattgacttacatgaatctttgaagcagttttaggatctaggaaagattttacagtgctccataacatcttgaagccttggccggcattaataatatacatgcggcgcaacgtctgtgagaggtttcaggatgcattaggcaattcagtgttgggacaacaagcaaaaggcatgcactatgccactactttggaaaataaggtacatgggggaatcacctacctctgggtagttgtcattgtcgatcttctgcagtcgtgtgattagatcccttgcagcttttgagaagttctttaaacccttgatattcatataatacaagtcaatcacagagtcataactatgtgctcagtgttaagagaaacatttggttatgaatacacataccacgccttgcacgtccagaatagtagtagatgaatctatgggcctttttgcagcaatcgagcaggcaggaaatctcatttggaagcatctctcaaactccttcacatgatatttcacatatcgctctatagtagttacttgcattagcttattcgcatcaacttttcctattaactctatgtagataggccttccttctttatccactccatggtaaaattgtggataatatttcataacctcatccgcctcggtgtagtcaaactcctgagagaaaggataaacaagtgtcatgatagaatggcatatttatattagatatgtttcttcaacgcaaccttttacctctatattgtcagccccaaattcctttctccatttaagcatatctgaccacatactctttgctttctcaacatcaaatttccgtgctttgaggaacctatatgtgaaggagataaaatgaaaatttcacacgaccagccaatcattttcttcagggtagcctcttaatgatttgctgctccaaagattgccactctagattttttccactcgatatctagctagcatgggggccttaggacccacaagacagacatcaagttgcaaatctagaattcacctcaatgaaatggcatatcctggatttcccaactataggtgatttatagtgaagccacatttccgggaaggaggcaaaacagatacacacagcctaaggccaaaagtaaaatatgagagaagccaagcttgtacctaagcattgtgtgataatcatcatgctgttgcggcaacaggtcctcatcaactaaacattgtcgaaatgcatcaacagcttgaagatcttgaacatcccttatgtcctcaatggaaccccgaggttcatttttctttttgcttcttctcctcagggaatgcctgaatttgttcccggcattaatcgcctttttcttgaaagaaccaattttagtcttcttctctccttcggagttgtctgcgtcagatctgatctctttcttttcatcattatgcgtaaaaccttcaaaacctgcaccagcaatagcatctcatgttatgacggtatgaactttttttcttaccggcaactgataggtggcttagccgcttagggagaatgacaaataatagagctttacagggaactaaacctagaacgtaaaattaacttagtttcagaaccaacagtaatgtgagtataggtgttcatttgaagattaagaagataaactttataaaaagaggacccatttgatcaattaatccagtgcctttgtgcaaggcaataccaacagcacatgaattattaaatggaatttaatgctttatacatgtgacatcaacatcaaaatgtgctgattctttgtgttggtttgtagctttcctttttgtggttattcttgaatgcataattagcttgaagcatcagcttccccgtaatttttttttttttgaaaaaacttgaagcataagctattatgccctctagtgagaccaacaaaaggaaaaaaaaatcgaagatgagcaagaaacttaaaaaacggagagtgaatggacttctgcatgattttttttttacaaacattcgattttgataggtaaccgttggtgttaactgaatggggaaatccccaaatcctataaacagtgcaatcgcatactctcacgaactcttttgccatatcctccattaagaattgatccaagaattcaaatatgaatatatttgaatcgtacaataccacatacacaggtaatcacaagataacccactaatttaagcccaataaatcgattcatcctggtcttaaatgcaaagaaatactctatttcctagtaattcgtactcacatggcctggcaaatcgatcgagtggtcctgacatcccctcctccgattccaaaatcaatcgcccgagcaaaagctccaacctaaaaatccacaagaactatcatgccaagaaagggaaaaaggaactaatccatcatctccgaacgataaaattgcatggcaaaatacttttttaaaattgtttttttcctcaacgaagatatttgggaaaccgataagtattcaaacaaactatttggataatatctcgaatttcatttacctcggattttgggcgatgattttggaccaaaaagagagggaagctcctgctgctgccgctatgggctttaatggtgggaagctctcgcgagggagacgagacgagacgaaaaggattctatcactctcggtgcatggacccggtccatagactcgaagcggttgacctgtgccgcgcgcacgtgctgggttcatggacccggtgcacgggtccatcgatagccgcccctgggtacgattgcctgggcccaccttgcgtgcgttaccagccgtcgattcgagcgattatagtagcttttatgggagaaacggacggctgtgatgggttctggttcatggaccgtgtccagggagatgtgttggtttatgtgacgcgtggaggggtttggctggccaggtcagactttggttggttagaggagttgggcaactcctcctccactccttttttatgctaagacaaaaattgatggatcaacaagattattagttggaggaaatgtctaagcacaactgattggataaaataactttattttattattgtttggtactcatggtttaaagctgcttaaatgcttagagatgtacttgctcagagatgttcaatcttcaacacacttacgatttctttctaagaatgttgaagggatgtcttttcgtctaaattttttagcttaaatgtttaaaattataaaaatgtgaactaaggctacgttgttaccaggagttaccaactccccctttctttttccgcgcgcacgtttttcaaactattaaacagtgtatcttttgcaaaaaaaatttctatacaaaagttgtttaaaaaaattatattgatctatttttaacaaatagctaatacttaattaatcacatgctaatgaacagctccgttttccgtgcgcagcagctgtgttgggaatgtggagtaatgagcgcagcctaattctgctggatatatatagtactagtttaccctaatttagtggccctcctcctcatgaacaaaacaaagtgtgtttgattgactatgttagtcacctaggatagatacttggttggcagtttgttcatagattgtttcaccctggtaattttgtcatgcatcaaaccaggcacaacagtcttgaaccctaaatggacacaagctggaccattccattaaattttaccagctaaaacccctgttataataccaggagctaattcttgttgagctgaacactacttaattagcactgtaaatgctactcaaccagaaggtacactaattagtagcctctgattcttctatccagaaaagaacaagaagctagggtccaagaatctattcaagcactcacagggtctcacactatccttgaaaaaataaatttatgtttgcaacttttgcatcaattaacacagtgacaaaacaaaatgggcaggcaggccaatgaagtgggcatcatcatcaaggacactttttgtccgtgtctatcccttgatttgttgttacattgatatactttgtctatgtttattagcttatgcttagttgttacactgattgcaatcatatccgtgaactgcggttaagctttttggatttcatcacaaggggaacagggtcgttaggccaaaaaaaaaaaattaaagcgagtctctggtgttagatgatcaaaaagtccaaagcacacgagtatagaaagaaacatatgctttattagataggagagtgtttcgtgagttcaatgaccaagcaagacatatatatgccttgtgatatatcacctaatctggcagacttatgtatgtgtttaaaaactttagaataataataatataaaacgtggaaaaggggtggaaacatagggaaatattagataatgaaatatcaaactctcatataaaatatcttgagtagtctcattgtttttttcctaatgatggagacataaacgacaaaactaatgttccaatcttcttcaatgtgatgtacatatggcaattttatttgctctatcacatccaaccagtcaacctgtttgatccacgcaatggtacaataatggaggaaatatgctacaatgacaagtcatctcttgatagcataatagaatatattcacacgtctgtcattaaccagccaaatccattgctaattgtcattaacaaagtgacacataattatataaacacgatggattccacactatcattttcaaatgtaaaagaataatccgctgtctgtcttatggcccattgcaaatacacaagcaagaagaccaggaatttttcaatgatgggtaggcaatactcaccgactcacacctgcatttgttcgccataaatatttgtagtgggattacatacatactccacttcgaaaatggaactagtataagaaaatggcctcatcagagaacagtataatttcttattaaacattctgtttactcttgattcagttaggttgtccctgttcgagcagttgctgaatctttctttgctgaagtgcaaatgtaaatgcctgatactgacaggagtgacatgggtactgcttctgaccttgcaatctcagggatgggagtgggtcagcaaaaaagccctgtaactgaggacagatgactattcccctggttcactttaatcaggtgaatgataattcagacatgtggtagtatagattgatgcttggcaaagcttgcaccatgtgttgaactttgccattgaaaatgctactactattcaccattcagcaacagtctcgtcgtttacatgccccatcatggcctgtgctattttcattctaaaataaacaaacttagggcctgtttagattgtagccaaaataaaccaaaaatttggtaagatgataatattgtcaaaattttggcaggatttcttatgcattgaccaaatttgacaacaaactaaatgtaaatattttttttgacaactttactaaaaaatgatatatttgaaaatggcattaaagtgaacatacacttaatatacgacataacatatcctatctcctgttcaaattcgtatctaggatgtattatatttcgtattagatttgtttattttgaagaaagtgagtatgaacatgcaacagtccatggacagatgtgcagcgatctttatctgatgatgtgagttctctgcattcaggcgttgatccctgaatatgcatatgcatcagaagcttgatcgaccacctacagaattataaccataataacggaagcaaatcaaatatggacacatatcctcatgccctatatgtcctcggcggtggcgacgaatccgtacgccggatgctggtggcaggtcgccggcggcgagaatcaacggcaggatgcggtgggccactagtcgctcggactcctgggccacgtccacgcatcaggcggcccacgcgtggccctagactcttctcccattttgttaaggacaaagtccactttgtgtccctcaattatggggtcagattggattcgcatccctgtgaactacaaaaactggagttccgattgttttcttaatgaaagtaaaaactaacgtaaaacacgaggaagtcgaatactagtagatatatagtgaaactaacacaaatatacggtagctagttaacaaccgactcgtatcgtattcttcattatctttaatttcatgtacttataattacttatgtcgtatatatacccgtttagtcgtatatatatagggaaaactattttaattcctcgagggaatgtttcctcgtttgctaaaaaaccatcttaacggttatgaaaaattctagaaaaatttgacaacattcatacaacatatatatacaactccacaaaatcttaaatccaaactcaactcacacgtcgagatataaaaaagacaaattcagcgtatgaatagtaatgtactgtttatatctaaatttgtcttttttttctcgatgtgtagattgaatttgaacacaaattttggtggactagtatgtatcattatactctacattgtcgatttttttaaagaaattttcataactatttgcatcgaatttggaagaaaaaggtatacgaggggatatccctcgagggattagaatccactcccgtatatatagttttatgtgttgagttactagtgtatttatttatttatttattcacgaatagctgatctctcttgtgaggccggtatgcacaagccgtcgtcgtcgtcgtcatcacctacagaaaaggatgcggccgtcgccgacttcacctgcggtaaccacgagcacacggtaaaaaaaaaacagcgacgctatttcctttcttcttttgttcttgtcgcggtggcgcgcgccggccagcaggagggttggcgttggggtgggggcggtgtttggctccgacaccggcggcgaggaatgcggcggccggcgttccgatgggaaccgagagtggagaggttgagaggggaaggggcaaaccagccctagttccgcgcccccgatggagaggagggtggcgttccggtggggcggagaggcgctgttggctccggcggcggcggcggcgttccgatcggtggggacgacgacgatggattgtgggggtaatcccaatcgaattactggtactagaaaattattccatcgaccgtggtactggccctgttcttgcgacccctgctgatatctcaggagcagcgaccgatatatcccacaaagatcaggattcaggaagactgccttcctctcatctccacaggtatccaaagcatacctctgtcccctcttctcttgccatcagatgaactaggataagaagagtagattaataagagggatagtgatttgattggtctaatagggaaaacaaagagtatgatttcttctcctccttgcaatttacactccctgcgtgatatggtgcttagaccaaaaatgcatgcatctcgcactcagtcatcctaattcaattaatcaagaggttttcaaaaataaataaagttaatgatttctttatatttgtggcaatgtatgttcctcccgatcacagttggtctttttggctcagagatttgtgccctggtaatgcactcgtgcagaattggttggcattgaaccattagtgctcctctgtgtttcttttcttgaaccctgtgttccagtcacagtactgcatttcttccttgagccatgtgtcccagccacaatactcatcttttctcaacacgggacgggagagagagagacctgtatggatggacatgactcaccagatacaatggtagaactgtgataaggagaagtgtttgatttagagagttaaatcagtaatagtaaattgttttttgcattggaaaaattagactgtcttttgccttattttgtgtcaaatgttacctagaatgttttgcgagtaatgatgttgctgggggctaattctccttatctttcttttttgcacctctagagtgaatatagttttactaagtatggattattacaacttttgcatttgtttttatatctaacgctttaaacttttgtttaaatcaggcaatctgagagctgggcaacacatggatcagacaaagaaaaggaagatgaagaagtggtgcaggctaaaaatgaagaagtggattccttcatcgctgcagcagaaaaaacaggtccaccacagcagaatatcgactgcacagcagctgcacgacgtcaggctaataactatgcaaaagttgctttggagcactacaacaaggatgaaaacaacaaggtaaagttctgctaatgctttttttaagttctgcaatacgcattatataatccctatactggttttagatggtgtatacatgcttttcatttaactttatactgaaatgtcttaattgtttcatcaactattttatttatttatatcttttttttgtctgcaatgtattagattcaatacaggttcatcaaggccctgaaaagttgcgctatccaaaccaacgaatcctatgggcatgtgaactttgtagcatcttcatcagattcaaaagaagagttcttttttgctgaagtttgttatgatcccaagagcaatggattggtaccaacatgcatggtatctttggaagaaaacaacagaattggttagtcctgcaacattgccactagctagttttagccgttcttttaccgaagtatttcttttttcaatcctaattacctatgtcattacaacaggaggacttcttggtgttggatttgtagggtgcccagatcttctgaatcctcctgtcgacaacgatcactgctatgcttgtgacgataggcttaagcacccaaaagatggaactctgtttaagggtgggcatgtagccgccacgggtttctatacgtcctactgagtttgtaacagacaaaaaaaaacttagttatctatcctgtgctatattttctagttgtcaattgactttttgtttatctctatttaagcacacttttagcaaacatcaccaatcaaactgtacaatctcaattgcactatcatattttaagttgtagctatctcaagagagcttaagattttttttcagtggttaacattttcatataggtaagggaaaaaaaggctagggaaagtagcgaacgaagcagctgctggacgtctttaagcttttttacataaaaattgttattgacattaattacttaaataactctgaataggcactggaattaattggaattaatttgatagcagctgtgacattgaagaagttgattggggaattttttttagaaaaataattattttagtgaaaaatacaaaaataaaagctgatcggctaaattgcaagtttaatactctgtcgaacaaccacagttcaacagatacttgtcgaactagagcatagcagggggcctatggaacaatgtttgatagcatgcagagttcgataggtccttcatgcacagtgctgcacaatagtgtacagtgtgcatagtgattgttctcttttttttattatgttttatcccatatcgaacaaccacagttcgacagggtatcgacaggggataaaaaataccatgtcaaactacagttgttcgatatgtaccctgttgaattttggctgttatatggttatatggtgtactaaacttgcaattttagtctatcaacctctatttttacaattctctattaaaataatattatttttaaaaaattcgttgattgggtggattttgcaatccctaagggtgctgtgcgtggccctttcctttcctttgtccatttgcagctttgtctctttgctattccctccgtcccaaaaaaaaaaagacaaatcctggtttccatgcccaatgtttgaccgtccgtcttgtttgaaaaaattatgaaaaaaaataaaaagacaagtcacgcataaaatattaatcatgttttatcatctaacaacaatgaaaatacgaattataaaaaaatttcatataagacagacagttaaaattggacacggaaaccagggtttgcctttttttttttgggacggagggagtacctcctactctcctattaacacctctattcaagacaatgcgtttgattgatgcagtccatatttttcaaagcgataggtaaatactaattatttatatgtagtaccaaggggtgagtggtgacaagaaagagttaaaatttcagaagagaataaatgctaatcttaactatatttggttggtgtaacgccccgatttctgcgtggcgttaaaagctaatttacaaaaaaccctaattgcgaaaattttgattccttgagtgctgagtctaagttgtgccaaagatctcaatttgaatccctcctttagtccatcttcctgctatcaaaaatcgtctccttaaatttccatcccaatgtaatctcgaagctcgattccttctattcagaattccctcctaaaaccccatccgtgaacttcgtcgaatgctcaaaccctaactcagtccaatgattcacctctgcatcctaaactctcccttgggttccttcaaaaaacaattctcaaattcgaattcaacctcgattcatctacctcctcctccttatatgtctgtctacctaccctaagtttctttccgattaatcaatctcaactcctatatttataatatctccctacctatcgctcaatcaccctttgaaatcatctccgagtatttgttccaaatcccaaggtatagatctatcctcgggataatacccgttccaaataatctcgtatgaacctttctattcatatttctcttcaaaatccttacctgcatatctcgtcgagtagtcaaactcaaactcccaagttacactctcttcctctaaattatccatctccctttaactcgtctccgaatattgtttccttcctttgactcctccctattctcccgagtccgagtatcaacttcgacattaaaacctagactccaactctaaacctctccaattaaacctctctgtgaaagtctaatttacccgcccatggtggtggattcccttctttcatttcctcccaggtccacctcttcctgctcttccggcccatatctctctccctctaaagtctagacctatcaaatctacctatttatttcgtccctctctctacattgatctacctagcgatctatctatctatctatctatctatctatctatcgatcgatccttttatctatctactatacctacctatatgtttatctatccatccgtcaatccatctgtctatccgtccctctacctatcgacctatctctctgtccacctatctatcaatctagcttatccatcgatctgcccgtctgcatatctatcgttgaactctttcccaaacaattgtcccaactccaagaatacgaggttccttttgaatccctctaaaataactcttgagccgcctaatacagatatattccagaaatatataattcccgcctttgaagcctttcctcgacccctccatatttttccgagttcaaaacatccgatttgaattcaaatcccaactcaaattctcaaaatactccttaaagaaatttcctggagaaagtctactcgccccccttgcggttttgggctgatttctccctccccagcccaacactcccttcggctcacaccctccacgtgcgccgcacgtgatacgcaccgaggacaccgccccctttcttctctctcgcgcacgcgtgcctccccgtctcgctctccgctcgccgcttttgatttccgccgcccgtcggcgatttgaatttcgtcaccgccattgccgctcccgcgcgcggcgccgctcatggccgaccgctgtggccgcgccaccgtcacccctgccgcgtcgaccgccttggtccgcgctcgccgccaaaccagccctcctcccttttcgctgtcatccgctgcgtcaccatggccccgcctccgcatgccacaagccgccaacgcggcgacgccaatcccacgcgcctccccagcctcgccgcccaaaaacggaaggagcaaggctccctttcctcctcctcctttcgctttttcccttgcgggcaaggccgcctcgctctctcccttgtcctggtgcgggagcggacacagggtgccgctgacgccgcctttgcgccctgtcgcgcccacgccaccaccgcgaccatgccagctcgccgcccccaccttgaccgcgctagcccgcgctcgcggtccgattcccaccgcacgatccaccgccttcgctgcccaatgcatccacgccgtcgccgctttcgcaccgcccacgaaaccgccgctgtcgccagccgagcgcctcttcgcctataaaatcccaaccccatgcccacaatcctttcccccttcaccccgtgctccttggaacggagtactgccgcctcctccctcgaccccggtcgccgtcgcgcggccaacccagagcaccgccgcctccttcgtcgtcacggccaagaacgccaccgccgcgaccaaggacgccgttcccgcacgcctccgtccccttccccggcgcgcccgcggcggcaccatgccacctcggcgtcgtgttcgtcgccgtgcgccgctgctcgtccatgcgccgccatcggccttcctccccttcccatcaccgaagtccggcgacgccgttccccgctcgacggtgagctcctcggctcctccctccccttggcaccccctttccttttccgcatcgtgtagctctcgccaccgccgcttggcgctgctcgcgcgagcagccgcggcgagcttcgtcgatgccgcacccggctgtgcgccgccgtcggtctccctctcttcgaacccgctcgccatcaccttcctcggggccccctcgacctccccaatccattcccctggccgccgacctccccttttgctctcgcgccgtgccgcccgactggcagccgcagcgcatggatgtgcgccgccgtcggccatcccctcgccgtatcctctcgcctccgccctcctggagcccccttggcccttcccagaccgccggcctccccaatcgctcccgcgccgtgccgccccttccgccgccgcatagcgccgccgcgcgcgcgtcgccggcgaccattgggttctgcgccacggcgtgtgcgtcgcaatacctttccacgtcagccgagcccgagcccgcgcgcccttcgctttcctcgcgcgcgaccacgtcggacatccggcgagcttcgcctccgccgccggccgccgtcgtacctcctctctcaaatccaaaccgttgaattcattccccttgtcctcctctcgccgccagtgctagccacttcctctggctcgccgccgttcgccggagcgcgccgagcgtcgccggccatccgatgaggttccggccccccctctctccccatccgacgtggctgcccacgtgggcgttgaccgggcccgcccctgcccagtcagccgtctccccctctctcctccccgctcttggtccaggcccatcggccaacccccctcctcggccaaaaggaacaaagtccactcttactccctccgtccgagcccagtgaacacactcttgaatcaaagttcatatttcgtccctccaccaaatcagctcccttacacaaaagtccacctatctcccttgttggctccacacgtcaatgagtgactaaacagaatattctcgggaatattcttttccataagttcaaaaaaatcatttccccttgctccataaatcatttcctatattccaaattccataaatcctttctcttaatcccaggatttcaataattcattcccttggtcccgcatgtcaagtgattgtcaataatattcttgagaatattatttctataaatttcataaatcaatttcccttgttccacaaatatttcccttaattcaaataaacttccaaaattcatatctcgcgatccgtaactccgtttgactccgttccacttccaataattccgtaaaattgtgatctatctaatggcactattaattagcctaaataggatcttttatttggtcttttgtttaggttttcattgtttgtgcctagttgcggttgcggattttcgtcgatcagggatttctcgaagattcgtgaagatcaagaccctgagcaaggcaagccacctttgaacatcttgagcctataattgaacttaattatattacttgcaaaatattatgcattgataggattgcacataatatgtttgccccgtctgcgaggcatattagtgggcatacctaacttgttgcatttgatccttccgttgttaaattgttatgtcatgtttccttgtaaccacctggtcgcgcctcagtattcttgcactcggtgcgagtatcgacggtcgccgtcaaacttaaaatatggtaaacatcttgggtaaaacttggtttacaaaacgattggaaaaccagacgcctgggtcggtgccttgtgaaagaaaatgagctttaaaaataaaactcgtgacacaaggccattcctaggcgggatgcttgtgcggtcgcatttaaggaccgattccttcggaattatatccaagcatatgatagtgcaaccacatgggtggaatgggacacccctggctgagtaattagctaatcaggggagccttgatgctgagagacaagtggattcgccggggtggtgtcggggaggacccctgggcttcctggcacagtatggtctgggacctaacctgttgttggtctgggacccctctcgtcagcatatggtaaacctgtgtcggctttggaaatgccttgtcatgaaagcttggaggtctcccgacgtggctgatccccacgagctgggtgatccgggttagtaatgtcgtgtgggtaaagtgtaccccctctgcagaggttaacaaactgttcgaacagccgtgcccacggtcatgagcggatgtgaggtgattccttagcgtagttttcatttttaccctgttttatgaaaaagtgatgaggtttgggaaacccgatatttggaaggcaagtggctgtcagggagacagcggaacagggagtccctaaaagtgactggttgtttggagacaaccaaaactctgaaagtctggaaaaattggtttggtttgggaaaccagctttgaggccaactctgggagttgtgcaaatcttgataaaataatattgttcactcctcacccccggccgagctgagacttgtctcgctctggtcgcggaatgcacacacttagattgtcaaaatgcttgcaaataaaactgattgaaaaataacagccttcccttgaagcttgcattaaccacctaagttcccttggcttgctgagtacgtaagtactcacccttgctctctatatatacatagttctgccagctctgaagatgaagttgaagcaaagattagggtttcgtcctagttcccagccttcgcctgtggtgttgggtgttagaccgttggttccgctgctgctgctgttgttggtgtttcctcgtccgcgtcgtcggttgcattctctggctgttctgagctgcaacctaagttaagataaataagtactctatttaatttaaggattgcaatgattcatatttgtcactgttggtaccagcgctatgtcctgggactggtactgagatcgcggtttcgtaggaagcggttcacgccgtttttcttacgacacgctgctgtcaggcgccgttgtacgacggtaccggattggggtgtgacagttggcatggctcgtaactcttgaagatttcattagctttcgtctacattttttttgttctgaacaggcactatcatatggtgcatcatgagccgaaactccatcaacagttctctgcaactgtttttttttttgaactggcaactgtttgatttactacaatagtgaagcgtttgatgacatagccgcagtaacaaataatgtttctatccagtttactgaacacatgacattaacatcacaattcatacaacaaaaataaacaatagtactccaacctcagttctggccatctgttcctacttcctatccgcagcacgtccacataacagaattggcccaacataggacggagatggcaatggggacctctaacccgtgactcgacgggtttttactctattagaagctaattgtgttctaactcttatacccatgggtctactaatgggcaaaactcttacccattgggtacgcgggtatggatctattctttacccacccatacccaccaacccgtgagtgaaaaaacccgttgattgagcctaaaactataagcaatataagtctcaacgactactaaatcagtatgaaactcctttcacatcttaagcattgttacattctagttatatgaaattattattcgatttcttgattatgtaatgtggttgtataatttttttacttgcctttaaacgctaatgttaatagattgttgctagagaaaatattgatggtttacaactctaatatggctaattatagtacaaaactataaatgctacaagttaactatatgggtatgggtacccgttggatacccgttacccgcacgggtgtgggtatggggcaagggaacccgattggtatgcactcgttgccatcgatgggctcgaggcggagcgagagagcgacccatcttcaaggtcaatggagaagcgcgaaagcgagtagcagcgggagttgtaacaatcggtgtggatgaattaggccctgtttagttcccaaaaactttttctcaaaaacatcaaatcgaatctttggatatatgcatggagtattaaatatagataaatttaaaaactaattatacagttaggggggaaatcgcgagatgaatctttcgagcctaattagtcattagccataagtgttacagtaacccacatgtgctaatgatagattaattaggctcaaaagatttgtctcgtggttttcaggcgagttatcaaattagttttttcatttcgtatccgaaaaccccttccaacatccggtcaaacatccgatgtgacacccaaaaatttccttttcgcgaactaactaggcccttaatataacatggattgaattatatttgctgaaaatattattattcgattgatatttgaatttacattcaaatggatattagggtgatcatatttaagggaaacactcatgtttgtagattataaaatatacccaaattttacttctactacaaaaatttactactactactagtcaacttgcatgcaacattaaagaaactggacttggacgagagtcagtcaataatatatctagctaactgaatcagactgatcgcataataaagccactagcaaggctatgtttagattttaacttttttttcttcaaactttcaacttttccaccacatcaaatatttagacatatgcatggagcattaaatgtagaagaaaaaaaaccaaatgtacagtttgcatgtaaattgcgagacgaatcttttgagtctaattacgtcatgattaatcataagtgctacagtaacccatatttgctaataacagattaattaggttcaaaagattcgtctcgtagtttacggtccaaatctataatttattttgctattagtctacgtttaatactttaaatgtgtgtccgtatacgttaaaaaaatttttagctctgaactaaacacggcctaacacgacaacctatgtgaatcccattaagatggatcatggatgcaagaagacttcgccgagtcataaagaataccctatccgtttccatattaattgacgttttagataaggttgaggttaaacttttataactttaaccatcaataactttaaaaatatttagtttaaaggaactagaacaacatgcatttatttattatatatatattataataaaaaaaaagatcacagatgcatcttgtataccgtgtcattgtccaaaacgtcaattaaaatggaaccggagggaatatggtcattgtatctagtgcgcataccacttgtttgtctttttcttttttttttttgaaagaaattaaaggcaagaagataccacttgttagtcataatgaggacctctacttgattgataatgaggacttcactgcgtcataaacaatgataatcaatgtacgtatgaatctgatttagtcccttcgattgcatagaggaattcaccacatgcacaaatcaaattaaatcaatgcatacggtttaaagaaacactgccacaaaatgaaatcaatataggaaatacttttaagactgcggtgtagcgtagatggcatggtgcagcactgcagccatacgttgtgctcttcgcgacctgcgttcaaatctggctgaacgtactcaccctctttcttaataaattcaacattgggtcttttccagtataatttttttttgttattttacgcacagaaaataaaaacaaaaagaagcgggcacacgcatttgtactttgtagagcatttggttagcacactgacactcctgtttgctctcctctagctacttcctcaatgccttactcaacggaaaggacaactcaattatcttagctaagtcatgggtggtatctgtgcacagatgtagctgtgcagtagcaatagccagtgcaaggatctgagaccttgggtccctttgcttgtactaataatgaagaggacttcacttggtcataaaaaatgatgggcgaggacagcctcaacctgtaaatcatactatatactccaacctgtatatcacctacagagggtgaagcgagtcagtgtgagcaagcagagaagagttttctaaaggaaggagatgggatcttcaagtgttgtgctatggtgggaagagtggcagctccgtatcctcgtcctcggcagcctcttcctgcagtgcttccttgcatttgctgcagttcaccgtaggcgctccatcccagcatccttgagattctttatttggttagcttaccttggaagcgatgctctagcgatatacgctctcgccacactattcaaccggcacaagaccgataatcaaggcggcagccatgtcctcgccaccctggtcagccctcaggggaagggcggtggcgatgacactggccttgaagtcttctgggctcctgtcctacttctccacctcgctggcccggactccatcacttcctacaacatcgaggacaatgagctatggaggaggcatgtcctgactgtgatttcccaggtgacagtatccctctatgtgttttgcaagtcttggtcgggtgagaacaagcttcttagagcagctgttctgttgttcattgctggaaccctcaaatgcattgataagccaatggctctcaagagcgctagcatatatggcctagtaacctcatctcctttccatgaccaaaagtcacaaaataatgaccaaggcgagaatagatcacttgaagcctacatacaagaagccaagggttatttttccaacctaaagatcaatgatgtttatactgagttggtagcagctgcccaaaacaaagacctacgggttatgccgttttggttattcgtagacctcgcatctaccttgtgtcatcgtcttagagtcttgcgtttcttcttggttcttgacaacaagagcgcggattcactgctacagacggcactgtgtggttcctttgttcgtctttacacaaagaaaagcatgctcctcagttatttttgggcaaaagataaaaggaatgctctcatatctacttattcccacctgaacaggctcttagcagtatgcctgactatttcagctgtcgcactattccaccagagccataaacaaggctacaataatagtgatgtcaaggtgacatataccttgctatggtgtaccgctgctctagaggtgtacgcacttttcggtcccaagtacaaatttttcacctggtgtaagaatgttgcccaatacaatctcgtaggattcttcgcccgggaccaaacgcccaccaggttgctcaagttggccagttgtttttggtgcaaggactatgtggaccagcactggtatgtcaaccaatgctcatcgtctttcgccatcacagagcttgtaattgaacaggttaaagccggatggaagaactacatagaagatacctccacctactggatgttcaacgatcgcagaggccaactaaccattcagcatgagctttgcgatgaagagctgtgcaagagcttagatgtgccattcgatgagagtatcattgtttggcacattgcaactgacatatgcttctatgagggtgcccctgcagctaatcatcatcatctcaaggctgccactcgatgcagagagatctccaactacatgttgtacctgttggtggttaacccggatatactaatgtcgggcaccagagcgaacatcctctccaatacatgcaaggagcttcgtagcatgtttgaggatgagaagccaccgtctgatgaaagtgaccttacaagggagatacacagaagggcccaaagctcgaatgtcgacgctgctgcaaccgaagaactgattccccgtgcatccaagcttgcgagccagttgttggccatggatggcgacaagaggtggaaggtgatgcaaggtgtgtgggtggagatgttgtgcttctccgcgagcagatgcagagggtacttgcacgccaagagcttaggccagggaggggagtacctctcctacgtgtggctcctcttgtggtacatgggcttggagagcgtggcagagaggcagcagagatcagatttcaggagtcacgtagaaagagtagccagcagacaactaccgtgtaccgaaactgagagctctcaggaaccgagattcaagaggaggaaggagcagttgtgccattgtttcaggagggaaacataggtgtggccgttagatcaaatgttgaagatgaggaagcaggagcagtcacattggaaattcaagatgatgaagaaacggcgacgactacacatgcttccaaagcaactgtcccgggggacaacaatgtctgaaattcgtgtggtttgtctttagtttgttgcatctccttgtttttatttttcaattgtcatgtttgttggtgttagtgttgttgctggactcttttatgttgttgctactaatacttctctagctttgtagccttataataataataataaaagactgtgtgtctgatgatcattgctacagtaagtgacctttactgttatttccaacttttcaccacaattgtgtgcatattagttgttgatataaatgtccacgctttttgtcattaaactcaacgaattgttctggggtgctatgaatgcaagctattcttgagtacctcaacctccggaccatcctgagatctttgaagcaacccactgatcaaccggattctctttcttgaaagtgggaaccatcgggggagtacacttcctggtcggcttaccaggtgctatatctggggagaatcccattccaaccaacgccaatttgatattccttggctcctccacgttgtcgctacttcgtttgggtgaccgttctgaacgggtgttgagcggccgaccgtttacgcgctcgagggttgccgcaccctgatcgttgtgtcctctgttatcagcatgagaagtcgatcacattttggtcatgtgtccggaatcccggcaactctagtggctcgtgctcacaacaaacggatagcccggttgcctgccaatgaatgaagactcctttcacctgtggatttgcaatagtcggaagaagattgataaagcccactgatgaggtttcaacaccattgcaactcttgtagtgtggacgatcgatctagaaggaaagaaataatcgggtcttcagtcaacaacagaaatctttgtccaaggtgacgtaggcgatagctgctgacgcagcactttggcgcttggccaatgcggtggcaccggcgataggattgtaactgcctagagcccatggtcgccaaatgcttttgtgagaataggctttggttgcttaggctgtgttcggcagccttggttgggaacccatgtcccgcgcacggaaaatagagtggtccattagcacataattaattaattattagctgtttttttaaaaaatggatcaatacgatttttttaagcaacttttgtatagaaactttttttttaaaaaaacacaccgtttaataatttgaaaaaacgtgcacgcgaaaacgagagggggagttgggaacctgggcaacgaacaaagccttagtcgttcctgtttcatgtctccttcctcttatttttcctttgaattaccttgtaattaaccttcatttcttttaatacatattccttgcgtactcccaaaatctttatgtgctctcacaaattgagaaatacaattttgaccaatctcgcccagacaagttctggtgagttaagtgtctgttggtctgacactaattgttcgtgagctcggaaccggcgtgtgttatgttttcattttctggatatagggaaaaaaattgcaaggcccagaaaactcagaacaggatcccgtgccttttccaagggacatggactatggtgaaaatctgacaaaaatcacgtgataattagttcaacaccatacctacggctgtgttcctagaacagtgcaagcacccactatgaggtaccacagggtgacccgtaggatgaagagttgcaaagacattttctccactgtgcaagcaccgataatgggacccacagatactactttaccaaatcccctcgtcagagcagcatcctccctcctcacattacgccctcacctcccccaactccactagctctccccttgcccctccgccggcgccggcgcccctcctccctccgccggcgccggctcgacgatgccgcctctcccctcccggccctgggcggcgagttgacgagctccccggccgccgcgccgtttctccctcctccccatccgtcggcgcacgatgcagaggagcgtggtggcctcggggacgagcggcggcggcggtctcggggccgagcggcggagctggcggcggcctcgggaacgagcggcggagcttggcgtcgaccttgatttgtgttaccgcgatttgtgttggcgatttttccaaatcccctcggagccgagcggcgagcggcgattttgttgccgcaattttggtgggcgtgttccttgatttgttgccgcgattttggtgggcgattttggggaaaacccttcaatgggcagcgcgagggcacgagcgggcggaggcgcggggcaacgcgctccacaacgtagaaaagctgtcaattcctcgcctggcatgggcctgcggcagggaggaatcgtgcttccctccgtgggagagaacgtctctgctggggcgcggaacctagcgccacgcaaagctcgattccgacgtggcgccccatagcgtcggtccacggtgttgcactgtgaagggccttaccccatgtttcataacctatctctctcgttttccgcgcacacgcttttcaaactgctaaataatacgtttttttaaaaagtttttatgcgaaagttgcttaaaaaaatcatatcgatccttttttaaacaatagctaagttaattaattacgtactaatgaaccgttcccttttcggtgcgcactgttttcgattgggaacacgctagaacacaaccctaacgtcatatactaatactcgtattctttgttagagagttttttttattattttaatggtgaggagtcgtactcgtactcgtattcggatcttgagttatttatcacgaacgtatagctagtacgcacgcacctgcggacctgcctcttgtgaaggccgtagagaaaccacaggaaccgggaggatcgccgccgcctacagacaggatgccgtcgtcgtcttctacgcctgcagtaacgataacgacgagggaaaggtaaactaaaagcaacgtatctccgttttaaaatccttgtgtttctcgttttatctcaagtcaaaatatttatatctttaatcattaattttgaaaaaattatatagtttaaaaccacataatttatgttttttagattcatcatgagaaacacatccataacacgtaattcacaagttgttaaactacataaattttaaaaacttgatgatcagagatagaagtactaagttcatggaaaaactagagcgtcaagtaatttgagaaacgaagcgattatttatttggttggctccgtcaaagtcgaaccagcagtgttataccaaattgttatggttatggataccacatacctaatagtagttgactaaacttagcagggtccaccacatactgtcttatacgaaaacaaacctcgtatacagaaagagtttcggataagaaaggacgaatagagttctatatggaaacaacaaggactactcgtattgtatctatattggtctccataggataagaaaggacgaatagagttctatatggaaacaacaaggactactcggattgtatccatattggtcttcctagttctatatggagaaggggacatctatgggtataaatacaagcccccctaggaggagaagggacaagtcacaagacataacacacacacaagccaacacacgccgccggatatcaacatcagaaataagcctagacataacccatccggtgcctacgtaggttatcccaaatattgtatttgcgtgatccagatgaataaagagcaacacctgcctacgtaggttatcccaaatattgtatttgtgtgatccagatgaataaagagcaacaccggctttggccaacaggatatatggctattacctatcagataagataaggggcccgaacctgtataaaaatcctcgtcttcatctcttttacctcaatcacgcatatactctggtaccaacgatccccataccatccaaataccgtagtcgcgatcccaaccgtcgacacaaatgatataaaatttatcaataaatataaatacaagtaatttaaagtattaccctaacaatcgtccctttttaaactttttttcttatctcaaacaacccctcctacttcaattcatcccttatttaatactccctccatcccttatttacgttctaaatctctactattataaaaattaaagacgtttctgccgttactttagtacgtcatctatgtatgagtcggtttttaagtttgtttatttttggaaatacatatctatatttgagactgtttttaaagttcattcgcttttagaaatacagaagaagtgaaatacagaaggagtcgtataagaaatctttctaaaaaaaactcgcatgctaacttgagacgaatggactcttatatatagctcatgattttataaaaaaatatatatccaagcaaattcccacagtaaattttaccttaactaaacaataaacaataataagattaaaatagtatccatctgttgtaacacatgggcattttttctagtataaaaaaatactccataagcaagggcttgtttgaatgaggtttttagctatgtgccattaaaaaagatgacccctgcctctatgccactaaaaagttctagcctcccagaatgccatcgtcgagctttatcgcgccctacacacccttccgtccgtttttggtcctaacggtgtcaaatggtgcagcgaaatgactattttgcccttagggtgaataggccattttaacatggtagtttccttgtgtgccattcggacggcacccacaggcctatttttttggcgccaaagacagggctggttggcgccaaaggcaaggcccttctccttctatatataactcttcccaatccatctccatctcattgtcctctcttcttctcctatcttcttctcacctctcttcttctgtagccatgtcccaagcatccaacagctatggtggtagggtgaagcgggtgctttgccccaactgcggtgtgcttgcaaaccggttcatgtcaacaacagagaagaacaacaaccgtgtctttcacaagtgcccttattttgcagtttgtgcttcattctttgctgacatcttgtattttggttgtttttttttgctctttgctcacaatgttttgatggtctggctttcagattgggggatgtcagtattatcagtgggaggatgagatggtggacagtgcagtgcaggcacttcatgcccttgcttcaatgcatgctgttcccatacaggcagtggcaccacctggtgcttttcctactacactgactagaggcaatgctcaagtggatgcagcagattaagtggcttgaaaagctggtctatgtttgcatttttcttgctatgtatgctattttcaagaagtaggtggctcagtagtcatggatggatgtatggatgcatgaatgaatgaatgaatgaatcaatgaatcaatgaatgaatttgcaatgatagtgtaattgcccagaatgtaagaaaatatcataattagctgtttcatcacatgacagcaccaaatgtgacagcaccaaatgtcagcaacagacattacatagaaactacttaagtggtggtttgcaatgttacagaccaaaagaacagaacaaaagatgtttgacatcacagaacaaaagatgacagaagtttttcgccatcacagaacaaaagagcccacagaatgttcagaatgctttactgcagctggagcttcctgctcctggtatttctggcggggctgtctgggcttgatggagtggctgcaacttgcggctgggtatcctgttcaatggtctcatcagggcaaggtgccacacattgtagtggaactggatcatttgaaccagttgcagaccttgtgctaaaacaaaagcatgatgcattaggtgacatggatggattatttgttctggtgagttgaagacttgtggcaaaaagaaaacaaacatgttggacacactgattggttctgaggttgtggttgtaattgtagtaatggcagatgacccctttttcttcttgttggcaccagatgaagaagaagtcttcctttttttgtgggttgcattggccactgcttcattggctggaaagaccatctgggagggattagccaacactatactggtatcagtgttacatggtacagctttcttcaacctcttctttggtagacctgtcacaccccaatctggcaccaccgtacagcggcacttgataggagtgtgtcgtaggaaaaacggcgcgaaccgattcctacgaaaccgcgatctcggtaccagtcccaggacatagtgctggtacccacggtgacaaatatgaatcattgcaaatccttaaaataaatagataacttatttaccttaacttaggttgtagctcagcacagcccgagaatgcaaccgacgacgcggacgaggaaacaccaacaacagcagcagcagtggaaccaacggtctaacacccaacaccacaggcgacggctgggaaccaggacgaaaccctattcttcacttcacttcatcttcacttcaaggtggaggaacaatatatatatttatatagagcaagggtgagtactttcgtacccagcaagtcacggaaatttaggtgtttgatgcaagcttggaagagaggcaaggttgttttgcaaatcctttattttgaaatcattttgaaatcactaagtagtttacttctttctaagtttgggccgagaagagacttgcgtctcgattcgactttaagagatgtttttcaacaactcaattggtaatgtaccgaccccccgggtcagatcactacttctcggctcccagagccatttcacttgattaagcggctcccagagccttttcattttctcggactcccagagtccaactacccagcagtacaacaatccgcttccattcgggaagcctagtctatgatgcccgtagacatcccgaatcacacagattcgtttcttgaccactcaggtcatccatctgccacgtaggctgattctggtaacgattcccacaccacaacaacttttcacaaagcacatgcaaacaaatctacactataggaaacacctcacatccgcccatgaccgcaggcacggctgttcgaacagttagttaacctctgcagagggggtactctttacccacacgacattactaacccggatcacccaacccgtgagatcagccacgtcgggagaccttaaggctttcatgacaaggcattttgaaagccgacacagggttgccatatgccaacgagaggggtcccagacagacaacaggttaggtcccagaccatactgtgccaggaagcccgagagttctacccgacaccaccccgttgaatccacatgtctcttggcatcaaggcttccctggtttgctatttactcagccaggggcatcccattgcacccgtgtggtcgcacttgttatatgctcggatgaatttcccacaggaatcggtccttatatgcgaatacgggagaatgccacataggcacaacccccgcatcgcgagttttcacaatttattttattttcaaacacgccgacaccatatgtcgtgtttttcaaggtttctcaaacccatttcccaaattatcgacaaacaacggtgtatgtggaatagttggtatacgcgctcagagagcacgaataccgaagtaccacaagggtggagcgacaaggaatcagggtagtacagcctacaggaattagtgcgactacttgggtaggtccgtcggtttggcacacaaaccgaggccaagcaagttagacgggtgattctaataatgcaagttgcagaaaataataatgtttttccaattataggagcaattggtcaaagggtgacttgccttgctcaaggtcttcacgaagcttcacgtatcttcgagaaaacccgcgatcgacgaaaatccggtaaccgcaagtatacgcaaacaattaaaaacctacacaagacccaaaataaagatcctatttagactaaataatagtgccattatatagatcacaattttagagaaaaactggaagtggaacggagtcaatcggaattacggatcgcgagatatgaattttggaagattaattgaaatttctggacaagggaagatattttgtggaacaaggggaaaatgattttttttaaatttatagaaataatattctcaagaatattattgacagtcattgacatgcgggaccaaggaaaatgattcatggaattttggaataaggaattgatttatggaacaagggtggaaaggaaatcaaggagggatatatactagacttgtttcgggtggcattggtgcggcccaaaggagattggcccattagagcccgggtggggagagagaggtggtccggtggaccaagttcacctcgcagggtcccgagtggggcccgcttgtcggtgagacggtccacggaagaatgggcgcacgcgggacgcgttgccttggatcgttggatgcggctcacacggtgtgcaccggttagacgggagagcggcggacccacgcgcagccattgggctcgccatggaccgcgcgcacgggggagagggatggagggggaggctgactaggcgccggcttgactcggtcaagcgggcccgggggctgaggtggcatccactgtcacgaccggaaataacccaacgggcgttccttatgtgcgtgtattattccttgtcccaggaggcaaggtacaccaaaagttgatacaattcagagtttaacaagcggaagcgtaagtaagtaatttattacatgggcggcgaaggcccagcacacaagaagacaaacgaaaaacatcggaagactagggcgacgaccacaggcgcttgacggcaggcacgagctagagatcaaagccttcatcttccaggaacttctcttctgggtttgggaaaaattgagcaagactgagtacaaccaccgtactcaacaagacacacccataagtgcagaataaatgcaagggagtacaagggggttataatataaggggttagtgtttgcggtaaacagctgtcacaccccgaagttctcctcccaagcctaaaatttaatttataagagaccctaagaaaataccggtgcaaagcaagagtaaacccttttaaatcaatgcaaataataatcggagtgggcatgtggaatttttcttgagttctacatgtcgaaattcactaacaggatttttagtggaattttcagagcgctcgaaataattttaaccaattaaaattgagcaagcaatattttaattccagggaaaattcttttctcctttttctttttctttttcccttccttttccgaatgggccgctggcccattctctcctttcctccccctcctccctgctgggccggccgcaggccgaggcccagccaggccgccccgccgcccttctctcccggggtcgccgacaggtggggcccacctgtcgggtccttccccaacctcccgccgctcccgccgcgccgccgcgcccgcaaccgccgccgcgcccacgtctccgcctcctccgggccacgtcgaccacgcccgcgcgtgcgccgcgttccccgcgcccactcccctctctctcccgctcgcgcccgcgcccgagatggccgagattcgattttcgaatcccgtctctctctcctcccccacttcccccacgttagccggcgaaatcccgcctctcccgggctatgtccgggcccccctctctccctatttaagctctgccgttgcccccttttggtttttccccaatttgcccaactcccttggggtccccattggttccgggccggggaaccaaccgccgccgccggtttcggtaattcggcgccggtaaccggccgctaggttggccgccgccccggccgttgccgccggtggggttggggggcccaagatccccaaggtcaaccctcctttgccgaacctcggccccggaagcgccattcccatcgtgcgacggtgagggttgccatgtccgccgccttcggccggcattcccgtctcctatggcccctctcttcctctctaatctatttcttttcgttctaaaggtcgtcccggtcgccgtccgccgcgtgtcgacctcctccgtcgctcctcttcgccggtcgccgccgtcccattcggtgaggactccctcccctttcctttccttccccgattccccgtgcgtcgccgccgcccgtgctcgccgtcgccttcggtcgttgccgccgtccgctgccgccgctgtcgcgtcgcttttgcgccgtcgcctccaccgccggatgccattaccggcaacgcattcgcgcgcgcgtgccatcgctgctagccctggccggccggtcggctttgatgccgagccaagcccggcggccgcctctatcgccgcccgtccgatcggcccaagggcgatctgggccgtcggtcccgtggaccggcggtggaccacctgcgtggtcccggtccacggtgaaccgcccccccctgagccgctgaccagtgggccccgcttgccggcgccgcaccccctccgtgctgacgtcagccctgggaattattgcgcaataaatgatttaaggtttttcttttatagtaataaacacagtgaatctcttaaaattcataataattcatccgagctccgtttaagcccatcaaagtctcagtaaatcaagaaaaaatgtgtagaatccattaaaaaa

SEQ ID NO: 4874 - DNA, 46891 bp, Oryza sativa
caataaaccaagtttagggacatcgatgtgcgctatgcaagttcgttgacctaagttaaacctcccgacaagtttaaggactgctggtgcattttactcaaatatatttatacaattacttcgattagcattgacttcaatatttctatgcatgctatagagccacatgtgcacctacctgaaagccttaggtagctcctgtcctcaattactattcatatattttaactgtttagaaggcaatttatcaatgtagcttaagccataggtacatgtagttgagcaatgtaaaataagtttaggataaaactttacttttgttcttagtggtccaaaagcaaaattgaaagatgggaagtgaagaaaaaagttcatatatcaaatctaaaatctaaaattaaaagtgtgttcctgtcgaaaaggttggagtttaatatctaacttgaactatgatgaagaaatttaattgtcaggacgtgttagaccttcctatcagggtttcaaaaaccgccgggggcccggttaccgccacccggcggtacggcggttaccggcggtaaccgcggtaaccgcgcaaaaccgcgacaaatttacaaatcgaaatttgaatttaaaaattcgggcaaaccgcgcggtttggcgcggttaccgcgcggtttgacgcggtaaccacgcggtttggcgcggttaccgcgcgatgtgtaatgggttgcacagtaacgggccggcccatttttttttctttttccaattttcaaatttattctccgttttgctctcaaatttgaataaatattactcttttttaagaaatttcttcaccataaaacactataaatcaagcactaccttcactatttttttttgatttttttcttttttttaaaaatttttttgaatttggacgaattttattaaaccgtaccgcgcggtacgggtaaccgtacccccgcggtacgggcggtaaccgcgcggttaccggcggtttttcacaccctgcttcctatcttgtagaagtatgattgcagtgcatgatctcgtgagatccatccaccaaaaggtaacatttcattccaaccattcatttttcctatcccattttataccaaattcaaaattccctatatacccatgagttttcgttcgatggcttctgtaaccttgaattttgcctcatcttccttatgtccatgagtttttattttttatccccctatacctatcagcccatgccgcttattaactgtgagttgatcattagatttttttttcaaaaataactatattgtactctgatactttacgctacatactttaaaaacatacttaatatgaaagaattcttactctataataaaaccaaaatgaacataattaattggcatcggattctaaaaccaaaatttaaatttacaaatatttttgaaaaatgatgaaatccatacataggtttcactaaaaaaatttaaaaaaaaacaaaactgatttttaattgggtttaaatttcagcaaaaattctgaaaaaattatatcaatttgatttgaaacattttctaaaaaataaattttagtttcaaatttatgataagtaattatgtcctgtttattttttaaaataaatcaattttttacattaagggccgtatttttttccattgaagagcaagtaaaagatatgggtaatatatatattttaagaaaaaattaatggtcaacaaactaccaactcacggagtaggcataaagaaggtcaaaatacatagtcaatgatatataaaaagaacggaattgctaaatatcatttggcataattgtagggtcaaaatcttgcaaatttcgaccttagtgtttgattcgtggttcatgctccggtgaccaactctccttctccataagatcctgtgaccccttctcctccatcacgggcaaccttgacgaagggaatggagttacgagttagggtcccgggttaggataggggtgataaatgggttggagaggaggaagaggaggaggaggagggaggagatcgtcgagcctagggggatgctaatgggaggcggtagctcggtggtggacagtggacccaggtggctcactcggagccgcaaagatggaagagggtggtggactgggaagacgatggagcaggggcacctcgccgacaccggtttgaggaagagggaaagggggagaagccagtcggggaggtctcatcagcgccattgatgtcttccggctagccgataagatcggacagtgacatgatggtggtggcagtgggagcgacaagatcaagcactcgagcccgcatcatggcggcaccgagggtggatagaaggggtaggttagtaagtgcagacgaatcttaaagcaatctgacagttgaatttctacaggatttttggtgggcttctctatcaaacaatacacatacagttccttaaaaaaaaagtctaaattcagggacacagaaaaaaatagacgaaaattcgtaggcacatggaatatattttctcaaatggaagagtgggcgcccaccgagagcaaaggagcggctggctgttctgaccagtgggccccaccccacggggacggttggattcggcctgtttccaggcaggggaggcgaccgttccttcccagagaagcacgacgcctccagctcaccacaccacacctcgtgccctccaattatttctctcttttttttttctagaacaattattatttctctcttcctatttccctgacggcctcaacatgcatcctaatgacagctactgatccttctaatcaacccatattttttttgtgaatattgcatctgaaatgagaaataaaaaaaaacaaccacatgttgtgttcacctcaccactatcactgaacattcctcttaattttgctgggtagttttagacaatttttcatctccttttagtttctctattggaggtccctcccttacattggagattagttagatgggattagtgaacttgagcatcagggtcagtggcagccaattttgttagtaacctgttgatagcaactccagccactaaagtcaaaccccatgtgtaactgctcacactctttgctctaatcatatggttaattaaaatgtggcacacatggttggcttattgactgatacgtgccaacttgcggttagtattttacaaagatgatacaacggttcatacattcaagtcgtgtttggacccaagtaaactttcattttccgatccaccaggaattgaaccgtttcatgtgaaattttaatgtaattttctcgcaaaatgaaaattatgacatctttatttctcatctagatttactaacgttcatataaatttgaacgcatatgaattatatatatcgatttttgcataactatattcaaaaatcaaagcgttttgtaatatgaaacagtagagagtttaatgtaatgcatgaagctaccaaattaatcaagggaacaagtcattaactgttatatagcctataggtttgtttagcaaagcaccaaaatcattaggtgaggcgtcaagccatcaaaccccaattcgcgcgtagaatttggtgacgcgtctcttttctctctcttcttcttcttctccctttaattatcatcacaagacctctctctctctctcactccaagaactccacgccaccatccccaccgcctccattccaccgccgccacaagcctcgcctcgccgcgccgcgttctcggccacggcggcgccaatggccgaccgcgtctacccggccgcgaagcccaacccaccgccggcaatggcgaacgcgggcggcggcggcgcgacggcgtcgttcccggcgcccaagtcgcagatgtaccagcggccaatctaccggccgcaggcggcggcggcgaaccggcggcgcgggcgttcctgccgatgcagcttctgctgctgcttctgctgggcgctgctggtcgtcatcctcctggcgctcgtcgccgccgtcgccggcggcgcgttctacctgctctaccgcccgcaccgccccagcttcaccgtctcgtccgtcaagctcaccgcgctcaacctctcgtcgtcgcccacctcgccgtcgctcaccgactccatccagctcaccgtcaccgccaagaaccccaacaagaaggtcgtctacctctacgacgacttctccttctccgcctccaccgccgccaacgccgtcccgctcggcgccgccacgtcgccgggcttcacccacgacgccggcaacaccaccgtcttcaccgccaccatcgccgccaacgccgtcgccgtcgacccggccgccgccgcctccgacatcaagaagtccggcgccttctccgtcgccgtcgacgccgagacgcgcgccggcgtcagggtgggcagcctcaagaccaagaagatcggcatccaggtgcactgcgagggcatcaaggtgacgccgccgccgcccgccgccctgccgcgccccaaggcggtgaaggggaagaacggcaccgtgctggctccggcgccggcgccggcggactccgacacggcggcgaccaccgccgcgacggtgagcaccgcggcgcactcgtgcaaggtcagagtccgtgtcaagatctggaagtggaccttttaggtacagaatttcgcgaaagtttaggggctcggatgcaaaattttcagaaaaaaggattttcactttatcatttattatatattggagtagaaataccatgcgtcggtggggtgtaaattctctcaaacatttgtttttttgtttttttgcttttcgttttcttctatattatcttattaaatacttttttcctcctctttgtagcgaatgtactgtataattttgtgatttattatttgtaacattataatttgaattttatatttaaattttctacctacaagctgttgccagtactccagtagtagtagtactactgatacaattttggctgcgtttagatccaaagttaaagtttggatctaaacttcaatgcttttatatcacatcaatatgtcatacacacgtaactttttagtcacattattttcaatttccaccaaaatctaaactttgcgttgaactagacacattttggaatttggtagtgtatgccaattgccaagtgagtgttggtaaggtgggtaatcatgaagtcattagtagtataaaatactactaacaatctatataattagaattaattatttaactaacgagattaaataaataagtaaataataatgtaattaaaatcaagtcatggaagggcatgacatgagtgagagattgaagacatgtgaaggacagcgaggaaagggttgctacgtgacgtgcagatagcggtgcacacagctgtaacgccttgtacttgagcgcaggagattggttagtttaacgacgactactatagtagtagtattaatttattattagttttagtttaattaaccgtgctagctggtcaggtaatagtacaatcagcagcaaacagtagaaggaaggcaaaatgtcattaaaggtcaacaccatcattgagtggcgtgagcattttcaagtactacctccgtaccttgcagccatgaaaattcatatctaacgttgacagtatgttttatttaaaaattttataaaaaattttaaaaaaattagtcacatataaagtaatagtaatcataaatttttttttaaataattcgaaaacattgggtatagtaggtcggacagacggagacaggacacacaccgccgtggatggacttgataacaccacaactttgcacggcatcggctgtgtttccgatgtgactctacgaccctgaccatcttgtagcttcatccatctctccctctctccactccattggtgcagcaagtaaagcaacctcgctgccgttaagcggggtactggagaggaaatcagcgatacagtttggatgaattttgaccaaatttaaaattttggaaaaaagcaaaaaaaattaaaaaaaataatggatgttgttcttaatttgtaattgccaatggtgaaaaaaattttaaatagagtaagctaaattaaaatttaagggcaaaatcgaaaatagtttacaagttgaaaaagagaagagaatattgggccttaagtatcctacatattcttccaattattccaattattctcaatttctagttttctatacatattcaaccgtatttttgattttttcccctatttattttacatttacatgatttcagctacacagcccatgataaccgtgcgaatatcgcggtaaaccgtgcgattatcacggtcaaactgcgaaaccgtcaagttttgaatttgaacttttggatgtgatttttgtgcgactttaggcgattatcgcagtaatcgtgttgccgcggtgtggcggtaatcccggcccaaacgataaggtaaaccctgggcagtacattatactactccctttacttttagctcctcttatttaacctaaaataattctatttttaataattattatatcgaaatttagaaaaatagggataaatataataggcgtaaataaagtggagaataatatcattgatattatgcaaagatattactttttttcttatctgtatatgtgagatgggggaataagatcttccttcgttctgagtgtacgacgttattaactttttatggaacgttttaccattcattttattaaaaatatatataaatattactacatcggtattaaaataagtttattttcatcattctccacatatcaccaaaagactataatatcactactttattcaatcccaacaatttttcactttatttaccctcaatacaattattctctaccttcacaaactctaataaaataattacttaaatttattctcttaacttaataagagagggagggactatttatacttttacgtatttatactaaatttttaaataaaatgaatggtgacgtgttatttgaaaagttagtactccattcgtcccattttaagtgcagctatgagttttcatgtgtaactttaatcgtccacctatttgaaatttttttgaataaaaataaaaaacataagtcacacctaaaatacttttttatctctaataacaaaaaaaactaatcataaaaaagaatttaaaataaaacggatgatcaaagttgaacacggaaactcatgacaatgcttaaaatgggacaaaatgggacggagggaatagctttatatattttaggatggagttagtaaaataattatttcgtgagtttgtgagagagatgaggtcgcgcatcacatggagagggcggagccagaacgaaatagaggaggatacctcttgcttaatttactctgttttaaatcaagtttaagttaatgcctgtgtctaagtttgtattaagaatgcacacacataataaaaatcgataagttataacttaaaaaaaaaatttgaccaagttactagacacacccctcccatagtactctacctccgcccaagtgacgacgggtcgaacggagcacgcgcgccggaggcgatccatgtgacgacaacggcgatagaccttgtgcttgcttgatgtacacatactctctctggtctctgctctgctaatacagctgctgccattggttgctttgctgctgccgctgcgcctgcatactggagtaagtaggagtactccaggccggactatcccgtgatccattttttgaatccgccggattcgattcggcataaacgcagcagcaaccaggaatacggccgggtctagaagatcctctgctgctggtcatggtcatcgtctcatcttatcgagacatggagagatggatccatgtttcgtcacgtccgtacttccattttatatttaactccctgtctccctcgtgtactcacgctcaggcctgattcagttcccaaattttatttccccataaacagcgtatcaaatctttacacatatgcatagagaaatatagataaaaagaaaaattaattacacagtttgcatgaaaatcgcgagacaaatcttttaagcctaattagtctatgattagccataagcgccacagtaacccacatgtgctaatgacggctcaaagatttgtctcgcggtttccagacgagttatgaaattagttttttcattcgtgtctaaataccccttccgatatccaatcaaacatttgacatgttatccaaaaattttcttttcgcgaactaaacacaccctcagtcttgtgagagtgctgctgtcctttagaatcatccttcgtaaaagtgcatcaccggagcggcaaaggaatattgaaaaacatattcccatttttggtgcaaatgcatatataaaagaaaaaagaattgcaaacccgtagaaaaaagagtaaattacacccattgtacaacaagttggcaggtgggtgcgatatagtgcaagaattttagaattgaacatctaagtacaacaacttaacaagtgggtgtgttttactgttttatataagaacttgacgatttagtattttagtgtatcaacttggctaagcatatgctaggtgattttttttcacgatgtcaatatgccattacatatgccattacatagtaatcctacagatattaacttttaatattgaattgagcaaatttcataaaactatatgtattttgattaaattatcagaaactataaatttaatatgatgtatcacaaaactacagatttaacactaaatttatcacaaaacaacaaatttaaggtgaaatgtcacaaaactacaaatttagtaacaactttatcacaaaactacaggtttaatgatagtttaatcataaaacttgacaattataagtccaacatatcattaggacgaacaatttaaacccgaaaatctgtagttttgtgataattttattattaaatctatagtagtcttaaacatatagttttgtgataaatttattgttaaatctgtagttctgtgatacattacatcaaatctgtagttttatgataatttgaccaaaatatctgtagttttatgaaatttactgtactgaatttaatctttaataattatattgcacatacatacaatttacatcgaattaacttttaagaattttttgttttcttaccttcttaactatcaaccaaatataataatttctacatttaatttaattgactttcagttattagttattaggataaaatataaatatgctccaaataattaagatgtcgcataacttcttctcaatttattgtattaaaatcgtacctactttgtaagttgtatttatgtgaccatttataaagttcttatactaaattacacctacctgctaagttgatgtaccgtgagtgcaatttactctagaaaaaatacacaaataatttatagggactatctatatatcttgctagaaaaccatagctcatagttttcgaattttggaacattagatatgctttaaattttatgtgcaacagtgatcttatcattttcctccccgtccgcttctccccgcaaccgcacgcagcacaaacgtgaggcaagctcgattgcttgcttcctcgagcaccactgctgccatcgccactgccaccccacaccatcgctcggtctcgttggctggccaaaaggcacgaatggcgctggcgaggaccccctggccagcttcctaatccccttcccctctcccaccccctctcctcctaaagtcatcatcatcgaggtgtccctgctatgccatcttccccgtctccgttagctccccatcgttgaatctaccaccacctcctaaccagttgctttgttttgtcctcatcattgacgtcggtccataggccccctccattcccgcgactccagcggtgccatcgcttcccgctcgagttcaccgcctacttctggtcctccgccactcacggtgatccatttaaagtcgaactcctccctctttccactctcccacccctttgtcacctaggactctaaatggttaggatcgtccccaccatttgttggaattcaacaatgtcactggagttggaggagaagctcactggagcacgaatcgtgaagcaaatctggaggttagaaatttgcaatattgtgctctcatttttctatcgaatgtggtttagcaatttcgtaatttctacatcaatgattattatacgagaatccttaaagatcgcctatggatatagggttattgctacaagtaattctcctaccagcaatgtgaaaatcaggtgacccgtattaaaggccgagagtccgaccaaggaagcggctaactagtcctagtctcgcttgctctacctcaccccctctgccctctctcctctcagagcaagaacaatattgagctataagtaagctatatacttgtatataagagagttaaagaaaaataataagtgttaactcgcacgtaagaactaactctacatgactacatatactcaaataaatatgcataaaagtcataataagagaaacagtgagagaaaaatagagctaaccttataactaacctattactccttcccataatataagagattttgtagggatgtgacacatcttaagaccatatatctagacaacagtatgtccagatacatgattctagaatgtgtcatgtccctctaaattcccctatattatggaactgaaggagtactatactctatagtagtaataaatttagaggttgctctatctcagctccatctcccagctagctagcttctcctctgtcactgctaaagccgacgtcattgctatcgaccatcgtcgcctcatcgaacagatgccatagagtcaagtaggagtattcggcattggcatgtcttggcaagcgacaacgacgcccttggcttcctgcgggcttgtttacgtcagatatgctgacgggcctcggcaagtggcgctgcaacattcgggcattgatccgattgtgaaaacccacaatttcatatttcatccgtcccccaaaataataatttagatagagatcaatatgaacaaccccatatccaaaggtgttaatataaactagctgggtgacccgcgtaattacgcggctagttaatataaattctcacctagattgattttgtatgaacggagggagtagttgattagtcagatacaggcactactacaaaaaccctcataaggatcggtcttataggtgccggttcctaggcctttttccacctccgcacgtgggaaaaaaaaggcacctttaaggcactatagctgtcggttcattagtagaaaccggtaccaatactagatgtgtcggttttttaaatgaaccgacacctataatatattataggtgccagtttattaaaaaaccgacaccaataactataatatattataagtgccggttataaaacgagccgagccaacgagccgagcatcgtatgtcgtccttgtccactcgctctcgcaactcctctccctctcacgtctctctccctcccgcgtctctctagcgacggaggctacccggcggtggtggcggcctcccgaggcgggcagatgcttggcagaggtggcggctgccgcaccctcccctccgccagatccggcagaaggggaggcggcggtctccagcggccgcccggtggtggcggcgggctcccgaggccggcggctgccgcgtcctcccctccgccagatccgatggaaggggaggcgacggtctcccgcggctgcccggcggtggcggcgggctcgcaaggctggcgattgcctggcgaatgcagtggctacccgatggaggctgcccggcggtggcggtggctaccgcgccctcccctctaccacatccggcgggaggggaagcggcggtctcccgacgaaggcggcagcggcagcggtggcggcgctcctccaccaccgccatcccggcgacccaagggcctcgttgccgctgcatcatcctcaaggccgctgtggttcgagtgtgttctttttatcttgtttatgttctcttgtttaatttctctcaagttctcttgttcatatgtgtaccgagaacatgcggatttggatcggatgaacattatagttaaatagatgtaggaattgttcttgttgttgacgtgttccttggattttgattttcggtgtgtggatattgttctgggatgtggaggggatcacgggatggggaggggttctgattcggctcgattcgagccggagtttttttagctcgtgtagacgtaaaggtgccggttctattttacctattggtaccgatgccagcaataggtgtcaaccaattggcgccggatgggaaaccggcacctattgccagttttcaactggcacctatagggcttttttaccagtggggtggccgtacatacaaataaatttttttggctttgtatataaacaactttcgtaatatccgtgcaaaagaaaaaaaaatacttcgtagtagtgaaatatacacaactatagaaatggaaaaaaaaatactattacccttctaaatcagcgttgttatcttttctaccggtagtatagaatattggcaaagagcacaataaagccacttgtttttctttcaaattattaggtgttctttaaaaaggtttgacaaatttcagcaattttaattcctgtaggattatatgtaggggtaacattgagtttctgcgttatattttctaatctctatgtttcagtgtttttatggttgttataagcaaattattaaggcttgccatactttttaagctttaacttgtggctaataaaattgaagcaacgcttaagagagcaaccatgctacacttttatgtactatcattgacataagtgacctatgcaatgttgaagggatcttgtccgagcatctccaaacaaactatctaaattagactctccaaacaactaaatagtcagctcttcaatagacttagcaagccaaactcgttactcactccaatagtttctccatctatcctctctatttcgacttataacactgggatccacatgtcatcctctgctacccctttcttcttcctcctctttctctcccccctcctccttttcttctcccaatggcgccatccggagctcctccacggctctccctctgtggcggtaacaacgaacagttgacaacgatagtgacggtgacggtgacggtgatggtgacggtgggtctgtgcgtgtgtgaagataggtcttggcatagcggcctcgaacacgcggacgaggaagggggtgacaccgcatgaggtgatgacgacgaggattaggaggcacgggagggtgggagccgatggcgatgacagtaggaggcgatgccgacaaggattaggcggtgcaggagggtggaaggcaacacctccctttcagacttcctcagctccgtcttggtccatcgccgctacgccaagaacaacacctccgttgcgccacctctcccaccctcctcggctccgtccccgtccatcgctgctgcaccaagaccggagcctccaccgctgtgacaccctgacccaattattatgaggcccatgtgtcctatgaaagctatatgcgcatgttttgtaccaccttactaatttagcaagggtagaaccagtttataaggcctcttctctccaaccatattactcccgggttaaccctttttacacgatgcgaggatgaaagtgtaagtggagtggtatgtgtaagtgggcctacccgttggttaggctaggctacgcggttctggagggaggactattacaaatgatattagaatggaccctcacggttgcgcgtatatgtcagtgtgtgtcacgcccagaaattcccgaatagaattccaagcaaaatgtgtattaaaacccccgtccaggaccggccagggtacacaaacgacaaagttgacatacagatccacgtcttacaaacattataaaagtcttacataaatgcagtggaaaattaaaggataaccggagctaagccttgacttggactgcagcgggaacaccactccacaggcatcctcgacggcacggacgaatcctactcctcggagaagccactatctgacacgtactcaaactctgggggtttggggggaaaatagagcaagactgagtaccaccaccgtactcagcaagtcataccggaataggggtatgatgcaggatataaccaaaggatagctagagcggttcatttgcataaagcgagcatttataaatagtagttgaaagcagtaaaaccattgtagtaattaatcaatatgaatcatccactgtccaacgctacaccacgttgcaacaggcccaaccatccacctgaactaatcaattccattagactaagctagggtgagactaatcacggtgaatctggttgaccacccataaccgcgggcacggctattcaaatagttttagtctgatcagaggtgtacaactgtacccacaagacacggccccacgacacgttaccgtgcgccgacatgccaccacgacatactggaaagaggccgtgacaggacccttcgcataaccccctctagccaagcacaccacacctcaggtttcaccccagtccccagcgggcaacgggtagtcccctctcgtgtctaggtgaatccggaagcgacagaggccgtcgcagggcccgccccgctccatcacgcccacccttgcctggatgcgttaactagaggaaagctacactacaagcccagccgttgcccacgctggcttgtggtaagtacgataagttcttccagggcatcccgcgaaccggtccttaaatgccatgggcgcgaccatcaaaaccatgcacccacagcccaccatttaatatattttaactaaccaacaccggagcggtggcattaaccaacatcattactagaatctgatatctatgcattaatgtaactcccccattgtgtgctagttgaactaagcatggctaagcaatccctagtccaatctctagtcatgttatatcccaagctaacaaaggagcatggtacaaaaatagcatggctgtaacagtaggtaagcatcccatagtaacattataaaacaatgcaaacattataaaacaatgcagtattcaagggaaaacgatagagcatttgcaatataggatcaacatgttcaagtgacaagcatgacttgccttgctctgctgctggaggaacttcggcgactatttcaaggtacaccggagcgtcgggagagccagaatctaagcgatatacaaagcaaacaatacaaacaggccataagacaattgaaacagagaacaaaaccatttttaatggattctgtgcatttttcttgatttactgagacttgaatgggcttaaacgaagctcggataaattagatatgaattttagaagattcactgtgtttttactataaacagaaaaatccttaattgatttattgtgaaataattaaaatcctggggagagagagggggcggcgccgacatgcgggccccacatggcaatgactcgggtggcagtctgcggcggaccgggtccacggaccggggaaggagcggcgcaccacgtggcgctgacgtggcgccgacatggcgtacacgtggcggccacgtggagccacgcgggcagccgaactgacggccccgatcggacggcggcgggagagcgcggccggcgcgcacgagcggctcaagccggctcagcggccatggcgcacggcggcgcggctcgacgcagcggcggcgcaaggcggcgaccggccggcggcggagggcggcggcgtcttggcgatgcggacggcgctagcggcagctaagtggctaggcggcggcatggtggctaagcggcgcgggagagagagaagaaggggaggaggtgtctcacggacggcgattgacgacggcgagcgatggaggatgatgacagcagcgggacgagctccggaatcacctagcgaacatgatgaaaggggttagggagagagaggaagatggaagagggcgaggacgccgaccgaaggcggcggccatggcggtgctcaccggcgcacgatgcggagtgggttccggcggcggaatccgacggaagaggggaggacggggtggcccgctcgatggtgaaagcggcggcgtcgacggcgcggctcggcatggcggctagcggcggccggagcagtagcggcagcggcggaaaggagggcgacgacgctagggtggcggagggcacgggagcgggtggttgcaaaacaaaaaagagagaggaggagacaggagtgctttatatagacccgcgggggtcgatcgtggccgggatggccgcgatttcgccggcggagtggggagaggtggggaggagagagaggcggccggctgctgggccttggccttcggtcggctcaacggggagggaaagagaatgggtcggcggcccattcgagaaggaaaaggagggaaaagaaaaagaaaaggaaggaaataaatttccagggattaaatattgcttgtgctcatttttaattgattaaaattatttctagagctctgaaaattccactaaaaatcttgttagcatatttcgacatgtagaactcaagaaaaattccacatgccaattccgattattatttgcattaatttattagggtttcgctcttgcttttacaccggtattttcttgaggtcatttataaatttaatttaggcttgggaaaagaacttcagggtgtgacagtgtgcaggcatatggcgcatgtgcgctctatgtgagtcacatatggcgctggcactggtcgtacggacgtgctctaagagggggggtgttcctgcctgtgtggctatatttagtacactttgatggggggaggggtgtatgtgacatcctaacccaattaggatgatgcatgtgtagcctatgagagctgtatgcacatgtttagtaccatcctactaatttagcaagggtggaatcaacttataatgactcttccttccaaccatatcactcccgggttaacccttttacataaagcaaggacgaaagtacaagtagagtggtatgtataagtgggtccgcctgtcggttgggctgggctacacgattctggtgtaagggctgttacagccgtgccacctcttccgttctcaactccatccccgtcgtccgccgccgccaagactggcgtctccatcgcgccgcctctttctaccgtaccgcctctttcgccctcctcggccagcagctgtgacaacggagggcctgtagctaccttggcttgtggcggatagggggaggtagctccgtgccatcgttgttagcaagggcggcgacgacgtcctgtctccgggaggatggggacgacggcgtggggtatgcggatggaaggagggaactccagtgcctctctgctccgtgccatcgtcaacgccgagccagcgaacaatagcaagtggcgctgaccgatacgagagagaagatcagcggtgaagaaaagcatgtggtgatgggaggaggaatgtgtgcggggccaccgttggcaagtgaatttggctggccaagtttggcgaattaatggaaggagggttttggcacaaggatggtttggccacacaattggagagggtgttggaggacgtgttttttttttgttacaatagctaaaatttagcttagagagtcacttggagaggttattggagatactctcagaagagtataacaaatcaaacaaaccgtatttaaattgagatgtactctatagttcctactacctctataccaaaatatatttatttttcacaatcccacacatgccaatacaaaataaaaaatggaatacccttatatgttatcaaatcccaatgcaactattcttcactttatattctttcaatacaactattctctactttcacaaactttaatgcaataattactttaaaataaacttattctgtactccctccataaaaaaaaacccaattatgggtttaaacctaaacacatgtctaggtttaaacccaaaattaggttttctttggacaaagagagtaataaatagaaggagccagaaatgaatttattatgggacggaggaagtactaagatggcttaggcaaaattgtgatagtgaacttaataacctttaatttcatgaattacaaagaaggccaaatgctctattagcaccaaaacagaaaaaaataacccctttttatgccttggtgattggtgatcagcagcaacatctttgtgatgacggatgaacagggatggccccgccgactgacacccatctgccccgaaagccgggcagaggcagaaggcggtcaggtcaaggctgacaagctaccagtagtagctatccatagctctctgtctccctcccataaaaagcgcagtttcccgaagcacacaccgctccaaaccatcaccccccaaaaagcaaacacaaaaccctgacccctctactcctactgctgctgctaccactaggtctcatcattcatttgccctagtgatttatatagggtaagcggctattaaaatttaaacttaaaattttattaacaaatatggtttttatgacttttaacatagtttttctatattagtgtgtcccagaatataagaaattagaactagatgatactccctccgtcctataaaaaaaatttaggaccggatatgatatattctataaaaaaaatttaggacgggatatgatatattatagtacgatgaatctggagatatgtatgtcagatttgtagtactagaatatgttacatctgatactaacttggtttttttaggatggagggagtatatttttaagtactacgaatctgaacaaatctatccagaatcgtagtattgtctcacccgattctagatccttgtattttggaacaaagagagtactacctccgtcctaaagtaagtgcagctgtgagtatctgtatctaatgtttgaccgtttttcttgtttgaaaaatttatgaaaaaataaaaacaattagtcacatataaagtattattcatcttttatcatctaataacaataaaatactaatcataaataatttttaaatatgaagaatagtcaaatgatggatatgaaaagtgcagaactatatttatttctggatggagggagtaagatgctaagtcctatattttacctataaattaattaatgttcatccaatctcagtatatttattttaagatgaaaaatttacccctattttaatatatttatttggggacgaaggaagtattataaatatgatttcaccgtttataatcagatcagccgtggcaaaccgatgagaaccatgttagaggaggtacaataggatattacaagccggttataaacatattttaatgagaaaaaagaggagagctaaaagcagcgggctacaggttcgtagccagctgtagcatagacttcaagatgcatgtgtgtatgacaggtgagactagacattaattatatagtatatatttgttggtaattattgtatgaattagctattaaattgactatagctgatttttagcacatactccctccgtccaaaaaaaaagataaatcctgggttttcgtgtccaacgcttgaccatccgtcttttttaaaaaaattataaaaaatttttaaaaagacaagtcacgcaaaaagtattaatcatattttatcatctcacaataataaaaatattagttataaaaaaaatttcatataagacggacagtaaaacgttgaacacagaaatttagggtttatcttttttttcggagggactagttaggccccgtttagttcgcgaaatgaacatttttagatgtcacatcggacatttgaccggatgtcggaaggggttttcggacacgaatgaaaaaactaatttcataactcgcatggaaaccacgagacaaattttgtgagcctaattaatccgtcattagcacatgtgggttactgtagcacttatggctaatcatggactaattaggctcaaaagattcgtctcgcaatttcccccctaactatacaattagtttttgtttttatctatatttaatattttatgcatgtattcaaagattcgatatgatgttttggaaaaactttcttaaactaaacaggaccttagcactattaaacttgttcttatcgcagctactgtagggacaaacccgtcaattcgcacgggccatcgtccgtactacgtgcatatccggcctcgccgcacgaatctcgaggcaagacatcgaccgacgtcatccctccgcgtctcgtctcgtcggggcggtgctacatatacgcgcgcctctcgtgtctcgcctcgccgcgcgacgcgacgcgacgcgacgtcgaggtgagccaccaatggaggacgaagccggcgcggcgcggaagcggaagcggcgcggcgaggggaagccgaggccgaaggcgaccaagggcggcagcaaggccaagcccaaggggaaggccgccgccgccgctgctgctgctgcggcaaccgaagaagcggcggcggcggtggaaaaggtggcggcggagcctggggtggtggtggagaagaagcaggaggaggactacgcggaggggatcacggaggagtccatcgccgaggtgatgagctggctggagctggagatcaagctcgcctcctccgccgccgccgccggcgcggccgccacgcccgcaccgttcgccccgccgcctcctcctcctccggcggcgggcggcggcgggtacatgccggcggcgaagggggtcaacaccagcaacatggagggcagctgcggcgcgtcgttctcggtgtcggcgtcgacggtgatggcctcagtcgacctccgcgccggcgcgccgccgcctccgccccttccgtggccgctgcccggtcacggcggcggggccacggcgtcggcggcggcggaggaggcggtggacgacgacgagtgggtggaccagctactgacagatgggcccgccatggagtagtagtagtagagtacagtgtccagtgagtagtactagtactgttgctactggtagtagtagtaggaagtagtaggagtaggttttggagggtagcgtaggaggctgacatgtgggggccatgccctttgtgatgtgtaggacagcagggcatgaactgggaacatcttttgtcggtgtacaggggagattcggaggagtacgttgtgtggggtttggatggatggatggacggacggatgtggctctgtcactgcgcgtgtcattgatcagttttgtcgtcaggctttgcgaccgagccataacttttttgaatcgccttctcactccagcgttgttggagaaatcttagcgcagtagcagggattttttttgtttttttagaccttttatttctaattttattaatactagaaaaaagcctgtgcgttgcaacggatgaatgctattttagtcgtattattgttaatttttttatctaaatagtatatgtgatttttatttgatagtatcgatatctaatttggaatccttatttggatggtggccatatcatgtacggtgctttcttatcgcctgaaaagaattctgaagcaattaggagtatgactcttgtcttaagttagcatgcaagttttttaaaaagactttttatatgactccttatacagacgaggtaccaaaaatatcgaaaaaacatttttaatttttaaaatagtagagattttcgtttgatttaagtgttgttatatattttctaatgggtgaaaaggagtttgttggagcaatttatatgttatgcttgcatacatacaatgttctttgttgttgctggcccgctgcatacgtgggcaacgatagagtcggattcacagtgcccactacatggtgacgaaggacggatatgggaggatatataagagtcggatgacagtaaaaaccaattcaaatacggatgacatatcaaagttctcaaaaaacatattcaatttttataatagtagtgagatagagatatagagataaaggtatagaatatccagtttgggtgtaggcaatatcttgatttaatttcatatactgatgccatgattttttctcgataatctacatggaaaggaaacaattttattcaaggaggattataatcattaatccacatggaccaggaaattaatcttgtgttagtagcaccagccaatagcactgccgcatgtataagacacctatctgtgccactacctgaccaagtgacagccatctgattaattaaatgcaacagtaatcgatcaaaagctctggttacggaggaaatcgacacggactcacgtcagccaataggagacgacgtacaaaatatataggcaaaaacattttaaacttttataatagtagatagatacttttctaaaaaatattttcaaatttgaaccttttcttgtttggtatggccaaataactgtcacaccacgcagtgatggcctgccacgccaagacctcgccatgccaatcaacgcttaagcttcggtttttcaaaatattttttttaaaagtctaataataaaattttaaaaaataaaaaagtcttaaaaatgaaaaaaatagtagcagcacttctaggtctcaacaagaagcccaaatcttcacgtagaaaaatgcaaatgaagctctcgtttttagattgacccatcaccaaaactttttccaggccggtctcaccgaggaaatcactttcctctccttcattcaactccaacctgcaccgctcttttcctttttctctcacttggctttcttctacgaaaatcactcagctcccatggcggcgtcccacctgccccctcctctcattcgactcgtggtgcagatctgatgacggctcttcttccctaatcctgtgttgctctcccctttccccatcgttggcgccgctcgccctcccccgcttcgcctgcgccgcatgggagaagacgccacggcggcagtagcgggcgcctctcccttccttctcgccaacggatttgtcgacggcgacacgacaaggaagttggtgctacagatgggttggtgacgagtggcggggtagaattgggcatggcgataagcttggcgtaacaacgaggttttttttagataatggattgacaacaacaaggttaggcgacagatttgccacatcattttccttcaccgtcgccatcttcccttctcttctacgggtggtgatggcttcaccagcgaccgcggctgcctcgcacgaggcgcaggagcatcgcacggggccacaccttctctcaactcatcgccggactcatgtctcacctcacctgacaaacccagacaaaaaacacgtgtctcactttggctacgcagtctttaggttagtagccgcacatgcgtacgaggaggcgaatctccaatgtggcctgctgaggctgaacgccaaataagtgccctgtgaaagcccttatgggaatcaagtacctcactccggtctgtacttgtgtttctctttatatagaagttgtactaactttatcctaaaatactttctgccgtctctttttaggattcaaacttcgtctctccattttaaaatttatctctttatgattcaaattttattttaaaatagttatcactataaaatttttcccgtttcaccttcaatcacaattccactatcaagcataggagtacatcctattatttaataaagggtattatagttttcagtattaaacgttaatctatcgtaaacaatcttggataagtatcatgagtcgagggagtattttgaattgaatttcatagaaatgatagatgtatgcgttatattttacattttctaaggatttttttacgctatttatatatgttggaataacctactactctatctaaaaaactgatcctagctacaaattttgtattctcaaatgtctattagaattgggttttttataggatggataggggtaagaatgtgaggtttggatggacggacggatgtggctctgtcactgcatgtgtcattgatcaattttgtcgtcaggatttgcgaccgagccataactttttgaatcgccttttgagtctatccaacattgttggagaaattttatgggaattaagttccttgctccctggtacaaaattatagggcgtatcgtaaatctttaagagaaaaaaggtaatttcacaaaatatttggatcattatgtcacaaaattatagattaaaaaattatatcataatctaaagatttaaaatatcgtatcggaaaactacatatgtaacatcatttttattaaaaaaaactacatatgattttttaatctcaatagtgttatggatatcaactctaaaatctgcagttcattaataatctaatcactgaatctgtagttttatgatacaatacaataaatatgtagttttctgtaaatttagcactaaatctatagttttgtgatacacatatttaaatctatagttttacgatagttttgtttaactatatgtagttttatgaaatttacgacgttaagtgttttgataaaatagttcgagtcataagttatttttttctcatctatatcttaaattattgaaaatgattcagcttactcgctagtggtattttctctttagcgtttatgccatattttacactgaatttggtagaattgatatatgcattataacttactagctacttactactactagttatatggataaaatctcttataactaggtagtaatagtatgttgaaacttgaaagcacctaagactaatttgaacatcgatatttaaatttcaagaaaatagtcataaaaacatttttgaactttgatgatggtgttatctatggatatttgtttttctcattttaaaattgaaataatgaaaacagtttacctttgctcacttactgtatttatcctttgtgtttctttttataaaatgtttcctagcattacaatttactactatttacatttttttgtaaaaaactttcactattgacatatgttggaaacatctaggacaaatttaaatatcaatatttgaaatttcataaaatagtcatcaaaatattttggaactttgataatagcgttatctattatctaaaaattaaagcttaaaatgtgacttgtctaaagagaaaaatgttattaagtagagtaaaccatttttactagttcagggataaaataagtgtactaatagtttaggggattaaatgatcccggaagtaaaataaacttttttctatttttaaaaagcctttagcacaatacttcaaaattgattaccttaatgagctaaaacaaaatttccaaatatttagaaaccactggataaaccggccaagttaaaaaagatttgaattgatccttaaaaaattgtcaaaatttgtctgattttttttaaggttttcatcgataatcgatcaattataacaccacggttatcattgaaaccaccggggagtagtattcaccaatcggtcacattttgaaaccctgtttgtttgccacaggggagttatgtctgcatggcgcgtactctgaaccttgtgcttatgcaatggaattaattatcattagggtagctattgtgtttattgaagacacagcgaatcacagatgtgagctacggaatattagcaccccatattcctgtagatatatactgtaacagacaccattagggtaatttgtcgaatttgtgaccgacgtcaatgttatgcatatgtaatacggaggatgttcattatgaaattcccgtcttgttgaagaggataacaatggtacacccaacaccgaacttcttacgtgcggaaaaacgagaaagatgggttgggaactcaattgaacacagccgttagtgcccaattcttgcagatgagagctacaaaatggctaaggtctcccgttcttcagctctcctttggtattatgggccatcccttgtcaaaagctgcaatgctagcttcatcccggatgcatcctaaccctaacaaacaatgtaaacatgtgagatgtctgaaccaatgtagtttggtcgccatggagaggtgttgtaaatgagacacacagccttttatggtgcccttcacattgttgttattagaaaaggtttctcttctgacaatttaatacagtatatgagaacgtttctctaccttcattaatacaacgcgagcaacacttgatggttcccaaaaaaaaaagagatgctagacaccgaaaaaaattagagggatgtcatttgttctactgatcttgttactcgtgccaaatgactatagtttgtaactttgtataaaaggaatgaaagctgatttatatgttcattggatatggtcatgtttgaagcaagagatgatccacctgtctggaatgtggaaaaatctaaattgttatattttagtgttttctgatatattacatcgaccctctcatgggatatatatagaagtacataggagatagagacttggagtacaatacaagaaagaaagagtagatttatctctaggattctatctctagaactctattttatctctaggatatatcttatctctatatttgtattttactcttatctctaactaacatattcatacttctaacatgcaagatggaggctatcttttgctcagttcaaggaagcgaacataagtagcttgggctaaattcctcatgcttctcaatcctataaactgcaccatttattacgccactgtaatttgcatgagacctattgcagttggtagctaactgtacaaatctttacgagcgtttggcctgaacattcatggacatatatagggggggggggggagggggggtcataaaaaatgaggtggccctctgtatgacgattacagtggccatgtgtccatactggcttcgaattgctatttgattctaactgtcaatttttcggctttcttattgaatgctcccatatgtcatttttagatatcttcgaatggaagttaattctggatttattcattctcacccagagtaagtttaataacgtagactataaatgcacgctaaattatctgaagataactctgtagatagatagagtatatatgcaataagcaactcctaacacaagatacgtaatttgctagcatgctatccttcagagctatgcggtcgtgacatgaaacctgtatggtgcattttgacacgtatgtatatagtccagaatttatcggcaggcaagttattatgttgttgaagactcttgaggtacaaaacaatcagaactatgtggttcttggtcatgcactttagtgtactttcggccttgacagtttctgtcgttttttcttgtaaactttatttcttctggatatattcggaggtcctccttcagccttcccggcgaatatagtgttgcaaccattagtgcaattggctgaatcggtgtgatcgacatgaggtcgtcagtgatacatggtttgtaacaatagggaaatcctttacttttttgtctggtcaagatatttttggtacatactataactttaacataagaatgctgtgtaaaccacaaaacttctcactagtggagcgtttaaaaccgagcaacatcataagagaaatgcagtggccaaagactaggaaatactgacattaaacatgctggactcaagagatcattcgagcatcagtcctaaggccagccctaacccaagacactagatatttgtctttttatagtagtgagtcagcaccagtttccaaggtccaacgacgacagcagcactcactatagtgataacgggattttctctcatagtgacggctcctgatccatatttggagaccactcgataaaccagccaagttaaaaaaatcaaactaattaagatttaaactcttgacaaaatttatctaaatttcatcgattttcatcgataacctctcagtcatcattattatcgatgaatacactagggagggttattcgtctactgatcacattgtgaaacctcttgtttgtttgaccgggcaagaatttgtctagtgagctagctgtaaggtggtgacatatgtttgcatgcatggtttgtattgtgaagtatatgcaagtgcaatgaagttaaattagctgtagccggccggtaggctaggtatatattgtgcttattaaggacacattaatgaagcccagatttgaactaagaaatggtgttagcacgacaaattcctatacatactgtcagaaaataccattaggggtagtttgtagattttgtggtggatggtagcgttatgcatctaatatatgtgtgcactaagaaattccgttctcttgttgtgataacaatgttatgtcgaactccagatttcttaccactagttgagtggtgaagaaggacaagagcaaaagtagccgcagactggatcgagtaaacttgatgtgtgcatttgtgcaagagacgaaaagcagtggattccagggtatttccttgcacaccagagatccaaaatggctatccctctcatttttagctctcttttggtattaccgatcatcccttgtaaaaagctctcttcatccggatgtctcctaacccaaaacatgtaaaatgagatatatatatctgcacatatatactccagttttttattgattactgcaccaactagattgatcgccaattcaacatgcatgtagtgtttttttttcttaaagagtcttagagaggtgttggaaaggaggtacatgcgtgcacaatcttcagtcttttatatgtgtcattctagttgttgttaccactactccatctcttctcaatcttaaataaatgaaagctatttatctataacttccattaatacaatggcaacaatgttagctagctaaacctttcataagaaaaatgaaaaaaagaggtagataatagtgtctttgatttgtataaaatacataaatgggctcagtcccaaatgaggcagccaagaagaaaccaaattaaaggagagagaccaactagccaccacgcttacgcccaaatccaatacaaacggtcggatctctttttcttccttcctctagaaacttcctctgcccttgcatatgccattacactagcttgcttgtctagaccactcagtcactcagactatgtttccgttcaaaggcacccactgcagaaggcctcgactcttttgcatatatgcaggcaagacactagtagaggctgaggtggagtttcatgtaattcaatattatgcctcaactattcagctgtttgggaggattgaaggtgtttttttttctaatttcaatgagcagaaggtttagttggatctatgttcttgatacctctcaatcctataaactgagccatggataacataatgcctttttcgagggacctatcttgcagttgatagctgactatgcaaatgcttacaagagtttggcatgaaaatgatggacatatagaggttgggtgctatctgccatagcaacagtggtggcactcaaactatatatggagagttctctagggagccaatattaatataccacttaaagtggccatgtgttaatgctggctttgaattgccatttgattctcattaatttgtcaacttttttattgaatgcccgggattttgtcgacaatcttcatgcagatattaatttccacttatagtttttaggatcgtaggagaatgaacgactttgatccataggatttttttcctatagaggtcccttaccaaaggattcgaacttgttaaattctacaggaatgcatttctatgcctcaatctcatagcattttaaacatgtgctctaacctaattgtttttctttcctttaagaagtccgatacaaattctctctctaatataagtagcatataatataattttttttttattttttctatgagccaaccaaatatatattctgacttttgagtaatttatgcggttttgtttcatgtagtatttaacatgtgatatttcaatcatgcgctttttctatacctacatttttacattcttgcttcctcaacgactccttattcattctcactaagggcatgtttggaagtccagtttccacccaaaactagtttaaagttccggcccgaattattgtactggggaggggatacaaaatggctttgctctgatgggagtgtaatacactaaattttagaccgcttcaatccattacactcaggtaactaagatcgcctcagcaagtcagcaggccacatttttttattataaatgtcgagtcctctctcattggctcctccgtgctgttctccgatttgctcagccatgtgttccacggcgaccctcctctataccctcaccttactccaagccaattcaatccatgctattggcctcatcctagactctctagtgccctagattctcactagcttgcttagtaccacctgtgtcgtgtagtcctagtcctagatctgcattgccaatgtcattgtagcctcacttctcatcaccagcatcatcccatcctcgatccacatgtacaatatcatctcgacatctcttcaaagataggagtcccttcgatttgtgatattgcataattgggccttaggctcaaatgggcagacaagaagaaaccaaaaagagagacccaccacacctaaatccaatccaattatgcggatctcttctcctttttcccaagaatcctccattgcttcctgcgctgcgatgctggcttgcttgccaagccatggcatcgccacagttccattcacgtcagccagccgtgaatggaactgaatcgccacagttccattcaagtgcataaaattgatgcaaattggtcactgaatcggcatacgaagagaatgagatttaatttacaatgttgagatagaaatgcacctaaatgttcatttgaacatatacaattcaatcaggaaagcaaccccaattcattgcacatggtattctagcgtaccgagttggtcgatttactggattgctgtgaagatatgataggtgtaaaaatcaggattagcctcttgacaatatgattaataaccgagtaagttgaaaactttataaaacataaatggtatctcacctttagcagacttgaacctttaagcaaagctagtagaactgcaactcaatcctagcaagtagcaacatgactgccttcctctcatcctctggataaggctagcctacatgaaggccatatttatagcatctctaaccctgtattccaagaaatctatatatattttgaaaccgaattcatactgaaatttgtggtttgagctcgttaggtgtacaccaaatttgagaaacgtggtgtactttgcccagcatccattgggtaagacctttgttttttatttcaatcaacagagctactggttaaatattttcaaattattgaaactttgcaaattcaatcatgatggatactgaatactttctgacgtaaacatgcccttgctgaaaaaaaacaatggctcctacgttcacgtgcacgtaaaccctccacggcttaacgtacgtctcgcgtgcaacgacattatgagcagtgagcatagaatgggtgtggtttcctgacgtaggcgtaattggtggtgcgtaacccattcaccagtccatcctgcgctcacgtacgcgtaaaccgtgcacggcctacgcgtactgggtggatcgagattcaggtggtgtctacatggttcacgcctacccgtggaacgcgggcgtaaaccattccatcctacgctcgaaagctttaaaaaaagggtgcacatcgagcctacacatatctttggggagggagagtattatgtttacgtctgaaataccatatttactctccaaatgtaaggtgtacctagatcgatatatgttcaccatgcagggaagggggagtgatggattgtgctgggctcctggcgtgctgcgtctacacagtgacacaaatacgatgataccatcgtcttattgctcctccccgtcgtcttccctaccacttcttaggggacctgtgtattcatgtgaattatagttaggcctatttagggaagctttcagtagctacagcttcttctagaatgtcatgcaccaaacaatccaaattctcgcatatattctctggcatagtttctccaaagaatctcaagccccctccaatagagccttagccttagaaacttttcacaaatgtgtacactactgtactacatgaattaaactgtttttttttggttgaaatgctccgaaagattaatgcatgcaggatgcctgaaaagttttgaggctccaaatgccagtttggtactctgaactctgcagggtagccttcccgtgtagcctgtaggcaatggtagcaactagcaaggcaccagctttccaaagaggctggaatgcaaatgcaatgggacaaacaatacacgacgtacttaagtatacattactagtatggcatacagcagagagaaagctcgccatctttctacttggcacaatcttattgtactttcccgttttcactttcaccgagtaaattatcatggctaggaggaacacagccttttcatcattaaaagaggcaggaggagcagatcagctctacaactccactccagactcaactcctagaactaaatttagaagttagaactgtaccaaacagacccttagatcttagatctgtaaagtaacgcaactgtgtggatagcctgaattgctcagtagggagtattagtagtagtatttgcagtgaaaaccatacgtgtttacggtgaaaacagcagtgacgggccggcattgaagacgataggtcaggaggcagcggcggatggggcggcgtttgttttcttcttgcattgacgcccattgcctgaaaattccaactccatgttcctgaattcagagacaatttgcacctttcctgcttcatgctcttgacttttggtagtggtacagtttttgattatctggtgaaccttctatttcaattgcatcgtttgtttttatagatcacataagaacataacaggaagatgaatacacataaagttaactgattcttcagaaatatgctgtctctcaatgctccaacgctaccaaatggacaggtgattattatcactgaaaacacattaagtcataagccacaacattttctgatactgcaagtttatcattcttgaacatcatcatgattgatgagtggcacatgaagctcacatcacacacgattataaaccatagacaagcgttggtatcttttcagtggtgtacacacaggatatcttactgtggggtagaatgatctttcatgttggcttctcgtagctgttttggtctctgaactctgatatcttacctctgatcatctccgccacatgaggctgcacaaacatgtgtgtagggtcaagcatgtgcaggatgaacttgtccgaagcgggcattgaagcattcagattaacaatgaactgtgccatcggtacatcgctggaaaaaaaaaggatttatgagttgattgtgcaaactacatagaggtgaagaaaaacgagctaaattttatcgattgtaaaaggaccttaccaggagatgaacaacccctttattgcattaaccatgtttctgctctttggagaacagaatgccacctgatcatttaatcagcaaaccacacagccatgtcagtggagaatcagaagtactggaaaccttccccaacaatcagactctaaaacagtgatgcagtgatcttttaaagcacggtaaaagattgcaagtgaggagataatggagatagaaaccttactgccttctaacaaggataattatgagatgagatcatataatgaatgacaagcatccaacctaaataagttatgcttaaattgcttactgctaccacacaggtacataatacaaaggtgtgagctatgcttgaagaggcaataagtttaaatcatactccactaccgaaagttggtaactaacaaaaatatgcaaaacattgtagtggccagtgattgtgctcccgtgtccaggggcggatccaacttgggaactttttggggaacaaacaaactgatctagaagagaagctagggttaacgaacgaacgcaagcaaattctagtcccgatgggaatgggggagagagagatgaatcagaaagaaagaggatgtggatgctcaccatgatcctctcccctgctctgctcgcccgatggagatcgccggccacgactcgtcccggcggcgcaaggagcggaggagaatgctcacaagtgtcaagacttgcagtagtatgttgagcttgctgtactacaatagttagattggcagttgaacattagtgaagtagtaaggaacatgattgaactgaagagcaaaagagcgaactcttctgaatacaaatatttcacttgaatcaaattattcgtataatgtcatgtgggttttgtacaagaaaccataccggtacagtaggctgtgacggctgccgcgcgacgtggtgctagctggacgggcggggcggcgaggcgatgcggcgcgcgccgccgtcggagaagccccggtgccgggcgacgcggtgctgggccggaccggcggcggggcgatgcggcttgagcacgggcggcgcgcgacggcggcgtcggcccggcggcgcaaatcgcctgcagggcttcggtctcgcgagaaggggaacgggaaagaaacggaataattaattatttgccactcttacatatggtgataaataatttgccactggatccacatgtcatagacacatgagggcccatatatcataaacagcaagtggcaaataattaattgacacatcttaaaagtggcccaaagttaaatgtcccgaaagaaacagccaatcgtttttttccgtaatggcataggcggtaattttttcccctcaaaagccagtaaaaacaggggtatggactgtttttggatttgtactaagagcaaggttaataatacagttgacctgttggctataaggtttcttatagtattttctcagcctacccatataataactagctctttacaattaatatagggtccacttgtctctcacagaatttcttgaatttcttggttcttttgtctaagccggctataagtttatagcccgcttcttctctctcctcacttttctcctccacctcagcatttagccagcttatagcctaatattatacttgctctaagcagctttagagtaaaagcacttgtggcttttggactatttggttggtttttgatttttgtaaaagcaaaaacacgttgaaaagcccacccaagcccaccctaaaacaaatattttggtgcatgcatcgtagtaaaattataaattgtaggagtttgaaaaattatagatttctaatgacctaaaattacacaatgtacattgtttaattgttgacagccaagcttattacccccatcgatgccctcaagcagctggttgaacctgtgagaatccgatcggcttatcctcttactcttctccctcagcttatcatccaaacctaaaagcgtggatctcctattacctgcattttgaaccttattattcatacttttatatatgtccaagttgtgcaactttctatttacagatttacacaattccaaatagagacaaaaactatatttatatggactattttagatgctgacgataggattagttttcatacgctgtatggacttgttgctttgttccacaggtttcaaaataaaacgataaccgagccggtccatatataaaaactgttcgataaaccggctaagttcaacaaaatttcagactaaacttcaagttctgatcacatttccaaattctgtttgcaattgggcaagattttgccttgagaacttttgtggtgacataaatgtgcatcatgtttaattagctgtaggctagctagctatgtgcttaataagtacacaatgaagcacacagtgaactacgaaatgatttgaacgacatatatattcatgtacatacggcacaaaataccattgggccccatttgtgtgtgttttggttgtgtgcattctacttatgtagaaatcggagtgtgctcagtgcctttttattatgttgatgtaatttactgggttcaataaaacctttcattcctaatagagttaaaacacatggcaaacaaccaactatgtagtcgatgaagataaagtgtttttgacagaaactgtagtttatacggcaagcatgtttagaatttagaccgattttggcactgtaactccacttaaccatgcatgtttgatataaatttgattacacttttgagagggttgattgcgcccagtacttctctattttcatcctctgcttccaatagaggctaaaatctacctgttgtgaagaacagaggaagatttgaatttcatgaagctaacatatatccaggggaggagctacagtacaaccaccggagtcaggtgaccctctgacaatgttctacaaacttgtgtattaggtcaatgcttatgacaactaattccaaatgtcacaagcgaatgattaactattgacaccggcggcttgatttcttggctgcagccatcaagatacctgttgaggctaatatcctggctgatacctctcaatcctataaactgcaccatgaataaagtttcatggatttaaattgctatctttgcatgagaccaactggagtggataactcatcgtgcaaatgaattaaagagtttggctagaacacatcatgggggtatatatatatatatatatatatatatatatatatatatatatatatatatatatatatgggtcgggtgctatctaccacaataacaaaggtggcattcaggtacaaagagttcaataagtgaataacaagccaaaattagcataccattacagtgtggtcagtgctggatttaaattgctttgattctcctattcttttgttagcttttttttattgaatagccatgtggtacgggatttaattcccacttatgtattttcatttacagcaagttcaattagcaccaaaggttaaaagtatgtgccaagtcatctgaagataacttcgtagatagatagagtatataataaggttgcgttcgtttgtgccggtttggaacctttccttctggcatggaaaacagaacaactcattagcacataattaataaagtattagctaaaactaacttgaaaagttgattaatatgatttttcgaagaaactttcctataaaattatttttgaaaaaaaacccgtttagtaatataaaaagcatgcacgcaaaaaacaagagggggttgagaacacagacaaatgaacgcagccaatagttcataaaaaacaagatacaaagtttattaatatatttgacagctaattttatctcctcttatgccccttcttactttgcaacattcttcataaagaactcgctgcccgcactttgctagggtaccagagcaagcttgccaatcaccactgcaagaacgaatggcccgtacactactacccttgagattgtgagaatgtcatgaaatctgcgtgctgctttttgacacaatgtatattgtaacatggagtttacatatgttgtaaaattgtttgttgtgtttattgaacacacatgaactacgaaatgatcaacaccacacattcctgtaaacattctacattagtgtcgaaataccaccggtgtaatttgccaaattggtgaaattgacttcagatcatcagctatgtgtggcaacactaggaaattcccctattttcttgttccagtcaatatattctggtgcctgtaactatgtgtgaacattatcgtcccaaccacataacttcttctcactagctagagagtgatgaaataatctgagatagatcgcctgatcaaagcaacgaccaacaacttgaggaaaataatactcaaattaaacatgttcgcatcagatatctgaagtatcttgtgggcttgcttctcatacgaagcacatatgcatcagtcacatccttcaagcaatccatgccatagcagtttgaactccatagagtagctccatgaaggggcgagtcatcaagatcagagctacacaacccggtacattgccttcttcagctcttcatctgcattcccaccatcccttgtgacaatatgcaacactagcaccattctggatgtctcctaaccctagatttttcttgttaatcaacgcttaccatcattctcgcaatcggttgcacactcttataatagtatggttgtgtatacttcagggtgtggtcttgcttcaagaaaacaagaaatctccatggagagttgttgtaaataatatacacagacactcttctcggccttttgtgtgccctctagctaggttaattattatcaccagaaggcatctctatgtaccttcattagtacaatgcttgtaattttttatctttaaaaaaaaactgctagacacttgatataccaattttcccccctctttaaggagatcgattgctattgcagatgatttatcactattatgtgcacactattcacacgcccattttagaaggtagaatacacatttctgttagctggcacccatttgtctgctttggatagcgcaaggatgtaaaatggttggtatcagagttttttttttttttgcggggttgttggtatcagagttgaaggggtaaatcggattttcacaatagtggaacctaaatctgatatatgccaccttgaaaactaatcaaactatttgttttgtttattgaaggcacatgagctacaagcctacaacatgatcagcaccatacgttcttgtaaacacaatgtcataatacattaatacttctagtgtaatttaccaaattggtgtgatcgacgtcaggttgtcgattatgcatggtgtgcaacactatgaaattcccatgtttcctagcgatagaatcgatttcgactgaattataagcaactagggattaaataaggattaccattgcagcgtgtgctcatctatgttgtgataaatcgatgagcttgggaatggtaatccttatttagtggcggcaagcacagccggcgggctgtggcaacacgttgatcggcagcgatcaatctgtcgacggctacggaagataggtctacgcggccaggcctcatgaagtcgtgatctctacctcttatctcttcctttttagttttttttataatggggaatcataaagaggccttaattgaaatccaataacctaaattcatcccatcatcatggatttgtcgaaaatcctatggtagaaagtataatctatttaatttgtcaatgtgatgaactctacctatgcacgatccccgaccatatatcggagcaatggtaaagagtcgattttttagcccctcttttgattattttttcgaaaactatgaataaagcctgggatattacaggaggctagctatcaattgaagaaggtgaggaattagctgtattgtgtataggatatcgtgctttagacattactattgcagaggattcctcttgtgcatttttttgttcatatctgagccacacatccaagaaagaatggttgcgaaagttacaactcccaacagttgcttcttcttcttcccaatttcttcctagttcacaacctgaaacaagtgaaagcaaggaataaattgtgagttattttccaccaaaaaggtgcctacaaacccaagccgctagaatttagatagactggtccaagatgtaggtggtgaacctgaaaactgagccgtagcaaatccaggaagttcagatattgcaaagcagaggaaacagagtagagtttcagtggaaaggctgagagttgtggggcaaatttctcctccattattttctggaattcagaagtgcgtataaagcaaggtagaagaaagagtaaaagtttcagtgcaaagcctagctatttaaacaacaccaagtcagggtctcgtgccatcccaaaggactgtggtactgcagaaaagtgcatcacaactatgagcgtggaggttcatccctatgttatcgtctttagctcttccagtacattcctatcatccattgatagaagatgcaacgctagcatcattgctgatgactcctaatcctagatttgccttgttataacacttgttttatcattctcatggttagtcgcatatgtaagatcaaagtgtgttttgattcttattctgtgatgaacaattggcatctgtgattattggttttgatatttggagattatcgtcgaagtggttttggagataatcaattttcaggtgatgatcggattcactgttattttatgtgaccggtccgaccgggtggtgtatgccggtcagatcggtggtgatcgagcggtcagaccggccggcccacggtctgaccggccgacgctgtgtcggtttcggtttcgggttgtttctttggatatccgtgattgtttcatggttatggcttctagatggataccatacgtatataatactgttgtttgctaacaatgagtcaagttggtgatagcttggtctcagaatatggtttctttgtttgtttcatgtgtagctgactcgatgcctcgagagagtatttgcggtgatggaccgggagtcggcttggtggtaagacgatgtccgtggtggtcagatatcatgcgggatactaaggctagagttgatgcacgtggttggtgaagattccatatggcatacgatggaggtattgtgtgcgtatgggatgcggagtcgaatttggaaggagtccaaatttggtacaattggttatgtaaagtttgtgtcttgtactagagggtttcttaaggtgtttaggactcttagtatgagtttggttcgtggctttaggctgcctacctcatgtataaatagagggggagcgtgaggcttcccggtatcgtttttgtatcgcttttgagagcaactgagttgctagtttcgttagggtttcgagtttagtcgagatttttgtaaggagtgctgttggtgcactttgtaaacacagagagaagtaataaagttgttgtctactttgagagttcttcgatttgtgtttcatcgggtttcgacggtctaaccggcgacataccggcggtcagaccggcggcaggtggcggtcagaccgacggaggagaggcgatcagaccagcggcgacttcacacgcggcaggcaatcttcaggcggttggaccggcggatcaacaccggtcagatcggtggcacaagctcggtcagaccggcggatcaacctcggtcagaccgatctacatcgaatttgagggtaacttttatttccgctaaaagtttgggtttttgggtatatcaaccattcaccccccctctggttggcttagttcttgtgattcgatcctacaagtggtatcagagctttgtttgcttctttggattttaaccgatctagagtttttgccatggctgcttctaataagttttcaactaagcctcatgttttttatggaacggatttttctcattggtgtagtaggatgcaatcttacattatggctgagaattatgatatttggagaaaagtttctcttccttatgtgattcccgaagttattaatactgctgctgaaaaaattgcttttgaactgaattgcaaagctcgcaatattcttttgagtgggatttctcgttcggattatgatcgtgttgcttatcttcaaactgctcatgagatttgggttgctttgaataattttcatcaaggtacaaataacattaaagaacttcgtcgtgatcttttcaaaaaagagtacattaaatttgagatgaaacctggagaagctttggatgactatctttctaggtttaataaaattttgagtgatcttaaatctgttgattcttcttatgatgctaattatccacaatctgagatttctcgtcactttttgaatggtcttgacatgtctatttgggagatgaaaattacatctatttaggagtctgtgaacatgtctactttgactttggattcgctttacacaaaactgaaaactcatgagatgaatattctttctcgtaaaggtgattctaagtctagtgctttggtttcgtcttcaatttctttggatgttggtgcttcctcatcgaagtcttctgttcttgctttatttaatgccatgtccgatgatcaactcgaacagttcgagggggaggacttggttttgctatctaacaaattttctcgagctatgaaaaatgttaggaacaggaaaagaggagaaccgaatcgttgttttgagtgtggtgcacttgatcatcttcgctcgcattgtcctaagcttgggagaggcagccaaggatgatgatggtagagtcaaagatgatgacgtgaacaagaagaagaacatgaaagagaaggagaagaagaagcattgtatgaagtggttaatccaagaactcataaaagtttttgatgaatcggaagatgaagatgagagcaaaggtaagcaagttgttgatctagcttttattgctcgtaatgcaagttctgatgttgatgaatttgatgatgataatgaagaaaagcttagttatgatcaattaaatatgctgcttacaaatttgctaagaaacttcaaacatgttctattgtgcttgatgagaaggatcatacgattgagattcttaatgctgaaattgctaaattaaaatctttgattccgaatgatgataattgtcaatcttgtgaagttttattttctgaaattaatgctttacgagatgtcaattctgttaattgcaaaaaattggaatttgagattgaaaaatctaaaaagttagagtcttcttttgctcttggatttgctttccatactcgtgttgttgatgagttgattttgacaaagaacgttttgaaaaaaatacaaagttgctttttgtgcaagttctttggtcaatgcttcatgtgcaaataaggcaaaacaaaacaatggtgttttgatttctcaagattgttcaaagtgtgttttgaatgagttgaagttgaaagatgctttagagcgtgttaaacacatggaagaaattgttaaacaagatgaggtgttttcttgctcaacttgtagaaaacaaaaaggtcttttggatgcttgcaaaaattgtgctattcttactcaggagatttcttatttgaaaagttctttgcaaagattttctgatggtaaaaagaacctcaacatgattcttgatcaatctaaagttagcacacacaattatggtttaggttttgattcttatgctcatcatactagatatcctcctactgttttgggtgttgctaggagaggtgaaattttgattgaaattgagcctaagaacactgtgtttaaatatgctggcatcatgtcttctttgaatgcatcttcttcgaaatcaaatgttgtgaatgcaaaaccttctgttgttgcaaaaccatcaatttaaaaaccatctacctcacaaacttgtcgtgagaagtacacttgttctttttgtggaaaagatggacatttggttggttttgttttagacttgcccataaacagaaaaaggaaagagaaattgcttttgcaaaacgacgttggcaaaaattgggttttaattcgaggaccacaattagaccgacactgaccagtcggtcagaccggctagcggtcaaactgcagatgaaccagtggtcagaccggttgccaggcccggtcagaccgtaggtacaatggcggtgagaccagcctcggggcaattttgtgcgaaattcaactcggacttttgtgaagcaaaaaaggtaagttttctggtaagtctgattctgattttgtaagtgcgtatgtacctattggttctacaggtcgtgtaactcagtgttggattccaaaatttcttatttctaaccccaacacggaggcctcgacatcttctcgttcgtaggtattttggcggcatactccccatgagtgttcaattttgagatgacgattgcttcacaaggtaacatcaatttaattttggattgacatatttttggttctactttcttaattattagcttttcatatgctagtgtttgaggtagtagtttttgttaatacaagtgtatacatgtcaattcatgagaatcttggtgatatcattggcaattggatgtctttttcaaaatatttgatttcttcttgatttttgttcggggagaatggaggttattttgagggggagttagtgctttttatgactttcttttggcatgatttgagggggagtttgtacctcatggttttatcaagcaaaaatatgacaatgaaaaaaattgataaaagagagctttgtttatacatatggtattttcttgtgcatgctagtaatactttaaaggtttatttgtctgtagcatagcttgtatgtattctagtctcttcatgagatttagattttgcttttaagggagatgatgcatgacacttaaattctatacttgaattaagcaaatatgcaatgttgatgctagcatatggtttgatttataaatgctttatatatatgctttattgacttgttattcctcaaatagctttaattgatcattgtgaaaaagagaataaaaatatcaaaaaaaatgaataccgaatccttggaaacagtcttgacgacaaggacgttttcgatgtgagcaaaataatgggtgccgaatccctggaaacagtcttgacgacagggacgtacccggaataaaaagagaaaaatatgagcaaaaaggctcaagaaaaagaaaaagttaaaaattctcttggttgttttgtgctaaaggttatttgagaaagagtgataaatgcaataggtatatgtgtttagtgtttattcttcaacctatgtgcttgtaaaattgttgcattataaatcgtatgaaatcatgaattttgattgttgattcaagcttaattgtaaaatctttggtttatggttatactttaatgcatgcttgttctattatagatgggttcatcttctttttgttgcaacacaagacttgatatgctatgtgtatgctaagctcttgaacattaatgaacataattcctatgcttgatgaaatcattgtcaaaagggggagaagtaatgtgaaaatttttggatttttggagaagcaaggtgaagcaaggtgaattttgagagttgttgagaagagcatgtttttggttcaattgggggaatttctttcttttggatttttgagcacgatgtgtacaattgagaatttctttcttttaaaaagggggagaagttttcttttggatttttgagcacgatgtgtacatttgtacgaagtgtgttttttaccacttttgtttttatttttccaaacatcaaaacattccttttgatgaggtttgccaatgtgttcatcaagagggaaattgtcagatcaaaagtgtgtttcgattcttattctgtgatgaacaattggcatctgtgattattggttttgatatttggagattatcatcgaagtggttttggagataatcaattttcaggtgatgatcggattcactgttattttatgtgaccggtccgaccgggtggtgtatgccggtcagaccggtggtgatcgagcggtcagaccggccgacgctgtgtcggtttcggtttcgggttgtttctttggatatccgtgattgtttcatggttatggcttctagatggatgccatacgtatgtaatactgttgtttgctaacaatgagtcaagttggtgatagcttgatctcgaaatatggtttctttgtttgtttcatgtgtaggtgactcgatgcctcgggagagtatttgcgatgatggaccgggagtcggcttggtggtaagacgatgtccgtggtggtcagatatcatgcgggatactaaggctagagttgatgcacgtggttggtgaagattccatatggcatacgatggaggtattgtgtgcgtatgggatacggagtcgaatttggaaggagtccaaatttggtacaattggttatgtaaagtttgtgtcttgtactagagggtttcctaaggtgtttaggactcttagtatgagtttggttcgtggctttaggctgcctacctcatgtataaatagagggggagcgtgaggctttccggtatcgtttttgtatcgcttttgagagcaattgagttgctagtttagttagggttttgagtttagtcgagatttttgtaaggagtgttgttagtgcactttgtaaatacagagagaaataataaagttgttatctactgtcacgcccagaaattctcgaatagaatttcaagcagaatgtgcattaaatccccgtccaggaccggccggggtacacaaacgacaatgttgacattcagatccacgtcttacaaacatcataaaagtcttacataaatgcagcggaaaacaaaagataactggagctaatccttgacttgaactgcagcgggaacaccactccacaggcatcctcgacggcacggacgaagcctactcctcggagaacccgccatcggacacaaactcgagctctgggattggggggaaaatagagcaaggctgagtactacccactgtactcagcaagtcataccagaatgggggtatgatgcacggattcaacaagggatagctaagcaggttcatttgcataaatactgg

SEQ ID NO: 4875 - DNA, 26304 bp, Oryza sativa
cgtggcaatggtcttacagatggtacagtagctcatcacaaacccgtcggtgactttccccacgaccctctctcttcttagctctcgtctcggaatgacgtagtaacatgttgttcatcatgtagtaacacaatgttttacttacagtaacaaaattaaaatttactcataatatacttatgatggatctacttttggtaagtactttttttttgaacatcatggtgcaaacggtttttaaaaatagtacatggtgtgagagatattacccttcaaagatttgtttttaagatttaactctccacaagtagtaatactaaattaaaagttttactactgcctgttttgcgttactgcaatcacatcatgtcattactacaagatgtagtaacgattataattttcacgtaatatagtgtcttactgcaattacttgataacgttactgcaagactataagttttgcagtaataaagcgtctaactacatattttgagtagtgttactgcataaacacgtggtaacgtgtaattgtcgtgcagtaacactgttacttttgtgcaaactttttgtgcagtaacaagtgtatgattagcatctgagacttttaacccatatatttttgtttcaattgctgaattactgcaattcaccacaatattacggtcaaaagtgcaataacgtcatatacatgcagtaacgctatattggagggaggaaaccaattttcttgagaagagggaggaatgtaacatacccgaattctaggattaaggaatttccatcaagactagctgaaagggaagttcttcaattttgtaaaccaaaaatttccattttaaacaaaggtgaagttgatccaactcttgcataaataaaatttgagaacaaattaaaactttttcatctttaacataggacttggatgcaacccaagtgaaagcatgcatactctcatagacatgtttgacttgagtccttcatatgcatttggatttggattgcatttggattttcgatttgcatttcataataggtttcatgaatattaactaagatctagataaacaactaaaccattagggcctagtgctagctagaggaagttaaaatagaaaccatacaccttaaaatatatcaacaaggccaatgtcaagccccacaaaactattttggtcatccatctgaagactagtcatgaacatggaagtgaccaaatagattatatcatatagggtatattctatcttaatcatctctataagcattctcttaatttaatactaaagtaaacttatgcataataggtaaggagcttatgacctgtgtaatgtaaattgtaattctaacatatcaacatcacctaggttaatgagagtccaaatataacttttataaacatttacatgcatttaggaaagggaagcatatataagacataagtcttgcgaattatctaaaataattcgtgcaagataaaatcatgggaaaattcatgtaggctctaatcaacacatgcaactcactgtaattttggtatgatttaataactaaatttggtacctcaaataaatcagtcaaactaataaaaactagattaactgtagttcttaatcggctaaaaccatactttgtctaaaagtgcattttactgcataaaagtgtataagtaaaataatttattcaaatactaggtcatttataatgaataaaaataatttttccagaatttatcttctctgtttaggtctcctaaaaattcgaactagtttccaaagaacccatattcctctaatttctgtgagtaatctatccataatttttgagtgcaaccaaagaaaatggaaactaggtacatacacctacctccagtaaaatcaacactagttaatcttatcaacacattaagtattgaagctacaaatttagaggacaaaataattccggaaattcgtccaaaaaccaagctcacccatgtttctgcctacacatctctcttccacctagtttacttcgacctgggcccccttgtcagtccctccggcttgctcttcctctgtgcaacttctctagccgaccgataaacactgagagggagagatcgagggccgaccggctctggacgccgcgcgacgcgtggccacgacgtgtcgacgccctaaaaacgccgagctccatctctgcctctcccagacgcgtcgccactcttcacccaccatcccagtgccgatccaaccgagggaggaagctccagctctccctctccacctctctttcgtcgccggccgccaagaagagggacatcgccaaccgtcgtcgagccctcttcatctctaactcatactcgttccattctcatatcaccatgccgaacaactttggttttgatcccattccatttcatcttctacagcagcgggaacgccgccatgtcatggtcgctctagggcgcgctctgtgcaccgccgcagcgacatcatcgcagttcccgcttatctggaccatgccgggccaagctgtcgcgccagcgtcttcgccttgacctcctctccatttccccttaagaatcttgaaggatggtgctatgagtgtggagatcgtccaccgtcttcttcacctccggtcgccgtcgccattgtcgattccgcatcgtccggtgagccattgtccgattcttcgcgtatacaccatccctggggcctcactaacctcatggacacacatgcatgatagttcttggagctgattgagccatcgccgttcacccggaggttcttgccgccgtcatcagcctagctaccccagccatgtctagcatctcggtgagcacccttcagcctatagaacatacatgcacgcacccaattaaccaatacatgattgtagaagcacatgcatcaccacccgaaaacatcctcctttcgaactcgccgccggcgttactccgatgtccactgaccaagaaaagtacaggaatggaatcgcaatagcatgatcttcattttgtcttttggtcgcaccctcaaacgagccatcgtttgtcgccggtgagctcgagatcgagctcagccatggctgttctgcctctctgcgtgagaaaagaagtcagggaccttgtttcgagaatttaaacaactatggaggttatcgaaaatgtttgcaaatcctgcatgtcgattgtacattaacaaattaaaattgtgttaaacttgttagacaaactcctattatttgcattatcaccttaaccccacatatatccatatccctcattcctaaccttaggaacaatatgactacaccactttatatatgaattttggagtcactaggttactataatgcttagccatgcttagaatggtcttccttgtcattatgggctcattacaaatataaaaaattgatttagaaataatctggacagaactttaatacttgtgattttgataaataaaatgatggaaaacatggattttaggtttgggcctcaagtggtgcacatatggtgattagttgtgtaccgatagggggagagtgtgcccaaaccgacctaaggacttcactcaatgtcagttcatttcgtatacagtgcaaccaaatgtgctagtatgggatagcccaagcttagtaaattatttatggtttagccttacattctggtaggccggtgtgtatgagttcggataactcagaggaacttcctatttaccccgacatggtagtttaggtgactaagtctgtccaatacaacggtattgtgccacgtgggtgggttcccgttgtgtccgccaccacggcgttaagtttaaggcgtgggcccgccacttaacggttctaggtcatataacgtgtatggcttaggatggagtaacacgtatcgtgctggtgtaaggctaaatcatgaattttggaaaagctttgttgcgggtaataaatcgggtacttatgtatcgcgtgccatgctcttgcatgattattatttcgcatcatgtgggtaaagtgtacaaactctgcagagttaaaactaatcgattagctgtgctcgcggtcatgagcggcgtgtggatatatattgagtatagacttgtgttaattcttctaaatgctgaaatttaccttcaaattgtgatgagatttgagaatgatctccttgctgccatggaaggcaatgaggtgcatatttatacatgattaatgcctactttgatgcccaatatgtcaagtactagcttgctgaaatttatttgaaagtaaacctgatttagaaatgttttatgcaaataaaacttgctttatgctaaaaagaaccatattatgccttccttgattatatgccttgcaagtagggtgttaggcttgtcttggtgcttgccagtacattatttctaataatgtactgactcttgctattgaattaaccttttgcttgcaggttttagatttagtctttgagtgatgcgggtaatcgactgcttcttctaggacttgaacttaatggggtaaacccctagtcggtgtgcttgtggattgggtagacaagcttccgctgttctatatatttatttggccggtcggccaatgtaactaaagtagatgtagtttataatcgctttcatcttatttgtgtttgctatgtataatcatgcttgagatgaaagtgtgaatctagtgcacatcctgggaactagattcacatgagtatgagttgagaatatttgagatgttgtagatctttagctatttttgtcaagtctcctgaatgtgtaacacatctggtcgccgcctacgagtggtttgacgggcacatctcaggttgaagttgactggcaagctaaaggcctagcaatgtctccaatattcttctctcgaggcgtcggatgtttcattatgtttgtttgatgacttgaattattcacttcatccctcaaatataatgaaagttccggaaagcctacgacaaggaaaaacggttcttgaggaggggagtacgtagatgcattttgaagtttaatcctccacatgcagtaacacgataacatcatggtggaaacggttttaaaaaataatacatatcttatgactattgcttttcaaagattgacattttgaactttagccctccacatgcagtaatagaatgtgtaatttacagtaacaggggtttatacatgcagtaacatggttttaccaaatgtataaaattattcaaaacactcctacatcaatcagaccttgctcaaagccacctacaaacttacctatggcccacctattcgaacttcttctcgtaaaaatgacatagtaacactgcatttatcatacagtaacatatctacttggaagtggtaacatgcacctattatgtagtaacgcttctacttttgtgtagtaacaagtatacgggtagcatgtgaggctttaaccccatatattttagtttcaattcctagtttaagtagtaatactattcaagaaatgcaagacactttgttactgcaaagcttattgtgtttactagactcttatggtaaccttgtgatagaactgtagtaacgtacagtaataacaagtcatgctattgtattactacttgtgaagagtcaaatcccaaaaagaaaagcttttaagaacaatatctctgatgtcatgtatggttttttaaaattgtttgcaccatgatgctagaaaaaaaaatgcttatcaaaagtagatccatcatgactatattttaactatatttgagcgttgttactgcatgtaaaacacagtgttactacacggtgaccgtcgcgttactgcacagtttcgcgaaacgagagcttctttttccacatcgccgcgtgaccatcttcgctatcaataggctggctgccaggcccctttccaaacactactttaagatctttcaccatagcaaacactgttttcccactgcgatgtttaggcttcgtacggtggtccgccttatgttcaaagtgattgcctttcttccgtacagggtggtttgcagcaaggaatcgacgatgacccatgtacgcaaccttcctacagtgcttaagatacgtactttctgtttcatccatacagtgagtgcaagtcttgtaccccttattagactgcccggatacgttgctaagtataggccaatcgttgatggttacgaacagcagcgctcgtaggttaaactcctcatgtttgtcctcgtcccacacggggacactttctttcttccacaacagtttcagatcttcgaccagtggtgttaggtacacatcgatgtcgttaccaggttgcttggggccttgaataataatcggcatcattatgtacttcctcttcatgcatagccaggggggaggttgtagatacacatcataacgggccaagtgctatggccgctgctcatctctccaaaaggattaatgccatccgtacttaaaccaaaccgtatgtttcgtgcgtccttaccaaagtctttgaatgttctgtcgatgtttcgccactgcgaaccatcggcggggtgtgacacagtatcccgtcctgttgatgttcttcagcgtgccaatgcatcattctagcatttccccttgctcctgaactaacgccttagccgtggtattatagggaaataccacatcaccttagcaggaattctcttcttcgttggctgcccataaacttcacatggatcatctcgtctaatcttgtatcgtagtgctttacaaacagggcatgcttttagattttcgtactcctcaccgtgatataggatacaatcattcggacatgcgtgaatcttctgaacttctagtcctagagggcagactatcttcttagcctcatacgttgtctcgggtaatttgtttccctccggaagaatgttcttgacgagtttcaataaatcgccaaatgtcttgtcactaacatcattttttgccttccattgcatgaactccagagtggtatccaactttttgtgcccctgctcggaacctgggtacaacgacgttctgtggtcctctaacatacgcttcaatttatgggcctccttttcactttcacagtcctccttggcgtcctacaacatctgaccaagatcatcgcagcgtcgttattgtcagcatccctgtccacctcgcccgtttgatttccttcaaatccagcgtactgagcccagtccggaatgttctcgtcttccacttcatcttcttccatctcaaccccttgctcaccgtgggatgtccaacaattatagcttggcatgaaccccgactaaaacaagtggaaatgagtagtcctgcatacagaatactccttctagttcttacacttattgcatggacaaccaataaaacccttatgcttgttagcttcggccactctcaaaaaataatgcaccccgtcgataaactatttggaccaccggtcagcgtacatccattgccgatccacctacatgtaatgaaaaaaagtcatacataaataaatattcataaaataatgacagtcatacaataatgatcaaataattaaaaactctttcaatagtcatacaataatgacatatcattattcatacaataattataaaataatccaccaaacaattcttatttattatttttgaatttttaaactaatattaatgttgtacttcttttaattttcaatttagtttgttttctattttccatgattaattttcattatattttaaactatgagaataaaacttttttaaataaacaaacaaaattcctatatattattcttccccacacaatttgtttctctcatcaacttacaacaaagttttggagacaaaaaatgtgtgaaacatagctccaaaagtaatataacaccaaaaaacattggaggatgaagttactaaccttttagacacctccgatttgtatataatcaccaaaaaaaaattcacaagaaattttggcatgacctcccctcttttttggagaaaatttgaagcttgctcgggctggaggaggaagaagacatatataaagagggagataattagtcccggttgatgttatcaaccaggctaaagatcgccgagatctttagtccctgggggtctgacaaggcctaacatctttagaaccgagactaaagatgatcttaccaaccgggactaaagatcatatatgcccgctgtagccaccaaccgggtttttagtggaaccgggactattgtggatttcggaactatgataagatctcttgtagtgacggcttgtttggctattagagaggcagtttgagacatacggcacacagtttcataccgtgtgcgtgccaagttggcaattggatcctagtagcagcaaattttgaaacactcaacccaacccaatccttcttctcttaatcttctcttcctactcttgtgtttgtgtgtgtgtaagaggctagtagagttagctagcctaattttttttgcacgttgcagctactagctgtgctgctggcttgtcgtcctctgcttcaactttaaagagagagctaatagatcggtgatccgcttgggtttctggtgatcatatgcaacatggactagctacttggatttgttcaaaggatctgcttcttggatgctgtccggccacgtcgccatgcatgcgaattttgtggatggagtcaaaagctgcatgcacggagctgatttaattaagggcatgttcacattgtagtcaaaataaaccttaccaagtttttagcaatgccaaaattttggcaggatttcttatgtattaaccagatttgccaacaactaaacgtagatattttttggtaactttggcaaaaaatgatatggttgaaaatggcatcaaagtgaacatgccctaattaacttgttgacagctactccctccattccaaaatataaagtataactacccttaactcaaagaccaagaaaaaaatattatcatcttgtagtttgaatcatcctaataaatataatgcatgcatccaataggattagataacatgagagtaaaggatttaaaaaagtaataacttaatgaagaagatgtcatagttaattgcatgcttgcatgcatgccttatattatggaacatctaagaaaagtggttgtgccttatattatggaatagagggagtagtacctaattaagcacgtgtgttaatttattattaactagtaatctgcccgtgctaatgctacggcgacattcagaaatacaaattaagatcgatggatatagttattatgttgttaattaaattgccacatgcataaaataacatagttattatcctggttcaaatggagtcattagtgacaacataccatggtaaaagcaaaagtaattaaactttggaacttggcaccttgaaccatcaaatccttgtctaccatgctgtctccctgtcaccccccccccccttaattctaaattaaatggatgagagaaagagattaatatagtttagtgtgatagtgccaacacatggaaaatttagagcttctagttctctccttctacatctctcttaaatgtcggaccaagttcttatggggcccactcatcatacaaccatagccaacacatcatctgctcttctctcatttaaatcttcttttatttctcaaaaggtgagagaaaggtttaaattgaatttccacccaaaatgccactctaccactccaagccttctaggaaacatctatatatgggcctatttgtcgtccaaatacctgcaaacaaccttggtgaatcatctctttatcctaaattatattttcaaagagagaaagaaagagagagagggagttaaagtccaatttacacccaaatttcaccatacctctcatcttctcataggaaacatctacataaggccactagacagccactcatacttggttgagtgaagtacaagtaggatcacagcctcaaaccactgccaactcctttaaatcgtttctacccctcatgttgacaactagctctcactttgcaccttcacttttaccattcactactacaaccaagatttttgtgtgagggctaaaatgatttttgcgcgcgggtaggcggtccgcacgcacctaggggtctgggaaaatgatgatttttgtgtgcgggtggcgcatccccacgggaaaacaaaaatccgaaagaacataattttttaaaaaaaacgaaacccaagaatccggcggtgggcttccgcccgacggccatagtgccgcctgcctcccgccggcctccgcgccacccgccggcagatccgcgcttccctcccgccacaatgccgccgacgcccctcccctccgccggatctagggagggaaggaaggggagaggaggggagctggatcccgcgtggggagaaggcggccggctgccggatccgtgcagggacggccgccaccgctggattcttgcattgacggccaccgccgtttgatccgtgtagggactgccgccgcccgccggatccaacgcccttcaccaccgccacgtggaggaggccggcgcgctcctactcccaccaccgccgcgccgctgctgtcgccgcacgccgccgctgctgccgccatcgggaggagaggagaggagagtggagagaggagaggagaggcgtgagagagagagtactgagaagagaagctctgcgtggaaattttaaagtggaaaaagggatagaggggaggggagaggagagaaagaggggaaattttaaagtgggtgagagaggaaagagggagctagtatttttgcatgcggctctcttaataggtccgcacgggaaaatcggctcattttcacgtgctgtccatttaagaggaccgcacggaaaaatcgatttttcccggaagcaacgagttaccgcacggaaaatttgatttttccgtgccgtcctctttaatgaaccggacgcgaaaatgagccgattttcctagaagcaacgagataccgcccacacggaatctaaaaggtccctatctaggaaaatcatttctgtagtagtgattcatgaagttccttctctacttgatcgatccattttctttgtttcttttttggcatagatcgaacacttggtggtgcgctcgtcggtgttcccggtgtctagagcgccaccatcgccccactttgtcattcccgtcgactcgaatcatctccggctgtaccattgcgccactgacgtacgccgccacgaatgccgtcgttcgccgttgctctcctgctgcctctgcttctcttgccgccgagtcaccgacatgtgggcctggctgtttagccacttcattaggtgctaaggactttaattagtagaaattgaaatgttgtaaggttctttttgtaaaattgctttgtttgccatgtgggcttatggacctaaatgcaattcacctaatgcccagggaccttgttgtatagggtttagggcttaccctaaaacatgaaattactatttcatgcattcattccttgatataatagcttgatgagtatattgttatcacccttgctttaaccccctcttttagaatcaatttggagtttttgcagaagtcaggagtttaatcatataaattagtttcattccaacttagttcccaagtatagattagatagatggtttaattctatagcaaaacattagagttggctcatcctgtagcttctacagtaatagttagccacaatcttgtaaataccctattattttatgtaaagaaatctccattggagccttaatcaaatgtatgcgatgaagattcagattgttgaacctttattaatctactgatccagggttgatacagtttaaatatgtcggttaccgaatctttaattttgagacccgacaaggtgtgtgggtgggggcccctacgatttgggagcctagagcggccgtaccgctcgcaccccctcccgcctgagccggccctgactacatgggcgttaaaaggccaaatggcatcttatgacgttttctgggcttgatggcgacgaaaatggacgccatagactctatgacgacagaaagattgtcactagattaatgacaaaaagataaactttctttataaaacgccattagagacgcatgataggtgacgaatatgattcgtcacacgaatgtcacagatttcatagcatgacttaaaattcaatttttatgacgtaaatgagcatcacctataatcagattcttgtagtgatggcttgtttggctattagagaggcagtttgagacatacagcacacagtttcatagcgtgtgcgtgcctagttggcaactggatcctagtagatgcaaattttgaaacattcaacccaacccaatccttcttctcttaatcttctcttcctacacttgtgtttgtgtgtgtgtgtgtctaagaggctagtagagttagctagcctaaaattttttgcacgttgcagctactaactgtgctgctggcttgtcgtcctctgcttcaacattaaagagggagctaatagatcggtgattcactttggtttcttggatgctatccagccacgtcaccatgcatgcgaattttgtggatggagtcagagggtctgcatgcacggagctgatttaattaattaacttgttgccagctagtacctaattaagcatgtgtgttaatttattattaattactttgctagtgttaatttatccttagtttttttattcgaaactactagcatgcatgcctttgtctttgtcagagagagaaaccgatggaatatcctcgtttcaaaagtccatgcataatgtgcatgctgtgtggattcgtgctgtattttcctgggtagataagaccaaaaaatcccacttaccaactaggttttttaaaagtctggtacatcgtgaaccatgctgcttcacgtggtcggaactatatacgttaagatcaaatgtgctcaacgtggtctggcacatcatggatcatgctgcttcatgtggtcggatctagatgcattaggaataatccttttcgtagtagtgaaactaaagaacttcacttgccaactacttcctccgtttcacaatgtaagtcattctagcatttctcacatttataatgttcctaatgaatctagatagatatatatgtttaaattcattagcattaatatgaatatgggaaatgctagaatgacttacattgtgaaacggagggagtagtttttttagagtctgaacaaagatgaaactttttggaaaggtgctcctgatgaccaagttcaattcaccaactgaaatcgcacactggatttacatgaaaaatgcgagatagacaaaaatgatttctttcggttctaaattaatactcccggccatttgggaggagcaatatgtacatatgcattcatcacacttcagcttttttgtcttttttttccttggagttttaagaatgctcataattagggcatgcaagttgatccattgatatattcgcaatatttgacgatttttttttcattttaaaaattgttgacgatattagcttaattttggtatggaaaatatcggttaatttatccccaatttttatcaagagagaaaatgaaccatgagagttgaggtgctaattaaccacaagcagaaattcattttaatttgtggtatatatatatacacgagcatgcatgtaaagatggaaatatgtgaaaaatataatggtgctagtagatttgtctaaaacacttccataatactatgatcaggacactcgataaggacaaagttaaattttagggattgtgtcattatcaaaattatcaatgaataattggccagagggccgggattagcaagggtctactactgtcctgccatttcattaattaattagattaagtccccgattccttgcatctctaattggcctacgagaaccgacaaaaatcgcaagatgggaggattgtggtaggttatcttctccaactgtgcctctcaagtggccataacatattagccagaaggataaataatcatcaatctgccttcacagttttgatcatctcatgagacatatatataaaccacccattagcaagagtctcctaggtgaattaattaactatgctgatacacatatacttaattggtataagaaaattagtagtgatagttaattagtataaaagcatcaatcaaatggagactattagctagctaggagaccgggcaagcaaagcaaagcattgatcttgatgaatcctccagagagattaattgcatattgccagttcctcctgacctattatatgcatgcaagtgctctctgtacttgtgcggtgcaacgacgagtagaactgagggtgcgccttatatacgccggacgagtaaagagtgagtacgtttgtagtgacgtctccaattttagtttctatggtagtgaaatatgcgacgtttgacacctcaaactggagaaaaattggagctgtgaaatgttttctttttttatatacgtggagctctgaaatattgacagttttgtttttttctataaaaaaagccaagaagagttgacggcttatcggtaggcgctcctcgatggagggagatgagcttaaaaagtttcagtaaatggacccatggagtggaaatgcggagtggagtggagcagtaataaaatttaaaatgccacgcgcagggcatctcgaccacgacaggactctccttgagatcttagaacagtgtgtgcttgctagctgaactgcagcagtggaacagtaataaaatttaaaacagatgtgcagtgttcacagaggacgagtgtgctctgtgttctctgcttgtgaatagatatggcgatatctgcttgtgaatagatatggcgagtactattactgggtatacatggttaggacagatgttagtttgttctgcttgtttggagatggatttgggagcaaatgtacatggttagggcgcaaatgttagtttattttgctgtggaggggagtgggtttttgtcacctccggaatttccatctaaaattccaaacgcttacatgtgtgttaaaccctcgtccaggaatcagccgaggcacacaataacaaattgataatagagtatgaataaacagcgaattaatattcacaaataataaatcattacagaggtagatagttcctctcaaagaataaaattctacgcagcggaaaataaaacaaactacggaacagctatggtgtctccactccacaagcaacttaacccagatcaagcctagtcctccagatcatcaccttcactgaagtactcctcctctgatgaatgaatattgcaagaatgagcatatgccatacttaacaagccacacagcaaatatgcaagtgcacaggataacaaaggacggcataataaagttcatttgcataaacaacatttaataaatatttaggagaatagtaaaacagttgaataattaatcagtattaaataaacactacacaacacacccgtgttgcataggccccacctcatctgaacaaccaccccggttgtacaaatcaaacctcgataccaggaatatgccactccaaaccaggagtcaaattaattaacacaattaccaataatgagtagtgtgagactaatcatgaaaaacattgttcaactcacccataaccgcgggcacggctattcgaatagttttactctgattagaggtgtaccactgtacccacaagacacaatcccacaacatgtcaccatgcgactcagtaccaccacggtaccttggaaaggaactgtgacaatactccaaaggaatgtttaggcttaaactaaaatgatgaacaatgttgatcttttatgtttaggcaatgatgaacacttattatgcaactgtgatgatgtaactgtgatgtttatatttatgtatatgtttcatatgtttatactaagacttgctaaataaatatttgttccaattaactcggttttgtaggtgaaacatgataaatattcaatgtgaaatatgtgaatggatgtgaaatatgagatggctgtgaatgtgtggttgtgtgaaatatgttcatgtctgtgtatgtgaatgcatatgtatatgaatggttgaggctggggagctggggatattggatatctgtgtttgtttctgtcatttttgcagcgggcatggctagcaaaggcctgaggctagccaaaaaacaaaatttattttttttgtgtattatagtcatctgtgacgggccataactaaatgcccgattgagatgagatcatatgtgacgggctctagtttaggcccgattgaggtcagtaggcatctgtgacgggctatagtttaggcccgattgagatgagtatcatctgtgacgggctctagtttaggcccgataaaggttagtagtcatctgtgacgggctctagttgtggtccgatagagataggtcatctgtgacgggctatagtttgactggtcgtctgggtcaaagctatctgtgacgggctttacttagggcccgattgagatatattcattcgtgacggccgtttgcccgattgagataactcttcacatcagtgacttctagcctgtgacggacgctgtgcccgattgagatggggcttaccgcccgattgagatgagggtatccgttctagtggcatcatttcaacgtgtttttcaatacgaatacaacaattctatttatgtattactagtcatcaacctgtgcacttgcatgcgctagaaaaattatgacatcaattaactgacgtggaagctttattggtgcatccaattactaaatataagatttattctttgtttctcaattctttcggtcaaaaacgtgcatgtgtgttattcatagaaacgtatgtagtatttgtaagaagtacagtatcgaatttccaaaaagttctgaccttgtgcgataatatacacacacattaacctacataggcaagctagctagacctagaaatataccatttctaaacctattcggtcacttactcacattgggcagcctaactaaactaacatggactcacatggcatgcaagccagccatggtactaactcgtctaccacgccatagtacgctacaaacacaactaagttatcttatgaaggactactcaatagtacacttaaaacattattactcgtttccttttaccttcatctgacgggtacgagctaagtgtatctgaaaatcatctccttctgtccatcggcgaaaacgtgcaaatttaaaattccctggtacgcaggactagatatgaagagtttgttcagagattgtgaaacaaacatatacatccatcaactatatacatgcataggatacatacatacaatgcaggtagccatttgcaccatattcataatatacaagtaggcagccatccgcaccttatccataccaagacgatccatttgcgcattatccacatcatcacataaagcttctgcctataaatagcagcagcaccttacattcaagaatcacctctcaacacacaactaagaaacatagctaggtaaccagggaaggtagcatcagcagcaggaggcaatggagggaaagaggactaccacttcgatggtgatcatgtgcctggtcatcttgagcctcactgtcgactccgccaccgcggcacagtgcggctgctgcatatcctctcgggcaaaagcatgttgttttggttgtattgctgctggtggctccgactcaatctgcaagaacacttgttgtttcccatgtattctggccgattctggtaaattcactgaagtcactcttttaaatgcacttcttatatgtagatacagactttgtagcatatcgtggactaatacatatgtgtggccttccatgcattttcatcaatatagtttgttgacttcacttcccatctgacaacttcaggcatatatcttgcaacatgaagacaatttatgctctacttccactacaaaattaattaactaatgcgctaatgtgatttccatattttaatttcacagttgttgctaagatggacgaaatgggagttcttgctaagatggaaggacaagcctaaaacaacctactcgcattgctaccagtcttaatgcctttcataagaatatgttgttttgcttcaagttatggccaagttatgttaatgtttatctccaataaattgttgaccatatggagcgatctatagtcgatccatctgttggtcccaactatttgtatgtcgtgcatatgtgcgctcacaagcatatttaatttctcttgctacttttaataaggccatagcactatccaatgtgtcatctgttggtctctgaccttagcaatttaatgcaacatgattattattatttgtgtgtgcatgttctttacttaatttattcttagcgtatttctgatgtttttgtgagttttagactatgggagataattaagattgtcatgccaaagagtattccgaatcctactaggaaagcaaagggaggggggaggaaacatggtcaatttctcggctgctatcacattccttgtattcttagtgtaacatacccgaaattttaggacttaaaatttcttgtcaaaatagttagaggttaacttctccaattttgagagagccaaaaatttccgttttaatttaggtgaagatcaacttaaaccattgcatgattataatttgagaacaaaataaaatcttttcattcccaacattagactagaaatgtcaccaagcatacatgtacataatgcatgcctaggctcgagttctttgtgcatttggagttttggtcttgcattccataataggtcccatgagcataatctaaaagaattatttcaccaaacaaacctatagttaatcttgggtgataacatgtggacttaatattaaactcaaatatcatcttctcagtctaaaagaaaatttaatgtaatccctataataatattaaatgcaattatgaagtgggaatacatatacaaacaaaggtcatcctaattctctaaaatattttgtgcaagataaaatcatggaaaaatttatgtggatagtgattagcacaaacttatcctccgtaatttggtaacgtgttaacactcaagttgatacctcaaattaaacggtcaaagcagacaactaaaagaaatcaaattaaattttaatcggctaaaaccatgtttcatccaaaagtacatttaactgcacataagtgaacatgggaaataatgtattcaaatactagactagttatcatgcctaaatataatttttctagaattttcctcctctctttaagcctcctaaaaattcaatctagctttctaatagcccatctttgtttaatttctgtgagcagtccacccattatttttttagtgcaaccaaagaaaatggaatctaggtgtaatcatctaccaccagtaaaatctacactaattcttctggtctacacattgaattatgtagttacaaagttagaggagaaaataattccgaaaaaaatgatctaaaaatcaagtttacccagaatcttacccaaccctctcaccctagcctagtttgccatgacctggacccacctggcagcctctccagctcgcccttcctctgtccctcatcctcagccgaccaagaaacacatagagggagagattgagagccgaccgagtcctggacgcgtcgacgcgtggtgacgacgtgtcgacgccttcaagtcactgagtcatgcctccatctcctccagaccgagtcgcccaactccacacatcactctggagctgaagaagccgagggagaggtcctcagcctctccgtcatcctcaacctcgccactggtcgtagtgacgacgaccttcgccatctccgtttgagtcaaggtcacctccatctctttcgcgttcccatctctccacacaatgccgagcatttcctcttttgacctaaacccctctcgtgcagtgcatcgccaggaacgcaagccacgccgacaacgccctggagcacgcaccggagcgccgccgcttcaaccatcgtcgccgtccggccattctcatccacctcagagaaagccgctgcgccattgtcatcgcctcgacctcctcttcaaaacgcctcaagaaccccagccggaaacatcaagaacacggagaacacatccttttcttcaccggcgccaatctaggatcgcctccgccgtcatcgtcgtttaccgctgcctcggtgagccattgttcgattccttgcgcatacaccatctccttgacctcacaaccctcgtgcatgcttgcttgaagcagctcattgtcccgttcgagccgtcgtcgttcacccgaggaggagcgccgtcgccgagccgttccacaagtcaccgctgccgccaagacctcgacaaccctagctcgacccacggtgagcatcctgaagtctagaagactacatgcatgcatccttttcgttcgtaatcgacttccatgcacacatgcactttcaccccaaaaccaccgccgctcacactcgccatcggcgctactccgatgtcctctaaccaagaaaactagaggaatggaatcgcgagagctttctcttcattttatcttttgacctcaacctcaaacgagccaccgtttgccgccggcgagctccagatcgagctcagccatggctagctctgctctgcctagagcagagggatgacttccgtgaattagattaagtgcagggatctgtttacaattgtagaaacacactgacatatgggcctaggactgcgggttgattcctagaaacctcaagggcctttgtgcatattggtccctcacagccatgtggacccatcctttaaaatctgaagaataattaggaaaatgcccaaacaaatatgtttagcagaaaaatgcacaaagttgtaaaatctatataaaatcaaatatagctcattttgaagtgattctagttgctgtagattcttgaagttatgaactttattccaggaatataaaacttgacactcactgtacaaataatgtctctaaaatttatctaagataggtcatacataaaacatgtacaaacttataaaatacatagaaaattcatcacaactcattttgaaacaaaatcaaattctacagattcatcatcatacagtctctgattaggtgaaataaaagtaattacttactttgcatcaaatgcctctaaaactattatctctataatgattagttttagataagctaaactttagaaattcatgtagaacccaatttagcttcaatttgagtaaacttaagttctgtaggatcactaaacatgtatttctaagttatgaaataagattatatacttactgtgtagtaaaagtctctaaatattcatataaggatttactaacatagagcagcctttaatttgtaaaacttgtagaaaatttatttttagtccaaatgaaatgaacaaagtttctatagaaccagcaaatagttatcttcaacatggtaaaataaaatttggaaccttttgtagagaacatagatcgaaaccttaacttagtgaaataagaatttaaacacatagttgtttaagtaatacataaacatgtataagtatatatatacactttaggtctaattaaacctaaataaaaacttgattgaccagtgaagccatagttccatcctcatccactaaaacttagaagaacttggctcatataacaatttctaggttaatataatatattgctagtttagattagagcatctctagtttataaaatatgaaccatactagtaaagaccataaacatgtgaactaaaaatgttttagataaccaaattattccttttattcaacttaaacaggaagtagcatgttctgaacctataactcaaaagtcatgaacatataaaacactatacaccaataacacgttataacttgtaaaatgcataaagaattcattataaatccaaaaattgtgaaaccaaatgtgttagtattagaaaacacatctccacacccctgtgaagtctaatctagtaaaaatcactttacaaaagtatttcataacactacctaagactatactactataaaccgataaaacttctaaaaagttcataactccctaatggaataagttaaaataaaaattctttcacctaaattcattttagatcagtaccaacccactgtgcataaatcatgcattttagagcattttggattttcagctctttcggtgtttaattgcatatcgtgtccttttatctagataattgcataatcggtgaaggagtggattaggtgctaacaattctctgatcaaggcaagttttctcctcccatcctttgaacacattgaatcccatgatttgaggaatgaaaatatttgtttgcaaagttgcatgtgaacttagattatatcggtatttgaaattgggttaaggtagttatgacctatttgctgcataccccaccttgaataattgatcctcttgctgtttgaacccctagaaatggttagagtacactctttgtgctcaaatgggtttatatatgctctatgtgcaactactttgcttagccatgcttagaaatatgcaaatgctcattccatttataattaaaatgtggttttgatacttgaaccttcgctagaataaaatgaatatgatgggtatttgcgaactaaaatgtgtaaaatgtgattttacacttgggcagcaagtggtgtgcatacagtgttagttgcataccgatagggggagtgtttgcccaagtccataaggaccgaacttgtgtcacccatttaaagttattcgtacatccatatgtgctagtatgggatggcctaagctgattaatctatttaggactagccttgcattctggtaggccggtgtgtatgagttcgtataattcagaggagcttcctatttaccccgacgtggtagtttaggtgactaagcgtgtccaatacaacggtattgtgccacgtggtgggttcccgtcgtgtccgccaccacggtgttaagtttaaggcgtgggcccgccacttaacggttctaggtatattccaagtatgcctaggatggaggaacacgtatcgtgctggtgcaaggctaggctctaagtagtgtaaaggcttcgttatgacctctagatcacattcaacatgaagagtgtggtggagtcttgcaaactcaaaacaaactagagagttcatatcatgtgggtaaagctgtacaaactctgcagagttctttaaactaatcgattagccgtgctcacggtcatgagcgctttggtgatgtgtcatgagtatagactatgttttaaaaatgtgatcatgtgacactggtttgaaattgataaatgtgttgagttgtgtatgtggtgatacattatgacttattgttaagtatggcaataagagattgtttatgatggaattatgaagaagttaataatgaaactcaaaacttgtctttgttaattgaagcatcaactcttttacaaaagaattgcgaaacaaaacttgctttatgctgaaaatgaactacatattgtcttcctttgaatatatgccttacatgtagtatagtaggattgacttgtgcttgccagtacattaacttgtttaatgtactgactcttgctgttgatataaccttttgtttgcaggtttagtcttagtctttgagtgatgcgggttccgattgcttcttctaggatgagaacttaatggggtaaacccctagtcggtgtgcttgtgattgggtagtcaagcttccgctgttctctaataagtctatttggccggttggcctatgtaattattaagttgttgtaagtcttaagtttctttcatcttagttgtgtttgctatgtgtaatcatgcttaagatgaaagtgtgaatctagtgcacatcctgggaactagattcacatgagtatgagttaggaatatttgagaggttgtagatctttagctatttttatcaagtctcctgaatgtgtaacacatctggtcgccgccttcgagtggtttgacgggcacatctcaggctgaagttgactggcaggctaagggctcagcaatgtctccaatattcctctctcgaggcgtcggatgtttcattatgcttgtttgatgacttgaattattcacttcatctcaaatataatggaaggtccggagagcctacgacacttagtcttgggagacaaatagccacactaaaggcaatacagccgaggaatggcaaccttactcacaaggacaaatagtcattaaaaaattatgacagcactaaccatatctaatttcagttcaccaaacttacatttaaatttaggcagtattacggagatctaaatcaacaaacaacaaaccatacttcattgtcaaaacaaatggccttctatgtactttacaaattctcacaagatcatatttgcaatttttcctaaactaattaaccaagagaaaatatgtagtggaggattccacatataatttcacagcataagtacataatacaatatggtataatacacatatgcacagtactttgaaatatgcataccagaacatatgctttagttcactccattcattcttgcattcttgcacattcaacatcaatcagatctaccaagcattcttgtacattcaaccacaagcagatctaccaatgaatcactaacttatgtagcaatgggggaaatcggaggagaattaaaaccattcctcgtcagacgacggaaggacaggaggcggcggaagattcaccggctgcacaccacggcacgcgaatccctgaggtgtgggcatcgcatctatcagcaccaacgacatcggcagaggcaggggtggactggggctctttcgtagaccgatgtaaactagacttgttggcttcgttttagggaggggacggaaaagagataaactttacccggctggcctttgggcctgcgtggagagggataggagtttgcttggtttcagccaaaagataggaagaggattttaaataggttgcatatgcatgctttgtctaaagaaaattcctaaaaataaatgaagcaacaataaatcccaccaaaattctcataaatactaaacaacaccctaagcttccagcaattttagtttgaatttatcacatcaattgataacccaaataaatctttcaacacagctaaaaatctggaaacagcataccaattagcctagtttgcaccttcaccaaaattaaaccataactcctctagcaaaatctcaaggtcagaatgttaaacatactttatcatctggtgcaatggcttagtctaattcgaaatgtaaccacatgaaatgagagccataaattacgtaaactttggaacttggcaccttgaaccatcaaatccttgtctaccttgccgtctcccccctaattctaaattaaatgtatgagagaaagagagtaatatagtttagtgtgatagtgccaacacatggaaaatttagagcttctagttctctccttctacatctctcttaaatgtgggaccaagtccttgtggggcccactcatcatacaaccatagccaacacatcatctgctcttctctcatttaaatcttcttttatttctcaaaaggtgagagaagggtttaaattgaatttccacccaaaatgccactctaccactccaagccttctaggaaacatctatatatgggcctatttgtcgtccaaatacctacaaacaaccttggtgaatcatctctttgatcctaaattatattttcaaagagagaaagaaagagagagagggaattaaagtccaatttacacccaaacttcaccatacctctcatcttctcataggaaacatctacatggggccactagacagccactcatgctaggttgagtgaagtacaagtgggatcacagcctcaatccactgccaactcctttaaatcgtttctacccccgtcattgttttgaaaccaaaacccttaaagggcccttttccttttccaaaacccttttttttttttgccccccaaaaaacccccccttttttttttccacaaaccccctttattttttttttttaaacccccccccaaaatttttttttttttccaaaaaaacccctttttttcctacaaccaagatttttgtgtgagggctaacacgatttttgcgagcgggtaggcggtctgcaccacctaggggtctaggaaaatgagattttgc

SEQ ID NO: 4876 - DNA, 4193 bp, Oryza sativa
  unsure (1)..(4193): unsure at all n locations
aggcaccagggctccttcctgccaagcatgcttggaccttctttccgccagctcaaagctttaccgcgnaaggttcttccggatcactagtcaacgtcacccgacagacactttctcctcatgggggtcatagggaatctggcaatactcggggcaaacctcgtaacttacttcaaatgccatcattctcagctccctgacgaatcctagcacctcgatcgagtttttcggcggatggggcggcatataaaggaacattgaaaggaaggaattaatgcatatttttaagttagctgcacaaactagacttaattaaattggacccaaagaaaaagaaaataaaagaaaaggagcaaacatgactcaatttttttttctttttggaacataaatcaaccttgaacagagacaaataacttttgacaaatgaataaattaaaactaaaatatttaggatctaccaggagcacggtacagagtcaccattaacagggatgagtagtactgatgccatcttgattgaatcgataccataatagatgtacagtgccgactaaccaatgaaattcagaaaattatactatttaataccctaaacagtaaagttctttttctttcaaaataaaagaacaaatttctgttttgctaaattagaatttaataaattttgtacataaccttgcatgtggtgccaacttaattaatttataagagaatagagaagagcagttctattttccaaaataatttgaaggaaacttaaggtttaccatttggcttgtcctaaggtcaaggtggctctgataccaacttgtcacgcccggaatttctatccaaaattccaaacgcttacatgtgcgtcaaaccctcgtccaggaatcatccgaggcacacaataacaaattgataatagagtactatcaaataattaattaatatgcgcaaaataaattattacagaggtggatagttcctctcaaagaataaagttctacgcagcggaaaaaaaaacaaaagactaaacatctttggcgactccactccacaagcaactcgacccgaacaaagcctaatcctcctgatcatcaccttcattgaagcactcctcctctgaagaatgaatattgcaagaatgagcatatgacatactcaacaagccacacagcaaatatgcaaatgcataggataacaaaggatggcataattaagctcattcgcataaacagcatttaataaacatttgagagaatagtaaaacagttaagtaattaagcaatattaaataaacactatacatcacacccatgttgcataggcccaaccttatctgaacaaccaacccctaggtgtacaaatcaaacctccaaactaggaaatataccattccaaaccaggagtcaatttagttatcacagtattttcattaatactgagtaatatgagactaatcacgaaaaatattgttagacccacccataaccgctggcatggctattcgaatagttttactctgatcagagatgtaccactgtacccacaagacacaactctacaacatgacacaactccacaagacacaactccacaacatgtcacaacatgtcaccacaaaaaggaatgtgtagcaccggaatcaaaaagcacagttgcgggtatagagttagtaggaaacgtacccaaaaccacatcaggtgtattctgggcttctgcggctgcaacatgattaacacgagccttcggtgctggagcattggagttgttctgaacaggagcattcttcacacgccgaggcttgggacacttatcagcataatgtcctggatcaccacaattgaagcacacccctggcttgcttccctgttccttcctgacaggatgattctgagttggagctgctacaggacgagtgaccatattacgattatcgttgctgcgattaccagtgttgttgttgtagaactggcgttgagggcgagcaactgaagaggatcctccctgtgggtatggtgcagcttgaggtcccaaagcaatgtgcggcctctggctactaccctgttgtgccttgaaatgagcagccctacgctttttctgttccatcctattatacttgtcttcttggcgaatcgccttgtccatcaactgctggaaatcccagtaatccatagccatcaatgcataagacaactcatcattcaatccctctaaaaacttctcctgatgttcttcatcagtgcgacatcttctggggcataacgagctaagcaattaaagtcatggaggtactctgtgacagaacgggatccctggttgagtgctctgaactctctcttcttaagggccacaacacctgatggtatgtgtgtcttcttgaaagcagcagcaaactcccgccaagtgataggctgtccctcggctctgtttagacgaaactggtcccaccacttagcagcaggaccatgcaactgatgtgaagcaaaggaaaccttctcctgctcagtgcactgaatcaaatctaacttcttttccacagcatgcagccaatcacctgcctctactaggttagtggtgcttgagaaggtaggtggtctcacacgtagaaaatctgccaacttgttctacggaggtggtggttgattgttgttatttgcctgttggttctgcgcttgctgcactaacagattaatcaactcggtttgctgggccaaaacttgggcaagtgtgggatctccttcattgtgaccatttccacttccacttccacttccagtgcgggtgttcaccatctgaagaaaagcatgggcaaaaggaaagaacgacagagagatacccttagaacggagaactttaattaatttaaattctatattgctcttaactgtgtatgattacatttaaattgaattaacactatctcaccagctaacttactctctgacaagcaaaagaactaaactcatgtagttacatcccaccattgatgtaagcaacatgctaaacccacacacggacaagcaatcttaagctagcaaagtaacacagcgaactacagcaacggtctaactagacaactactctcgccttgcgtcagaatgaagagatggatcttcctcctctggagtagctggctctctttcttctaggtcttcctcttcttcctcatcacttaagacatggatgacaggtttagcatgatcaggcacagcgtctcccaccacaccagtcttcgaagctaactggagacgaggtggtggacgggttctcttccttgcggtgaggcgtagcttgggtgctggcggtggtgcttctcccttaagctcagctagttccttctgcagacggtacaccttgctctccaacttacaaatcctgccacggttccagttttccctatcatgagctgctttctcccgctccacgcctactgcatccatggcgctaagcatatacacggcgtgcatcacagtggcactaccttcaccttcgggacagttgtaagttccatagtcttgaccatgaggcttgtgtgggtgatactggaaagctgatgactctaactcctcatcaaagcgatgacgtagctctccaatggccaccaaggctgcttcctgacaagcatggctgtactttcttcccccagcttcaaactttatcgacggaaggtcttcacgatcactagtcaacgtcacgcgaacacgacacttctcctcattggggtcatagggaatctggcaatactcgggggcaacctcgtaacctacttcaaatgccatcattctcagctccctgacgaatcctagcacctcgatcaagtttttcggcggatggggcggcatataaaggaacattgaaaggaaggaattaatgcatatttttaagttagctgcacaaactagacttaattaaattggacccaaagaaaaagaaaataaaagaaaaggagcaaacatgactcaatttttttttctttttggaacataaatcatccttgaacagagacaaataacttttgacaaatgaataaattaaaactcaaatatttaggatctgccagcagcccggcacagagtcaccgttaacagggatgagtagaattgatgcctcttgagttgaatcgatgcgataatagatgttcagcgccgactaaccaataaaattttatntgtncgtgcattcgatggcattcatggcccgcg

SEQ ID NO: 4877 - DNA, 11110 bp, Oryza sativa
cgaattcgagctcggtaccccgatctcgatcagggaggaggagactcgcgtgttggcggtggcaacggaggtagccgggcgggtagcggcggcgtccctgcgagcagcggaggcgctgtggtgccggtcagaggcgactggacccgtgcctggccatgggcagcagtgcggtagtgcctcggcgctggtccgacattgaggcggagcgaggaggcgaggtcgctggtccggcggtggaccgtcgtgaggagaggaggcgcagagcgaggatgcgggcggggagagaggcgcggagcgaccaggcggaggagtcatcgcaccggggatttgcgcgtcgcagttaccgcgtcgggccgtgggggcgaaatcgctggtgggatgagatcgggccaaatcgctggtggatatagatctacggtgtacagcggacggctcagattggatgagagggtggatggacggatgggataagagtggttgatttcacttgtaggattgctaggggtgaactcctcctttttatattagtacagatgaatcctccaaagagattaattgcatattgccagttcctcctgacctattatatgcatgtaagtgctctctggtgcggtgcaacgacgagcaagagtgcgtacgtttatagtagaactgagggggtgcgccttatatacgccggacgagcaaagagtgcgtacgtttgtagtgacgtctccaattttagtgtctatggtagtgaaatattcgacgtttgacacctcaaaccggagaaaaactggagctgtgaaatgttttcttttttttatatgcgtggagctctgaaatattgatagttttgtttttttctattaaaaaagccaagaagagttgacgacttatcggtaggcgctcctcgatggagggagatgagcttaaaaagtttcagtaaatggacccatgcagtggaaatgcggagtggagtggagcagtaataaaatataaaatgccacgcgcagggcatctcgaccacgacaggactctccttgagatcttcgaacagtgtgtgcttgctagctgaactgcagcagtggaacagtaataaaatttaaaacggatgtgcagtgttcacagaggacgagtgtgctctgtgttctctgcttgtgaatagatatggcgatctctgcttgtgaatagatattgcgagtactatagtacgctacaaacacaactaagttaccttatgaaggactactcaatagtacacttaaaacattgttactcgttgccttttacatcgatttttccgtgccatcctcttaaaaggaccgcacgtgaaaatgagccgattttcccagaagcgacgagttgccgcctgcacggaatctaaaagggtccctgtagtagtgattaatctagccaactcgccactgtgaacctcatctatttctcacagtgttccactatgcaaaccaccaaaaactacctcggaatctccaagaacttccacttactcttttcacccgaaggagtttcatccatcgcacatattctctggtgagcttcaccgcactccaaccatgggaacgtgaagttccttctctacctaatcaatccattttctttgtttctattttggcatagatcgaacagttggtgatatgctcgtcggcgttcccggtgtccatagcgccgccatcgccccacttcgtcattcccgtcgactcgaaccatctccggccgagccattgcgccaacgacgtcgcctacgtcccaggaaaaagacgcccaaatatgatcaagccaatacgcagccgcgaacgccatcagtcgccgttgccctcctattgcctctgcttccctagccgccaagtcaccgacatgtgggccccggctatttagccacttcattaggcgtaaggactttcattagtagaaatttaaatcttgtaaggttctttttgtaaaattgctttgtatgccatgtgggcctatggacctaaacgcagttcacctaatgcccatggacctttttgtatagggtttagggtaagtcctaaaccctacttagagattactatttcatgcattcattacttgatataatagcttgatgagtatgttgtactcaccattgctttaaccctctctttgagaatcaatttggagtttttgctgaagccgtgagtttaaacatataaattagtttcattccaacttagttcccaagtatagattagatagatggtttgattctatagcaaaacattagagttggctcatcctatagcttctacagtaatagatagccacaatcttgtaaataccctattattttatgtaaagaaatcacctttggagccttgatcaaatgtatgcgatgaagattcagattgttgaacctgtatcaatctactgatctagggcttgatacagtttaaacatgtcggttaccgaatctataattttgggacctgacatggtgtgtgggtgggggcctagagcggccatcccgctcccccctcccacccgagccggccctgactacatgggccttaacaggccacatggcatcttatcatgatttcttggcttgatggtgacgaaaatggacgtcatagactgtatgacgacagaaggatcatcactagattaatgacgaaaagataagcattctttatagaacgccattagagatgcatgataggtgattcgtcacacgaacgttagatttcacaacatgacttaaaattcaattttcatgacgtaaattagcgtcacctagactggtggagaaaccctttttccacccggttcgtaacccccctttagtcccggttatccaaccgggactacgaatccgggactaaagatcgctatctttagtcccgggtgaaataacctggactaaagatcgatctttaatccggtcagccacgttgccagctaagccatcttagtcccggttggtgtaagatcgatctaccaatttttttcttatttgcatggccctattgctgcatggtttagggtttatgttacaatacatatatatgcattttatatatatatatacatatatatatatatgtatatatatatataggacggctctttcgtacacccaggtgtatgtacacccttttattaatggatgatccattagcattcaaattaactgtgaaaaaaattaataatattaatttccaaatgactgcatgcaagtggcatagctgcacaccggattgggtgcagacttgaacaagatcgttggcatgcatttgctttcaaatttgataacgtaccttagatatccccaccttttctagtatgcaacagtatatactgttttttaagccgcagtatatatactctttgaagtgatgagcagtactatatactagttttttttgtgtattagcagtacctaataaggagtaccttatatttttgttgtagcagtgaatacatctttttttaattagcagccgaatatacttactccagaactaatgagtatatatatactgattatgtctttttattggtacgtgcagtatatactactgcaacgagcgaatgagtacatactgttctttctcggaatgagtatatactgattttttttttggaacgagtatatatactgacttttctcggagtggtatatacttatttcttctccaatcggtatgaacagctactcggagtggtatatacttatttcttctacaatcggtatgaactgctctttggtcagtgtatatatactacattcctcattgaaggagtatatactgcttctttttttatcagtatatacatttgttattaattgagtatatactgtatgcactacttgttctgtcagtatactgcatatactaattgtcatgtttggtcggtatactgcatcgtcctcgctaaaggaggttatactgcctttttgtttgatcggtaaatactacgtatactactttttttcactcagtatataaataagtatgtaccagtatttcttagataagtcgtatatttgctatccatggaagctggatgcatatgcttttcagttgaatagaataattaatatgcttttcacgtgcaaattcagaagtatgcctgaatcactggcaaagtatcggctgttgcattatgaataaacctaaattaatgaaataccctagaagggcactgaattctgaatggacattaccagaccaaagaaaaagatcaacgcagactatcggaaactaagaacaaaacataacgggatcacccctcgatgtggctcatcgaagaatctctgcatccccgcagacatatctcggttaacatcgatgggatcacgccgaccgcacgccggagagaggtggacaagaatgtgtcttcctggattaacaccgttagctaggaatcacgggttcgatgccgacgacgatgctgttgccgcacggccacacatgctggactgttctgtcatcagcaccatctacgtccacgatacatgcatctcgcatttgcatgcaccaaacaaattcgatctgcatgcatgcattatcgatttgcaacctagaaaaagcaaatcaagaaaatcggaagaaggaaggacttgcctgcagcatagtcgatgttccagttccggacgacgctcagcgtcgtcttgatcgtagcatgggcctgcatcgatgccgtcgccgtacggccacactgacttgcccgaagatcaatggcgtcgttgtctggtcacagctcttcggccagccagtcgcctgcggatagtcatactgaaggcattggtaatggaagacgccggcgtagacatcagcagacgccgtgaccttcgaatagccgatgggtcgcgccgtcgtcgccttcgaatcgccgatcgcgataacctgcagatcgatctatcgattctgtttacaaccacccacgagattttaatacgagctattcaaaagggttctggttagtacggaataattcagattatgaggatttttttcgtaactagaaatcaaaacgggctcggtatatggatccgcttgctgatttgatcggtggtgttcgctgatggacggtggatggaaccgggagtacctactcctgggagtatagaatcattatatatatatatatatatattatatcctactaccgggagtagctactcctgcatcatctgctatacgtgctttcaagatttgtgcagctttctgctaattcgaatttgtcattagcgggttaattaacccgttaaaatatgccgatcgctattttcgtgggatacaaacttttgaatgcattatgcacgtcagatgtttgcattatctgcctgacggccgcatatatatatgatctgctcgtccacgcatgtatttcgcatctatagcatatcatcaaccacaactaaaatgaacagatgatgttctgctggcacactgcgtgtggtaattacgtactgtccaactatagccttgtgaacaagataattaaattgagcagaagatgttctgttctttctctctatatatacctattcaaagaataataaaaaaaggcagcacatattctgctacctttcatggatgggaagaagatattctttttgaatgaagcagaacatgcagttttctagtttctgctcccggttcacattctgcccattttctaggttctgcattttgaagttctggaggagcagaacgtatccatgctggtattcaattacacaatcagaacttgatatggggaccagaacaaaaatgttctgctcttgtttctgctggggccttgtcgaaactagatttcggcaatagtaaaagggggtggctatcaagctagaaaagtgtatgggtttggagacaaaggatttatacaggttcaggccttcttattcaagaagtaataccctactcctgtccggggatggatccgccgagtgtattattgattgtatgattgggagaaaatcaacctatgccccaagaggcacccggaccctccttatatatgggaaggagtccgtgttacaaaagataatctatatccctaacggaatatgcagatacaggtaaaatacagtcgtaaccgactaagtctcaaggtgtttccttgatgtacaagttaagaaacgaacccgagatacaaataagatattctatatatattcggtatcctatatccagtccaaatatcctcgccgtgtagatatgggatatccataatctccacagtagcccccgagacctttgcagtcaaccatcatagccttctcaaagataataatccgagtgcttcaaacttttcatgccaaggcctgccgagtagcgaagacgaagactgtaaagggcgaaaaaataaggaatatggtgcatcgaatagatgcacctaattaggtgtagcccccaactatgtgattagttaacaaactaaacatatagttgagaacaaaataatagcacaatcatgcatcatatgacagaagcatatgcggcgcctaaagaggcattctagccgactgctttttagtcataataaaaagaatccgagtggttaacactctaaaaggttcacgaatgaacacacttgacaggcatccgaataaaaaactctaaagattacccaccaaacattataaaaattatggtaatgaataagtctaatagcctaagctatgactatccatcataatgaaaacaggcatatgtggtgtaaaatccgagtaaataaactcataaaggatttaccaaccgcctaaggaaaaatgactataatatataatcagcctaagccataatattggtcaataaaaaatgcacacttacgtggcaaaaagcaacgatattgtatccaatcaattgcttaaaaacccaaacagcaccatgactatattaaaaagtcagcggggcagctatataaagctttactgtttgacaccttttaagatgcattgtaccaactcttaaaaagttgagtaactgcggtataaaaggattttaaggtattgagcacttgatcacgcgcactttggcctaagcgaaaagtgcctgagtccctaaaagaacgtgacaggccacacctgaaaattcgcattgtaataattccgaagaattatatgaccgcgtaaaaaaagattttatcagcattgggcaacactattgtgcgcataagttgccaaagcaaaaaatgcctaagtccctaaggagcacaatgggccacgctgttaaaagtattgggctgaggtactgttcaagcctaagcccattcgcacctccgatacccttaacaaaaaatcacgtgatccaagcgccacttcgtcttccccgccagaactctcgccattttccccacttcctgctacagtacagagctgcgccggcaaactagggttcaccattccactcgaatccaccttcgaaaagttcattaaaatccttcctgtgatccaccgcctcaattcctcacctctcccaagccatccctcgaatcaaatcagcgcattcaggtaaaatcgatggcgaaagagaaagaaagcttcgaaggccaatgggcaccatccgacgtgacggaggagaatctgaaggagatggtggcgcacggtgttctccctgccaaggagatcattgggtggcgaccagcgtgcggtgaggtttttccgtcccccgacacacatgaggttgtagttttttcccatttcttctatggcggcttcgctcttccgacctcaaaatttttccgcgggatattaaacttctatggaatcagcttgcatcacctaaacccaaattccatagtccatatcgccaatttcatccatgtttgtgaagccttcttaggaattaaaccccacttcgctctgttccgccgaatcttttttctcaagccccaaccgaacaagaataagccatgtgtagtcggaggggcaggatttcagttgaggggaaccctgagtcagaagtatttctctatgcccttcaagacctcaaacaaaggatggcatgcaaactggttttatattcagaaccctgagcctgctcttcccgagtactcttgtcttcctccggtgtaccaagatacttggaactctcttccgatcggagatgaagctgctcaagccttggagttgatggaccgcatgctaaaactcaaagaacaaggtttacaaggagagcagattactcggcatttcatcaaatgccgattggcaccaattaaagaaagatcccgcacagcattcgagtttgacggcaagcatgatcccaatcgtgaagaaccagactctctggactttaaaatcatgaaggagagaatgtataaaatcttctcaaatgctattgtcgtcagctactcacatcaactgccagttgtgccatataacgcattcaatccgcctccgcaggtatgtatctgaaatcttcaacctatgaccaaaatagtatcttgtcttcatgttgagttaactaaccatggaggcatcttattcaggaatatgtactgataaaatctgatcccccaatcactcagcgccggtctcctcgccagcacaccgttcagggaggtggaggaccaacaatcagaccagattcgcaacctcaaacctccaatccaactggacagacaggttctcgcaagagaaaactggtgccaaatgacgacgaaggcgacgagaaatctggggacaaaggctcgcctaataaactcccgaagcgtaccatgcccaggaaaaaactggctggccgtccaatgccaaagattagaacatcttctaggtataaacctcttggtaccattttatttcggcatgctcctctcatgaaaataatactgaatattgaaagaacattttgcaggaaaccatctgacatagacccaactggaaaagatcctgatccggctgccacagagccaaatttatccaaagatgctgagccgactgccgaaagccggccgattgccgaaagccagccgactgccgaaagccagccgactggtgcccatgcttcggatgacaaggcccatccgagtgaccagccgccgactggaaaccagtcggcagcaactgaaactgtaacaacccaagagcccccgactggaaaccagtcggatgtaagtctaaatcaagagattcctgaagctgaagcgcaggcgacaacttctcaaggaccaaaggctggtaatgactcgatgattgggtctccaaataaagaacaaggatcacctcacgctcagctaggaacatcctcaggtaactcatcttctcaagtgataccgatttaaataactccagtttatttgcctaatgtcttggaaatacatcaggaccaccgggcgatggcgaagaagaaattccccgcataaaggcggctgatgattctcgtcctcctatcttgctcaaatggtgggatgagaactcacaggttgccggcatcgtcataaaccgtcaaaaagaagatgaggaagtgtgccagctgaagaaggcgcttggagaaactactcgcattgtgaatgtaaatatttcaggcgactgcctttgatgactttgttttctttttagctgaactaaaccatgaaccatcatgcagagaatccatcttcgtaatgaagccaagaccgcaactttggagaagctggttcctcatttgggaactcttgaagcagttagggaccagctacacgaggccaaggagctcgccaaaaagacggaaaaagaattaagggagcaaattgctcagctccaggattcaaacttcgagctgagtggttcgtcaaaaggtaatcttctagacctgtcccattaatctatgctgtcataactatatcctcaaccatttggatttcgaacagcgcaagccaccaggatggttcaaatggagaaacaaattgaagccttgaaaaaagacaaagtagaactggctgcgcaaagggattcggccttgaaggaggttgaaggtactgccagctagcaatctggacgtctctcttttaaatgcagcagattcttatcataaatgtgttttgtagatcgtaaaatcaaatctcaagctcagtttgacgtcctggttagtaagatcaagaggcttgaaggagcaagagatgaagtcgccaatgtcgctataccactcgtccaagctatgttcctcaataacagtggtccgagtgcactcgacgcaaccgaaattttcgacaagctgagagttgctccggatgtatatttcaagaacatcaagaaagctggaagtatgggagctggcatggcattagcgatgaccaaatccttgtacccgaggattgaaattgacgccattgatggatatgcagacgggacaagcgaagaggctgctcttgataaaatcaacaatgctcaaaacgcggctgacaggattgcaagtgacgttgtagagcaattccgcaacaacgaccttcagccgagtaacaataactctgatgatgaaaggactgattctgactgagcataaatgtaccaaatgaaggctcaatttgtacaatactggtgtatttatgctgtgcttgataactctagccaagtctttgatttcttaaaagcttttatcaagctctgttgagcctaaaacccaaagaagctattaaaaactttcagtcctcgcaaactaagtagaaaaatcgaacaaggcaatgaaaaaccaagtaggcaaattgaattgataaaaaatcacactctattattatgatgatagcccccgactgacaacttcgaggagaaaacttgatgttgacagtcaagacagggaagtacaatgataagcctaagcgtagaaacgacgaagatgttcaatgttccaagagttgtcgacgagagtaccgtcttcgcgcttgagtcgataggaacctggccgggtgacttcagagatgataaatggcccctcccatagaggagataacttgtgccgatcccgtgtagtttgaattttccgcaaaaccagatcgccgactaaaaaggcgcgggatcgaacattgcgattatgataacgtcgcagcccttgtaagtatcgagccgactgaatcaaagccgcttcgcggacttcttccaatcggtgcaagtcatccactcggtcctcttcgtagcgttcttcacggaaatttcgaaagc

SEQ ID NO: 4878 - DNA, 8445 bp, Oryza sativa
tgttctcgacagattaatctaagcaaaacccaaaaacctaaagatggcggtgggtactgatatatagagtttagggtcgtgcaaacccctctcgacgccaccctaatgggttccaacactatacacgggccaaaggcccaaatacggtgacgcagcaccgggacagattctggatgtcaatttgttcggtcatttcccattgactcggaaagaatttagacgtgggaccaaaaccattggaaatgttatcttcttagctttccatccatataaagtatgccccaatccggacacgtatgcgacctgggcgcccgttttagtgcagactggtcctggactccgaattgcacccgacgtcgacttggtttgggcctccaccttgacttggacgtcccagatgatcctccatggctctaagtccttctccaagtgtctccttgtcccctccattgttcctaattacaacataatcattaggtagcaatctattctcgaattcatacaaagaagaacataggaacgagctcacctctaaatttaattgtcgcgcacgagctcttgttatcggtccttgaatgaccgttggaggattgttgtgtgtatccgaggtagtgatgtccgcatcagtaggtacacaggcccgagaataccgatctctttgacaaggtgacaaagcagatgcgtcattatattgaaaaacgaaggtggaaatgtcaactcaaagctgacaagacattgcaccacatcattttgaagggcttctaatctatccggatcgatgaccttctgcgaaattgcgttcatgaaagcacattgctttcttattgttgcccggacattgtctggaaggataccccgaattataactagtagcagttgtgtcatcaacacgtgacagtcatgagactttaggtttgtgaacttcttctcctttatgcttattattcgctttatattcgtggaggacgtccaagaattcccaatagggtaactcccaaaatatagagttctttttccacatcgtcgcgtgaccatctgcgctatcattaggttggctgccaggcccctttccaaacactactttaagatctttcaccatagcaaacattgttttctcactgcgatgtttaggcttcgtacagtggtccgccttatgttcaacgtgcttgcctttctttcgtacagggtggtttgcagcaaggaatcgacggtgacccatgtacacaaccttcctacagtgcttaagatacgtactttctatttcatccatacagtgagtgcaagtcttgtaccccttgttaaactgcctggataggttgctaagtgtaggccaatcgttgatggttacgaacagcagcgctcgtatgttaaactcctcctgtttgtcctcgtcccacacggggacaccttctttcttccacaacagtttcagatcttcgaccagtggtcttaggtacacatcgatgtcgttaccaggttgcttggggccttgaataataatcggcatcattatgtacttcctcttcatgcatagccaaggggggaggttgtagatacacgtcgtaacaggccaagtgctatggccgctgctcatctctccaaaaggattcatgcctgtcacgcccagaaattcactagtaatttctgaactaatttatgcatagaatcctcgtccaggaatcagccaaggtacacaaactgacaatttaatatacaaattcatcataataataacgttacatacttacaaaacaaaagaaaaacaacagcggaattacgatctagcgatggcttcagctccactaccacaggcagctcaattggggtataagccaaacgtcttctccttctggatcctttttcttcagctgaggttgattgattattgcaaggtgagcatatgacatactctgcaagccacatagcaaatatgcaagtgcacaaggataccaaaggatggcataaataggctcatttgcaaaagcagcatttagcaaacatttgagaattgaaaaacagtagagtaattaatcaatgttattcaacatgaacatcacacccatgctgctcaggcccaaccatcctgtacacaaggagctaagcaaattattaccagttatagcatcaataattatttgagaggtgtgacactaatcacgaaaaatattgctcaacccgcccatgaccgcgggcacggctattcaaatagttttgttctggccagaggtgtaccactgtatccacaagacacagctccacgatatgttaccatgcgcctcaataccaccacggtacctcggaaaagaactgtgacggtacccctcgcacaacacaactcatcatagtgcaccaatcctggatcataatcaccccctctataaatataaccagaggcatggactccccagcgacccccatggacttctcgccgcttctcggtctaatgtcctgcaatgaaccttgctatataaaaggtaaagccgttgcccacgctggcttgtggttggcacggttaatgtctcacaacagtagctcgcgaaccggtccttaattgtcatgagcacgagcttcaaaaccatatgctcacaacccaccattatcaagtttaaattatcataacacgattaaccatcgtgagctaccattaaatataatcataaataataatgtagtatgattcattccattaatgagctaatgtttctaaacatggctaagcaattatatatatagcatttagctgaaccaatccaatatataaggtccatgctaatcaatttattacccatagaaaaataaagtcatcttcgaccataattaattgggaaaggctcaccacccgatggcattcgaaaataatgcataagttgaaataaaacattagctttaaacaggttcaacatgctcaaagggttgtttgggatatgtgtgacttgccttacaataatcagtcttcaattaatcttctgaaccacttccgacgctctcacgaaccttcgcaatgacggaaatgacaagctaacacgcaaaacgaagaaaaagactaataaaaaccaaataaacagtacataaaaagtaaacgaacatgtagatcatgattttagatgaattatgagacttgaacggcctcattctgacttcatatgaattagttatgaattttacaagattaagtccaattaaacctattaaagaaaaaaaactattccaaattaattaaacaatttacaaataatttataactgagatataagactaaagcatcctccggaaattattggaatgaatttagtagacgacatatagtaaaaagaactaatatgccattgaaagggataacatgatttatattgattttggaaggctgagatcaactttgacctagttgaccaaaattggatggctcggattgatctgatctaaggttttagatggctgccacgtgggacaaaagagatgacgtggcacttaggtgccagggacggtagctgacaaggcgatgacatggcaaccacgcgggatcgacgtcggctgctctgttcggcggtgaggacggcaaacggcggcacaacggcggaaaccgagagcatggggaggatgaggatgacgcgacgatccttaccaacacttacgcagcgatgaacagcgaaggagatggccggcgacgagatcgggagtggcgatggggtactgatcaacgacggcgacggcgttctccttacagatgcaaatccaatggaggcaacggcgaccgaaggcgacgacggacgacgacgaacagcgcgactggagatcaaaccatggcaacaacccacaggttcacggcgacggcaaccttccggcgggattcggcctcgggtaaggggtggacggggtgtagcttgaccttgcggagccgagagaggtggcggcgtaggagggcgacggccgaggcgacgacaaacggcggctggagcgactgccggcggcggagaaagaagacgagcgtggggaggcggctagggttagggaaaacttcgggaaacagaagaggaggctgaggggatgctatttataggcaaaggtggaggagatcggctcgggaacggatgaattcggtgaaggaagttaggatttatcctgagtttccccggataaaaacgaccaaaattcgtgagatagataacgaatttgatgaggcatcttagggatatgatagaggagatagggaggaatccgtttttgcactcaatttggaagggaagcaacggatgcatcgaatttgatgcaggagacggcggctctcgggaagaacacggcctctagacggctggctggagctttaagacgcactgtatcgcgggggaggccaaacagactttaggctgggctgaggaacagggagaagggaggaaggaatggtcccaaaagggcccaagctgaggaggaggatttttattgcttttccaaataaatcaatcaccaaaatgatctttgaattgttaaaaatacttcccatgctcaaataatttcaagaaaaatcctgaaactaattggacacccaaagtacttaactatattataatcagaccatttacggattaatttattatttcaataattgctgaactgctctttgtattattaaaattaggaattgagctctgaaaaatccgagaaaatttcagagagtataattaaccatggagaatttaataaaattaaatccagccattctttatatttaggaaattttatttcccacatttaacttcacttgtaatttaatgagcatttaatataaattctaaataaacacaataaactcataccttgccttagcatctaacaaacggcggctcaaagatgtgatgttgtatccgtcgctgttcatcttctcttggttccctcataagcataataatgtcttgccccttgagcaaaatcggctttcttgattgcacgatttcaaaggcaagacgaacaccgcaccaacatccatagcatcatgtgaaggagacttatctctaatgaccgatgattcttctctcatcatattggatttatcactagtttgggaaatcaccgatctcttaccttttacttctataggtctccacactcgcttaggtgtcattcgaggctctaaattattacatgttttgttctccatatattcggcctccttttctttttgacctatggcccgaagacgctgtagcctcctcttttgagagcgagataagtcagaaggtatccatttcgactgtggttgttttccaggagctaagcaatgattcttcatatttttggtcaaagtggaagctcctgtgttgctctcaattttctcactcttctccaatgcccctcggtcaaaccggcctctgagctcggtcagaccggccacaagccgtcggtcagaccggccaggagggtcggttagaccggccgttgtctggcggttagactggccagctgttttggtcaggccgccgatgttgacagtaacggcgtcggcttcagtctcctccgcttgtatagttttcgccgcatctccagtaggtacatgaacatcttgagattcctcattgatagcaacgacctccggagctttggcttctttcctcacccacaccttcttcacctttgatccaccggaccgattcttttgtgggaaacgatcttgtcttgaattagatgaatgattctgtactgacctaggtgattccttccactcttgataatacggcataggtggttgatgcatccacggcatgtaatacataaaaggataaccaaacggtgacattggatatggataccatggcatcacaaccggtggtttatatggagttggtatagttgatggctccgattgctttgatgtttgaccaaatctcctcttacgagatgatcttggtctttttgaatcactagtttgattatcaaatcgttgaccggctaatcctttcttgtacttagccataagcatctcaaaagtgagcttcggctttttggtcctttggaaactagatgactcatcctttgcaactttatgatcttcggccttcgcattttttattctattcttgggccgaggatccccaataataacacttttccatttctttttgtcaacatcaatagaactaacagggagagaatcactaacaattccggtcttaggcatagaaataaccgaaatagtttcacaagtgaccgatgaatcatcaaccgatcttttctccatcaagcttgcatctttaaaataatcatgaaactcatgctccatttgtaaccatgtagaaattgaagtaggagcaaggaaactataccatgtagatgcaaagtttgacaaagaaaggggaaacaacttcaaattaagcaaatcatcactatcgcccttaccacattaataaataaagcggccgatatgctccattgtagtcatagcattctcacctttgaatttcgtgaagttgggcacctcaaatacttgcgggtatgggaccgaatctacatgttcaggatatggcctttgatatgtatgcatagctactttggattctatttcaccactattgtcacaccctaaaaatctccaaattataaattttcgtttaattggaattagtagaatttattttaaaagcctagaagagaagatctaattttaattaataaattccaatataaaatggggccagataaaattttattaaatactttgcttaattctataattcctagatttttccgggatttatttgagctaaggaagtatttttaataaatggaattgcatttaatgaataatttaaatggaaaaaggtttttaaaattcccttttggttttgggccgaaagtcggcccaaaccgctctctctctctccctcggcccaagttggcccaagccgaccgcccgcccgcgcgcgcgcgcgcgaccgccgctgacaggtggtgacccctttcctctcgccgaaaccctagccgagctgcgccaccgccgccattccaaatccagccacccctttccgtttccggtgaaattgattgaggggaaaggatccccatgatccactctaccttttcccttttggaaacatcgtctaaatcgctttggaaatcgccggatttgagttcgattcggatcgatctctctcctccaaaccctaaactttccttcccgtcgccggtcgccgtgggccttcgccgccgctccctagcccctataaattgacccccgagctcccctctacccgtcgccactctcgccttagcccgccgccgtctgtagcgccgcctccgcgtgagaccttgagccgccgtcgctgccgtcgctccagccgtgcgccgctgtcgctccggtcgtcgtcaccgctcgggaaggccgccgtcgtgatcgccgtctcgttgccgtctccatccgcaccttctccgtcaccgttgaccgccggaacgccgtcgccgtcgtcaagccgaaggttgctgccgccttttcctcgtcgccgacgtcgtccgttgctcgtccaccgtcgctttggtaaccggtgagttcgcagcgatgcccgcatcgtttcggagccctccgttcgcgccgccacgccgtcattcgccggcgagaatgcgtgcccgagccgccgccggtggtgacgtcgtcgctgacgtcatcgtcatcatccctcgtggtctagccgtggaccgatggatctcggccgtccattttggatggatcgatctcggccgtccgtttcgtgaaccgccgccgtgcacccggtcaaccgtaaacccgacccgctgatgcaataattcccttttccttttcaaaaataattaattattgcgtcataattcaattaaaatctacataaatgatttaaatcgatttaatctttgaaaattcataactaattcatcttagctcggatttagttggttcaagtctctaaatttttctaaaattgagatctacatgttaaaaatatccacatgtactgttcatgcgtgtttatgtgctgttttggtgattttgttcttttctctttagattccgacgttccgggagagtctgattttgcaggagaagactttgaggatttccaaggccagcaaggcaagtcacacagattcctaacaaccctttgagcatgttgatcctgtttaaagctattgtttctattcaactattgcatttattttcgaatgtcattgggtggaattaacctattatttgttatggcccttttgttcttgattactttattctttgataccttgggttaatgtaatttgactagttgagctttatatgatggttcagctagatgttaggcataattgcttagccatgcttagaaacattagcacactactgggataacttatgcttcactattatttaatgatggtttaataatagctcatgatggttaatcatgattggtttatcaattaatctgccaacta

SEQ ID NO: 4879 - DNA, 5711 bp, Oryza sativa
  unsure (1)..(5711): unsure at all n locations
ggcgtactaaaggnnngccctaangctcgcttnnngcnnngnngtnnnncaagggcntcgagcggtagttcgataccaataagattcattagccccgccccccacaaaaattttttaaaaaaaaacccccccccnccccccccccaaaattttcccccccccaaatttttttttccccccccccaaaaaaatttttaaaaaaaaaaatttaaaattggggggggccaaaccgggcccaaattgggttaattttttntaaaggatnnttattctttgaccaagaattagttttaatttacaaagatatttgatagaaaattagcatcatttcaacctgtttttcaatacgaatacaacaattctatgtatatattactagtcatcaacctgtgcacttgcatgggctagaaaaattacgtgacatcaattaactagcgtggaagctttattggtgcctccaattactagatataagattttttctttgtttctcaattctttcggtcaataacgagcatgtgtgttattcatagaaacggaggtaggtagtatttgtaagaagtacggtatcgaatttcaaaaaagttccgaccttgtgcgataatatacacacatattaacctacataggcaagctagccagacctagaaatataccatttctaaacctattcggtcacttactcacgttggggagcctaactaaactaacatggactcacatggcatgcaagccagccatggtactaactcggctactacgccatagtacgctacaaacacaactaagttatcgtatgaaggactactcaatagtacacttaaaacaatgttactcgttgccttttaccttcatttgacgggtacgacctaagtgtatctgaaaatcttctcttctgtccatcggcgaaagcgtgcaaatgtaaaattgcctggtacgcaggactagatatgaagagtttgttcagagattgtgcaataaacatgtacatccatcaactgtatacatgcataggatatatacatacaatggaggtagccatttgcaccatatccacaatatacaagtaggcagccattcacaccttatccataccaggacgatccatttgcaccttatccacatcatcacataatgcttctgcctataaatagcagcagcaccttacattcaagaatcacctctcaacacaaaactaagaaacatagcaagataaccagggaaggtagcatcagcaacaggaggcaatggagggaaagaggactaccacttcgatggtgatcatgtgcctggtcatcttgagcctcactgtcgactccgccaccgcggcacagtgcggctgctgcatatcctctcgggcaaaagcatgttgttttggttgtattgctgctggtggctccgactcagtctgcaagaacacttgttgtttcccatgtattctggccgattctggtaaattcactaatgtcactctatttaatgcatttcttatatgtagatacagactttgtagcatatcgtggactaatacatatgtacattgtcctcaatgtacattgttgatttcatttccaatctcacgacttcaggcatatatcttgcaacacgaagacatcttatgctctacttccactacaaaattgactaatgcgctaatgggattttcatattttaatttcacagttgttgctaagatggacgaaatgggagttcttgctaagatggacgaaatgggagttcttgctaagatggaaggacaagcctaaaacaacatgcttgcattgctaccagtcttaatgcctatcataagaatatgttgttttgcttcaagttatggccaagttatgttaatgttatcttcaataaattattgaccatatgggacgatctatagtggatccatctgttggtctcaactctatgtatgtcgtgcatgtgtgctctcacaagcatatttaatttctcttgctgcttttaataaggccatagcactgtccattgtgtcatccgatggtctctgaccttagcaatttattacgacatgattaatattatttgtgtatgcatgttctttacttaatttattcttagcggatttctgatgtttttgtgagttttagactatgggacataattaagattgtcatgccaaaaattattgcaaaacctagtaggaaagcaaaagaggcggggggggggaggaaacatggtcaatttctcggctgctatcacattcctcgttttcaaaggtttgggagacatatagccacactaaaggcagtaaacctgaggaatgacaaccttactcacaaggacaaatagtcgttaaaaaactatgacatcactaaccatatcttatttcagttcaccaaacatacatttaaatttaggcagtattacggagaactaaatgaacaaacaacaaaccatacttcattgtcaaaacaaattgccttctatgtacttcacaaattctcacaagatcatatttgcaatttttcctaaactaattaaccaagagcaaatatgcagtggagcattccacatataatttcacattataagtacataatacagtatggtataatacacatatgcatactagggcctacggcaaaagaggcaaagatcaatgtgcatgctaacttgtgtataatacacatatgcacagtactttgaaatacgcataccaggatatatgcattagttcacaccattcattcttgcattcttgcactttcaacaacaaccagatctaccaagcattcttgcacattaaaccacaagtagatctaccaatgaatcaccaacttaggtagcaatgggggtaatcggaggggaaaaccttacctcgtcagacgacggaaggacaggagacggcggaagattcaccggctgctcaccatggcgcgcggatccctgaggtgtgggcatcacatctatcagcaccaatgacatcggcgggggggggggggagggggaggactagggctctttcatagaccgatgtaaactagacttattggcttcgatttagggagaggaaggaaaagagatagactttacctggcatggctttgggcctgcacggagaggtatagtagttggcttggtttcagccaaaagatatgaagagaattttaaattattttttcaatttaaataatgaccgaaattatgttagtattattaaaattacttctttagctcggaaaatttcaagaaaatttaagagagcataattaattattgagaagttaataaaactattccaagtcatattttacaaggtaaaattttatttcacatatcaacttgtaacatacaaggaatttcaccatggaaaaattttgtggaaaatttaaaactttttgaattcaaaagtttttggtgaacatagaagcatactagagcatataactccctaaaataaaataaaacacatagtttttttggccaaatcaaaactaagtccaaaagaaaaagtttacaaatcttgtggtaaaaaattttaaaacaaaaattttgctttgaccataaactagaaacctaatcttctcggttttgcattttcaacctaactaaaaaaatatatttaagttaaatataaaacaaattgaaaggtcagtatcaaaatacgcaaacctaaattgagataaaaagaacttgcttgtatgtgcatattattcttttaagattgtttttggatattcttggtacatctcataataggttgcatatgcatgctttgtctaaagaaaattcctaaaaataaatgaggcaacaataaatcccaccaaaattctcataaatactaaacaataccctaagctcccagaaattttagttataataatttatcacatcaattggtaacccaaataaatccttgaactcagctaaaaaatctggaaacagcataccaattagcctactttgcaccttcaccaaaattaaaccataactcatcttgcaaaatctctaggtcagaatgttaaacatactttactctatcatctggtgcaatggcttagtctaattcgaaatgtaacctcataaaatgagagccataagttaggtaaacagtattctggactgtggtcaatagattaactagtcaactttactaaattaccatggcaaaagcaaaagtaattaaactttggaactaggcaccttgaacaatcaaatccttgtctaccttgctgtctccctgtcaccccccccccggccttaattctaaattaaatggatgagagaaagagagtaatatagtttagtgtgatagtgccaacacatggaaaatttagagcttctagttctctccttctacatctctcttaaatgtgggaccaagtccttatggggcccactcatcatacaaccatagccaacacatcatctgctcttctctcatttaaatcttcttttatttctcaaaaggtgagagaagggtttaaattgaatttccacccaaaatgccactctaccactccaagccttctaggaaacatctatatatgggcctatttgtcgtccaaatacctacaaacaaccttggtgaatcatctctttgatcctaaattatattttcaaagagagaaagaaagagagagagggaattaaagtccaatttacacccaaatttcaccatacctctcatcttctcataggaaacatctacatggggccactagacagccactcatgctaggttgagtgaagtacaagtgggatcatagcctcaattcactgccaactcctttaaatcgtttctacccctcatgttgacacctagctctcactttccaccttcactttcaccattcactactacaaccaagatttttgtgtgagggctaaaatgatttttgcgtgcgggtaaacggcccgcatgcacttaggggtctgggaaaatgacgatttttgcgtgcaggtgaagcaccaccacaggaaaacaaaaacccgaaaaaacataaattttctttaaaaatgaaatcctagaatctggtggtggcgccgccgctcttgcttgccgctgccgcctcctcgtcgtcatcatcatcgtcagtggcggcctccgcgccgctcgcctcggatccgtgctcccctccggccgcaccgccgccgacgcccctcccctccgccggatctagggagggaaggaagaggaggggaggggagatggatgccatgcggggggagggcggccggccgctggatccgtgcgtggacgaccgccaccgctggatttttgcgttgatggccgctgccgctggatccgtgcagggacggccgccgcccgccggatcccacgccctccaccgccacaacgtggaggaggccggcgcgtgcctatgcccaccgcggctgtcaccgcgcgccgccgccgctgccgccatcgggaggagaggagaggacagtggagagaggagaggacattggagagaggagaggagaagcgtgagagagagaggactgagagaagaagctctgcgtggaaattttaaagttgaaaatgggattgaggggaggggagaggagagaaagaggtgaaattttaaagtgtgtgagtgggaaaagagggagttagtatttttgcatgcggccctcttaataggtccgcacgggaaaatcggctcattttcacgtacggtccatctaagatgatgtnctacttgcngtaggagacggtccttatctggcgcgcg

SEQ ID NO: 4880 - DNA, 6158 bp, Oryza sativa
catgtgaatatttttaacatgtagatctcaattttagaaaaatttagcaacttgaaccacctgaaacggatctacggttatttagttatgatttttcgaagatttaatctattagaaaaacgggaaaaagaaaaagatgatgatgtcatgatgacatcatcaatggtggccggaccgagatggtgacctcgccggagattggatggtcggctgcgaacatggaggacatgtacacgtagaggacgacgagacgaacccaacggtactcaccctcgagccaaacgacgaacgacgacggccggcgacgagatgaacggcggcggcggctccggtcggtggtggcgagtaggctccggtggtcggtggctacgggggacgggcggccgggcttcccctcaccttggcacacctattggcggcggcggcaagcggcggcgacgacgaaggcggcggcgcggcgctaccggagttggccggcggcggtggcgagctaggcggcggtggcggcggagctacggagcacgggaaggcttgggagacggggaaaacgaaagaggaggactaggggatcctatttatagccttggattgaagagatcggactcctcccgcaagaaatcgatccgggaaatcaaaaactcggttttggagataaactcgagaacgagtttgattcggataaaatactcaacgattagctccaatttttgggggtaaagatagaggaggatgagaggatcaaaaccccttaaacaatcgacttcggggagcccggatttatttcggttttgcagggaaaagggggcggctcggcgggcatggctgggctcgcccagccgactgctagaggttagggaagggtccaacatgtggggcccacatgtcggtctcccgagtggagggggtggctggcgggttgggttgggccggctcggtggctttgggccggctcgggcgcgcgggagagagagaagttgggccggaatcggcccaacgacttagggaagggatttttgaactttttaattaaaataatttgtgaaatgttgttccaattattaaaaatacttcccttgctcaaataattcccagaaaattctagaaaatagaggaacaactaaagtatttaataaaattttatctagctcatttttatgttgaaaattttcctagattattagagtttaacttgtaggcttttagaataatttctaaaaatgatttaaaatatgcatttttaatttaggcgatttttagggcgtgacagcccctctgtcagaatagagatccaaggtgtacctttcctgtttaaccttattctgttagaatctaaagatcatgatgtcatcctagggatggactggttagccagatataaaggtgtgatagattgttccaatagaaaagtaactctcaccagcaatgatggtcaagttgtaactgttcatgcattgccctctgaacctcgaaggtcaagtctaaaccaaataactttggaagagattcctatagtccgggagtaccctgatgtgttccctgatgatttacctggtatgccgcctaaaagggatatagagttcagaatagatctggtgccaggaacaactctgatccataagcgaccatatagaatggcagccaatgaattggaagaagtcaagaggcaagtagatgatttgcttcagaaaggatacatcagaccgagttcatcaccatggggagctcctgttatctttgtagaaaagaaagaccatacccagaggatgtgtgtggactatcgcgcacttaacgatgtgactatcaagaataagtatccactgcctaggattgatgatttgtttgatcaacttaaaggtgccaccgttttctccaagatagatcttcgatcagggtatcaccagttaaggattaaggaggaagatatacctaagatagcttttactactcggtatgggctgtttgaatatacagttatgtcttttggacttaccaatgcccctgctttctttatgaacttgatgaacaaggtgttcatggaatacctggataagttcgtggttgtctttattgatgacattctcatatattcccgaactaaagaagagcatgaagaacatcttcgtcttgcattagagaagctgcgagaacatcagttgtatgccaagtttagcaaatgtgaattctggttgtctgaagtgaagttccttggtcacgtcatctcagcaggaggagttgtcgttgatcctagtaatgtggaatccgtaaccaactggaaacaaccgaagacagttacagagattcgcagtttcctaggtctcgcaggatattaccggaggttcatagagaatttttccaatattgccaagcccatgacacgactgcttcagaaggatgtgaagtacaagtggtcagaagaatgtgagcagagttttcaagagttgaaaagtcgcttaatatcaactcctattttgattttgcctgatccaaagaagggtttccaagtgtactgcgacgaatccaagcttgggctaggttgtgttctgatgcaagatgggaaggtggttgccaatgcatctcgtcagttacgtccgcatgagaagaactaccctacttatgatcttgagttagctgcagtggttcatgcgttgaagatttggcgtcactatcttttcgggactcgaacagaggtgtatacggatcacaaaagtttgaagtatatctttacccagccggatctgaacatgaggcagcggagatggttggaattgattaaggattatgacctgggaattcattatcacccgggaaaggctaatgtcgtagcagatgccgttagtaggaaaggctattgtaatgctatggaaggacgacagttgccattggaattgtgcaaggaatttgaaagattgaatctgggaattgtcagtagaggctttgttgcagctttagaagcgaagcctactctcattgagcaagtcagagaagctcaaatcaatgatcctgatatccatgagatcaaaaagaatatgagaagaggaaaagctattggatatttggaagatgagcaaggaactgtatggttgggtgagagaatctgtgttccagagaacaaagatttgaaagatgcaattctgaaggaagcccatgacactttatactccattcaccctggtagtactaagatgtaccaggatctcaaggaaagattttggtgggcaagtatgaagcgtgagatagcagagtatgtagctgtgtgtgatgtttgtcagcgattcaaggcagaacatcagaaacccgcaggtttgctgcaacctttgaagataccagaatggaagtgggaggaaatcggtatggatttcatcactggtctacccagaacgtcatcgggccatgactctatttgggtgatagtcgacagacttaccaaagtggctcatttcatcccggtaaggacaacatattccggaagtcgctaggcggaattgtatatggcaaggattgtgtgtttgtacagtgtgcctaagaaaatagtatccgatcgaggtagtcagtttacttcaaagttttggaagaaacttcaggaagagatgggttctaagctgaacttcagtaccgcttatcatccgcagacagacggacaaactgaaagggtaaatcagattttggaatacatgttgagagcttgtgctttagacttcggtggaagttgggataagaatctgccttacgcggaattctcgtacaacaacagttatcaagctagtcttcaaatggctccttatgaagcactgtatggtcggaagcgccgcactccgtttttgtgggatcaaacgggagaacgtcaggttttcgggactgatatcttaagggaagcagaagagaaggtaaagatcattcaagaaagattgcgtatagctcagtctcgtcataagagttatgccgacaatcgccgcagagatttaagttttgaggaaggagatcatgtgtaccttcgtgtcacgcctcttcgaggggttcatcgttttcacaccaaaggaaaattggcaccgcgttttgtgggaccttataagattgtcagtagaaggggtgaggttgcttatcagttggagttacctcaatccttggcaggtatccataatgtgttccatgtgttacagctgaaaaagtgtttaagggtacctactgaagaagctaatcttgaacagatagaagtccaagaggatctgacatatgttgagaaaccaatccgtatcttggagatagatgagagaagaaccaggaatcgagttatccatttttgcaaggtacaatggagtaatcactcagaggaagaatctacttgggagcgagaagatgaactaaagtcagctcatccgcatcttttcgccagttcttccgaatctcgaggacgagattctatttaaggggggtaggtttgtcacaccctgaaaatcccaaatatgtaaattgttgtttaattggaattattagaaataattttaaaagcctagaagagaagatctaattttaaataataaattccaatataaaagtgggccagataaaattttattaaatacttcacttgattctatagttactagatttttctgggatttatttgagccaaggaagtatttttaataaatggaattgcatttcggcccaatgccaaaatgaggatttttaaaactttttcaatttaaattaacgcgcgcgcgccctcgccgctgactggtggggccggcttcgtctacctcgcaccgccgccgcagccgaaccctagccgagccgcgccgccgtctccttccaaatttgatcgcgtctttccttctccggtcgaatcaatagaggggaaatgatctccgggacctcctctaccttttctcttttggaatcatcgtctaattttgattggaaagcgccggattcgatctcgagtcggattcctctctctctcccgaaccctaatgtttccatcgcagtcgccggccaccatgggcctccaccgccgcccctagcccctttataagaacccacgagacctcctctccctgccgccaccctcgccttagctcgccgccgcctgtagcgccgcctccgcgatcaaccgtgcgccgccgatgccgccgcgagttcagccaagcaccgccgtcgctctggtcgtcgtcgtcgctcgggcaggacaccgtcgggatcaccaggtcgtcgccgtcctcgtccacccctccgtcatcgccgaggatcgccggaagaccgttgtcgtcatcaagccgaccgtcgccgccgcttcttcctcgtcgccgtcgtcgtccggtcgctgtccgccgccgttcgtgcctcggtaaggatcgccgcatcgcccgcaacgtgtagatgccctctgtttgcgctgccgcgccgtcgttagccggcgagcatccgtgtccgagccgccgccggtgatgatgtcaccgctgacgtcagcgctgacgctagccgtggaccggcggtagatcgataagatctcagccgttcgttttcgtagaccgccgccgtgcacctggtccaccgtgaacccgagccgctgacgcaataatccctttttcttttcaaaaataattcattattgcgtcataattcaattaaaatctatataaatgatttaatccgatttaatctttgaaaattcataaataattcatcttagctcggatttagttggttcaagtctctaaatttttctaaaattgagatctacatgttaaaaatatccacatgtactgttcatgcttgtttatgtgctgttttggtgattttgctcttttctctttagattccgacgttcccggagagtccgaatttgcaggagaagactttgaagagttacaaagccagcaaggcaagtcacacagatcccaaacaaccctttaagcatgttgatcccgtttaaagctactgtttctataaaactattgcattcattttcgaatgtcattgggtggaaataacctattgcctcgttatagcccttttgctatcgattccctattctttgtcacttggtcaatacatttgatcagctagaacattatatggctttagctaaagcgaataggatgcttacccatgcttagagacactagctcatactaaggggatactcatgattgactatt

SEQ ID NO: 4881 - DNA, 10495 bp, Oryza sativa
  unsure (1)..(10495): unsure at all n locations
actgaagcaaaccaaaccatgtggtaaagccagtctaaggtatatcctcctccggatttgaagttggtgatatccggaagaagatctatcttggagaaagctgtagcaccttccagttgatcaaacaggtcatcaatcctaggtagaggatacttattcttgatagggacctcattcaatgctggataatccacacacattctttgggtatgatctttcttctccacgaagataactagtgctccccacggtgaattattgggtctgatatatcctttctgaagcaaatcatccacctgtctctttacctctgctaactcattagctgccattctgtatggtctcttatggatagggttggttccaggtactaagtctatccggaactctatgtctctcttaggtggcatacctggcaaatccccagggaacacatctggatagtctcgtactattgggatctcttgcaaagcaacttgatttaatgtcaaaccgtgagattttggggatgacacaaagaaagacactgtttgtccattgctacttgttaaagtcacattacggttagcacaatctataactcctatgtgacgggttagccagtccatccctaagataacatcaagatctttggattctagaaagataagtgaggatgggaaaggtatttcttctatttctatagtaacggaaggacagtactgcgttgaggatacttgattgcctggggtattaactagtaatggtctcccaagactaataacttccatcccatgattgcccgcaaaacttttagacaaaaaggaatgtgtagcaccggaatcacaaaacacagttgcgggtatagagttaataggaaacgtacccaaaaccacatcaggtgcattctgggtttctgcggctgcaacatgattaacacgagcctttggtgctggagcattggagttgttctgaacatgagcattcttcacacgccgaggcattggacacttatcagcataatgtcttggatcaccacaattgaagcacacccctggcttgcttccctgttccttcctgacaggatgattctgagttggagctgctacatgacgagtgaccatattacgattatcgttgctgggattaccagtgttgttgttgtagaactggcgttgagggcgagcaactaaagaggatcctccctgtgggtatggtgcagcttgaggtcccaaagcaatgcgtgcctctggctacaaccctgttgagccttgaaatgagcagccctacgctttttctgttccatcctattatacttgtcttcttggcgaatcgccttgtccaccaactgctggaaatcccggtaatccatagccatcaatgcataagacaactcatcattcagtccctctaaaaacatctcatgacgttcttcatcagtgcgaacatcttctggggcataacgagctaagcgattaaagtcatggaggtactctgtgacagaacgggatccctagttgagtgctctgaactctctcttcttaagggccacaacacttgatggtatgtgtgtcttcttgaaagcagcagtaaactcccgccaagtgataggctgtccctcggctctgtttagacaaaagtggtcacaccgctcagcagcaggaccatgcaactgatgtgaagcaaaggaaaccttctcctgctcggtgcactgaaacaaatccaacttcttttccatagcattcagccaatcacctgcctctactgggttagtggtgcttgagaaggtaggtggtctcacacgtagaaaatctgccaacttgttctgcggaggtggtggtggttgattcttgttatttgcctgctggttctgcgcttgctgcactaacagattaatcaactgggtttgctgggccaaaacttgggcaagtgtgggatctccttcattgtgaccatttccacttccagtgcgggtgttcaccatctgaagaaaagcatgggcaaaatgaaagaacgacagagagatacccttagaacggagaactttaattaattcaaattctatattgctcttaactgtgtatgattacatttaaattgaattaacactatctcaccagctaacttactctctgacaagcaaaacaactaaacttatgtagttacatcccaccaatgatgtaagcaacatgctaaacccacacacgcacaagcaatcttaagcaagcgaactaacacagcgaactacggcaacggtcaaactagacaacaactctcgccttgcgtcggaacgaagagatggatcttcctcctctggagtagctggctctctttcttctgggtcttcctcttcttcctcatcacttaagacatggatgacaggttcagcatgatcaggcacagcgtctcccaccacacgagtcttcgaagctaactggagacgaggtggtggacgggttctcttccttgcggtgaggcgaagcttgggtgctgacggtcgtgcttctcccttaagcccagctagtttcttctgcagacggtacaccttgctctccaacttacaaatcctgccacggttccagttttccctatcatgagctgctttctcccgctccacgcctactgcatccatggcgctaagcatatacacggcgtgcatcacaatggggctaccttcactttggggacagttgtaagttccatagtcttgaccatgaggcttgtgtgggtgatactggaaagctgatgactctaactcctcatcaaagcgatgacgtagctctccaatggccaccaaggttgcttcttgacaagcatggctgtactttcttcccccagcttcaaactttatcgacggaaggtcttcacgatcactagtcaacgtcacgcgaacacgacacttctcctcattggggtcatggggaatctggtgatactcaggggcaacctcgtaacctacttcaaatgccatcattctcagcaagcatatgacatactcaacaagccacacagcaataacgagcatatgacatactcaacaagccacacagcagatatgcaaatgcacaagataacaaaggatagcataatatgacatacccataaccgtgggcacggctattcgaatagttttactctgatcagagatgtaccactgtacccacaagacacaactccacatgtcaccatgcgcctcagtaccaccacggtaccttcgaaaggaactgtgacaatacctctaacacaacacaactcaccacagtgcaccgttcctggaacataatctccccatcataaccagaggcaatggactccccagcgacccccacggacttctcgccgcttcacaggctggcaccccgtaatgaatcatgctatacaaaaggtaaagccgttgcccacgctggcttgtggttggcacggtaaatgtttcacaacagtagctcgtgaaccggtccttaattgttataagcacgaccatcaaaaccatgtactcacaacccacctttaatcaggtttatgtatcaattaattatcataacacgattaactatcgtgagctaccactaaatataaccataagtaatatcgtaatatgattaaccccattgatgagctattcaatttattacccataggaaaataaagtcattgtcggccattaattaactgggaatggctcaccacccgacgacattcgaaaataatgcataagttgaaataaaacattagctttaaacgggttcaacatgctcaaagggttgtttcggatctgtgtgacttgccttgagcttcttcaaacacttctgaaccttcctcaacgtaaacgctctcctccggaacatcggaaactaaagcaaataaacaaaatcaacaaaacagtacaaaaacaagaataaacagtacatgtggatatttttaacatgtagatcttgattttagatgaatttagcaacttgaaccactcgaatccgagttacgatgatttagttatgaatttccagagtttaatcgattttcaactaataaaaaaactaataaaaatgatttatgacgtcatcgatgacatcatcgccgggcatggcacggctccacgcgaccaccggcgatagagagctcggttgggctatccgaggacacctacgcgaagaggacgacgacgcgaactcaccggtgcaagaaactacgacggacgacgacgtacggcgaccggcgacgaggaccaacagcggcacggcttggcttgacgacggcggcggcgttccagtggcttgcgacgacggcgaaggggcagccaaggtactcctccaccgtgcgaacccggcggcggcgacggacagcgacggaggtgacgctagcggcagcgcggcgtgactggagagtcgccagcgacggcggcggcttgagctacgcggcggcggcgctacgagcaacggcgagacacgggacttggggcaaatggaagaggacaactaggggatgctttatataggcttggattagagagatcggactccaaccgagaggaatcgagctgggaaaaactagggttagtttggagagataaactcaaaacgaattcgatttggtttattcgggcaaaattgatctccgaaactctaggggaaagggagaggataaggaggagatgatttcccctcaagcagttggactcgcggacaaccggttgaggaggaatcggaggagaggcggcggcgctcgggctcggctcggctcggcccagccggaggtacgggatgaccccgacatgtgggcccccatgtcgatgactagaggagacgaggggcggctcggcttggattggcctggcgtgggccgcacggccacgtgcgagggagagggatgttgggccggaaatggccaaacggccaaggggaggattctaaagactttttcaattaaaataattcgtgaaatgatgtttcgtttattaaaaatacttcccttgctcaaaaaattcccagaaaaatctagaaaatagataaacaagcaaagtatttaataaagttttatctagctcaattttatgttgaaatttttcctagattataggagtttagcttgtaggtttttaaattaatttctaaaaatgcattaaaaactgatttattaaattaggcgattttcagggcgtgacattgatatagtttaaacatgtaggttaccgaatctttaattttgggacccgacaaggtgtgtgggtgggggcccctgcgatttgggagcctagagcggctgtaccgctcccccctcccaagcttgccctgaatacatgggccttgaaaggccacatggaatcttatgacgatttctgggcttgatggcgacgaaaatggacgtcatagactctatgacgacagaaggattgtcactagattagtaacaaaaagataagctttctttatagaatgccattagagacgcatgataggtaacgaatgatattcgtcacaagaatgtcacagagttcacaacatagtgaatgatctatatatgggcctatttgtcgtccaaatacctacaaacaaccttggtgaatcatctctttgatcctaaattatattttcaaagagacaaagaaagagagagagggagttaaagtccaatttacacccaaacttcaccatacctctcatcttctcctaggaaacatctacatggggccactagacagccactcatacttggttgagcgaagtacaagtgggatcacagcctcaaaccactgccaactcctttaaatcgtttctacccatcatgttgacaactagctctcactttccacctttactttcaccattcactactacaaccaagatttttgtgtgagggctaaaacgatttttgcgtgcgggtaggcagcccgcacgcacctaggggtctgggaacatgacgatttttgcgtgcgggtggcgcaacccacgggaagacaaaaatccgaaaaaacttaatttttttttaaaaaaaacgaaaccctagaatccggctataggctttcacccgccgcccgccggccatagtgccgcctgcctcccgccggcctccgcgccaaccgccgtcagatccgcactcccctccggccgcacagccgccgacgcccctcccctccgccggatctagggacgaaaggaagaggacgggaggggagctgtatcccgtgcggggagagggcggccggccgccggatccgtgcgtgtacggccgccaccgctggattcttgcgttgacggccaccgctgctggatctgtgtagggacggccgccgcccgctagatcccacgccctccaccgccgtcacgtggaggaggccgctactcccaccgccgccgcaccgctgctgtcaccgcgcgctgacgccgctgccgccgtcgggaggagaggaggggagagtggagagagtggagaggagatgcaagagagagagaggactgaggagaagctctacgtggaaattttaaagtggaaaaagggatagaggggaggggagaggagagaaagaggaaaattttaaagctggtgagaggggaaagagggagttagtatttttgcatgcggctctctcaataggtccgcacgggaagatcggctcattttcgcatacagtccatttaagaggaccgcacggaaaaatcgatttttccatgccatcctcttaattgaaccgcacgtgaaaatgagccgattttcctagaagcaacgagttaccgcccctacggaatataaaagggtccctgtccaggaaaatcgtttctatattagtgattcgagaagttccttctctacctgatcgatccattttctttgtttccgttttggcatagattgaatacttggtggtgcactcgtcggcgtttcgagtgtccagagcaccgccatcgccccacatcgtcgttccaatcgactcaaaccatctccggccgaatcattgagccaccgacgtcgccaaggtcctagcagaaagacacccaaatatgatcatgccaatacgccgccgcaaacgccgtcggtcgccattgcccttttgttgcctctgcttctccagccattgagtcaccataagtgggcccgggtgtttagccactacattaggcgctaaggactttaattagtagaaatttaaattttgtaaggtttattttttaaaattgctttgtatgccatgtgggcatatggttctaaacgcaattcacctaatacccagtgacctttttgtatatggtttagggtaagccctaatccctactcagaaattactatttcatggatttattacttgatataatagcttgatgagtatattgtactcacccttgctttaaccccctctttcagaatcaatttggagtttttgccgaagccaggagtttaatcatataaattggtttcattccaacttagttcccaagtatagattagatatatggtttaattctatagcaaaacattagagttggctcatcctatagcttctacggtaatagttagccacaatcttgtaaataccctattattttatgtaaagaaatctccattggagccttaatcaaatgtatgcgatgaagattcagattgttgaacatgtatcaatctactaatccaggggttcatatagtttaaacatttaggttaccgaatctttaattttgggacccgacaagctgtgtgggtgggggcccctgcgatttggccagcctagtgcggctgtaccgctcccccccccctaagctggccctgactacaagggccataaaaggccacatggcatcttatgatgatttctgggcttaatggcgacgaaaatggacgtcatagactctatgacgacagaaggatcgtcactagattagtaacaaaaagataagctttctttatagaatgccattagtgacgcataataggtaacgaatgatattcgtcacacgaatatcacagatttcacaacatgacttgaaattcaatttttataacgtaaataagcgtcacctataataagatctcttgtagtgatggcttgtttggctattagagagacagtttgagacatacaacacacagagctaattgatcggcgatccacttgggtttctggtgatcatatgcaacatggactaagttacttggatttgttcaaatgatctgcttcttggatgctgtccggccacgtcgccatgcatgcgaattttgtggatggagccaaaagctgcatgcacggagctgagtaggagacgacgtagacagatctgcacatcgtggaccatgctgcttgatgtggtcggatgtaggtgcagtaggaataatccttttcataatagtgaaactaaagaatttcacttgccaactagtttttttagagtctgtacagaaatgaaactttttgaaaagtgctccagatgaccaagttcaattcaccaaccgtaatcgcgtgttggatttacatgaaaaatacgagacagacaaaaatgatatctttcggttctaaattaatactcccggccatttgagagtgtaggatggtaaagggcctttcccaccccaaaagctagccattgaggtgaggggctcccccacttatatcttaggtcctttgcccttccacaaccaatgtgggactattcaacaatctcccccttcacacattggtgtctctcagcccttcaccgccccttcaccgtatccgggcccccaccggcccacggtccatcaggtatacgggtcccgcaggcacccacggtctatcaggccttcacacacgtgtccatcgggccagagaagttaacctagcctggctctgataccaattataggatcgtaaagggcatttcccaccccaaaagctagccattgaggtgaggggctcccccacttatatcttaggtcctttgcccttccacaaccaatgtgggactattcaacagagaggagcaatatgtacatatgcatgcatcacatctcagtgttttttttcttttttttccttggagttttaagaatgctcataattagggcatgcaagttgatccattagtatattcgcaatatttgatgatttttttcattttaaaaattgttgacgatattagcttaattttggtatggaaaatatcggttaatttattcccaatttttatctcaagcgagaaaatgaaccatgagagttgaggtgctaattaaccacaggcaaatattcattttaatttgttgtgtatatatatatatatatatacacgagcatacatgtgaagatggaaatatgtgaaaaatataatggtgctagtagatttgtctaaaacacttccacaatacaatgatcatgacactcgatcaggtctcaaagttaaattttagggattgtgtcaatatcaaaattatcaatgaataattggccagagggccgggattagcaagggtctactactgtcctgccatttcattaattaattagattaagtccccgattccttgcatccctaattggcctacgagaatcgacaaaaatcgcaagatgagaggattgtggtaggtaatcttctccaactgtgcctctcaatcggccataacatattagctagaaggataaacaaacatcaatctgccttcacagttttgatcatctcatgagacacatatatataaaccacccataagcaagagtctccaaggtgaattaattaactatgttgatacacatatacttaattggtataagagcattagtagtggtagttaattagtataaaagcatccatcaaaaggagactgttagctagctaggagaccgggcaagcaaagcaaagcattgatcttgatgaatcctccagagagattaattgcatattgtccagttccccctgacctattatacacatgcaagtgctctatgtacttgtgcggtgcaacgacgagcaagagtgcgtacgtttatagtagaactgagggggtgcgccttatatacgccggacgaggaagagtgcgtacgtttgtagtgatgtctccaattttagtttctgtcatagtgaaatattcgacgtttgacacctcgaaccatagaaaaactggagctgtgaaatgttttcttcttttttatgcgtggagcactgaaatattgacagttttgtttttttctataaaaaaagaagaagagttgacgacttgatgggcaggctctcctcgatggagggagatgagcttaaaaagtcgcaataaatggaccgatgtagtggaaatgtggagtggagtggagcagtaataaaatttaaaacgccacgcgtagggcatatcgaccacgactggactctccttgagatcttcgaacagtgtgtgcttgctagctgaactgcagcagtggaacagtaataaaatttaaaacggatgtgcagtgttcacagaggatgagtgtgctatgtgttctctgcttgtgaatagatatggcgatctctgcatgtgaatagtgatgancttcttgcagtagcnagacaatgcacntcaaatggcgcag

SEQ ID NO: 4882 - DNA, 7812 bp, Oryza sativa
ttgcctgtggagtggagtcgccccgctgcagaagtcaagcttccgagtctagctcgttttttcttttccgctgcatttgtaatcttttatatttttgtaagacgtggatctgtatgtcaacaactgtcgtttgtgtaccctggctggtcctagacagggatttaatgcacattcagcttaaaaattctggttcgtgaatttctgggcgtgacacgtaacgatagatgacagtgggatgacaacggttgaccttaacaaggttcgatactcggacgaaccttttgtccttgccaatgatgtaacgcaagttttttatgtgaaggacatatctagcaaaggaaagaagggcaaagggcctgatgagccgaagtgccacatggttctcccaggcaaaagaaaaatcatcggagttgaggacaagactgacgaggattatgatcagtgttatgggcaaccccctttcacggtgacggttgaccctatcatcctcctatcaaacgaagacaccccttactcacgtagcgatcacaaggaaggaacaattgtgaggcggaagtacgtgcggtcaaccgtcatcgccgatatactgccataattgttgtgtacacgatgtaaaatattttagatgtattgaatatccatataaatcaattgttgtatggcatatgttaattatgtatgattattagaatttttaaaattttaaatcatgcatatgctacttatatatgataattagaatttttaaaagttttaaatcatgcatatgcttattatatatgattattagaatttttaacaattttaaatcattcatgtggtatttacatatgattattagaatttttaacaattttaaatcatgcatgtggtatttacatatgattattagaatttttaacaattttaaattatgcatatgctagttatatatgattattagaatttttaacaattttaaatcatgcatgtggtatttacatatgataattagaatttttaacaattttaaatcatgcatatgctaattagatatgattattagaatttttaacaattttaaatcatgcatatgcttatccacttaatatatttttaaggttttgtcattaattttgtgacgtgaaatcattatttactattttagaaacccatacataatgaaattaaatatgtagtgctattatctttagtccaggttcttaaccctaaccgggttaaaaaagatttggcaatcgcgggaaaaaatcaactaggactaaagatccgatatgctcgaggcgcacttgtcttctccaccagcacttagaagtttttctccgatctcggcttctccttcaccgccactgcctagggcatcccacgcgccgacgccactgtcgtctctcaccgtcgtctcgctgtcgtcgtcgtcgccgccgccgccttctcgatctctctctctccaaaccgccgccgcctcgtcgtcgtcgtcgttgcgacaccgccgtgccacgccgatgccgaccccgactccgcctcccgccgatgccaaccccgacgtcgacccggccggcactgtcgacgacgtacgccaaccccgtcgacgccgaccccgcgatgcgccgtcactgccaacaacgccgccgccactgccgcgccttgccatgccgccgcccccgctgcggcacgccaccgccgctccttttcggtgccgccccatcaatgccgaatgggaacgaacgcgaacggaagtgaacggacgtgaacgaatgcgaacgaacgcgaacgaacgtgaacgaaacgtgtgaacgaacgcgaacgagacgtgtacgaacgagaaaattaaacgattattagacttagcatatatgattatatacttgaaaacgtgaacgaaaaatatatgttcctttgcatttcggctaatacattttttttgcatgttgcagaaaatatgtcgtcgtcgtccctcaagccgaagtggtagctagccctcggaggaatttgcgcaggcaagtgatgtaaagatatgattatctagagttaccacatatgattattagacatagcatatattaattattagagttttaatataagattattagagttttaatatacgaaacttagactgaacatatatgattattagagttctaatatatgattattagagtatcaatatatgattattagacttagcatatatgattattagacttatcatatatgattattagagttttaatataagattattagagttttaatatacgaaacatagacttagcatatatgattatttgatttctaatatatgattattaaagtattaatatatggctattaaagtattaatatatgcctattaaagtattaatatatgaaaatgcccccaagaagaagtaccatcaccacctgggtcaggcggctatagcgtcgcagtgccaaagtggaggagatggaagcaagcttgattgagaggggtatcgaaccggtcaccgctaaatggccggatcgatcgaagttctggtactatgctcacggtggaacgcttaaccccgttgttgtcttccgtgaattagattaagtgcagggatccgtttacaattgtagaaacacactgacatatgggcctaggactgcgggttgattcctagaaacctcaagggcctttgtgcatattggtccctcacagccacgtggacccatcctttaaaatctgaagaaaaattaggaaaatgcccaaacaattatatgtttagcagaaaaatgcacaaagttgtaaaatctatataaaatcaaatatagctcattttgaagtgattctagttgctgtagattcttgaagttatgaactttattccaggaatataaaacttgacactcactgtacaaataatgtctctaaaatttatctaagataggtcatacataaaacatgtacaaacttataaaatacatagaaaattcatcacaactcattttgaaacaaaatcaaattctacagattcatcatcatacagtctctgattaggtgaaataaaagtaattacttactttgcatcaaatgcctctaaaactattatctctataatgattagttttagataagctaaactttagaaattcatgtagaacccaatttagcttcaatttgagtaaacttaagttctgtaggatcactaaacatgtatttctaagttatgaaataagattatatacttactgtgtagtaaaagtctctaaatattcatataaggatttactaacatagagcagcctttaatttgtaaaacttgtagaaaatttatttttagtccaaatgaaatgaacaaagtttctatagaaccagcaaatagttatcttcaacatggtaaaataaaatttggaaccttttgtagagaacatagatcgaaaccttaacttagtgaaataagaatttaaacacatagttgtttaagtaatacataaacatgtataagtatatatatacactttaggtctaattaaacctaaataaaaacttgattgaccagtgaagccatagttccatcctcatccactaaaacttagaagaacttggctcatataacaatttctaggttaatataatatattgctagtttagattagagcatctctagtttataaaatatgaaccatactagtaaagaccataaacatgtgaactaaaaatgttttagataaccaaattattccttttattcaacttaaacaggaagtagcatgttctgaacctataactcaaaagtcatgaacatataaaacactatacaccaataacacgttataacttgtaaaatgcataaagaattcattataaatccaaaaattgtgaaaccaaatgtgttagtattagaaaacacatctccacacccctgtgaagtctaatctagtaaaaatcactttacaaaagtatttcataacactacctaagactatactactataaaccgataaaacttctaaaaagttcataactccctaatggaataagttaaaataaaaattctttcacctaaattcattttagatcagtaccaacccactgtgcataaatcatgcattttagagcattttggattttcagctctttcggtgtttaattgcatatcgtgtccttttatctagataattgcataatcggtgaaggagtggattaggtgctaacaattctctgatcaaggcaagttttctcctcccatcctttgaacacattgaatcccatgatttgaggaatgaaaatatttgtttgcaaagttgcatgtgaacttagattatatcggtatttgaaattgggttaaggtagttatgacctatttgctgcataccccaccttgaataattgatcctcttgctgtttgaacccctagaaatggttagagtacactctttgtgctcaaatgggtttatatatgctctatgtgcaactactttgcttagccatgcttagaaatatgcaaatgctcattccatttataattaaaatgtggttttgatacttgaaccttcgctagaataaaatgaatatgatgggtatttgcgaactaaaatgtgtaaaatgtgattttacacttgggcagcaagtggtgtgcatacagtgttagttgcataccgatagggggagtgtttgcccaagtccataaggaccgaacttgtgtcacccatttaaagttattcgtacatccatatgtgctagtatgggatggcctaagctgattaatctatttaggactagccttgcattctggtaggccggtgtgtatgagttcgtataattcagaggagcttcctatttaccccgacgtggtagtttaggtgactaagcgtgtccaatacaacggtattgtgccacgtggtgggttcccgtcgtgtccgccaccacggtgttaagtttaaggcgtgggcccgccacttaacggttctaggtatattccaagtatgcctaggatggaggaacacgtatcgtgctggtgcaaggctagattctaagtagtgtaaaggcttcgttatgacctctagatcacattcaacatgaagagtgtgatggagtcttgcaaactcaaaacaaactagagagttcatatcatgtgggtaaagctgtacaaactctgcagagttctttaaactaatcgattagccgtgctcacggtcatgagcgctttggtgatgtgtcatgagtatagactatgttttaaaaatgtgatcatgtgacattggtttgaaattgataaatgtgttgagttgtgtgtgtggtgatacattatgacttattgttaaatatggcaataagagattgattatgatggaattatgaagaagttaataatgaaactcaaaacttgtctttgttaattgaagcatcaactcttttacaaaagaattgcgaaacaaaacttgctttatgctgaaaatgaactacatattgtcttcctttgatatatgccttacatgtagtatagtaggattgacttgtgcttgccagtacattaacttgtttaatgtactgactcttgctgttgatataaccttttgtttgcaggtttagtcttagtctttgagtgatgcgggttccgattgcttcttctaggatgagaacttaatggggtaaacccctagtcggtgtgcttgtgattgggtagtcaagcttccgctgttctctaataagtctatttggccggttggcctatgtaattattaagttgttgtaagtcttaagtttctttcatcttagttgtgtttgctatgtgtaatcatgcttaagatgaaagtgtgaatctagtgcacatcctgggaactagattcacatgagtatgagttaggaatatttgagaggttgtagatctttagctatttttatcaagtctcctgaatgtgtaacacatctggtcgccgccttcgagtggtttgacgggcacatctcaggctgaagttgactggcaggctaagggctcagcaatgtctccaatattcctctctcgaggcgtcggatgtttcattatgcttgtttgatgacttgaattattcacttcatctcaaatataatggaaggtccggagagcctacgacacttagtcttgggagacaaatagccacactaaaggcaatacagccgaggaatggcaaccttactcacaaggacaaatagtcattaaaaaattatgacagcactaaccatatctaatttcagttcaccaaacttacatttaaatttaggcagtattacggagatctaaatcaacaaacaacaaaccatacttcattgtcaaaacaaatggccttctatgtactttacaaattctcacaagatcatatttgcaatttttcctaaactaattaaccaagagaaaatatgtagtggaggattccacatataatttcacagcataagtacataatacaatatggtataatacacatatgcacagtactttgaaatatgcataccagaacatatgctttagttcactccattcattcttgcattcttgcacattcaacatcaatcagatctaccaagcattcttgtacattcaaccacaagcagatctaccaatgaatcactaacttatgtagcaatgggggaaatcggaggagaattaaaaccattcctcgtcagacgacggaaggacaggaggcggcggaagattcaccggctgcacaccacggcacgcgaatccctgaggtgtgggcatcgcatctatcagcaccaacgacatcggcagaggcaggggtggactggggctctttcgtagaccgatgtaaactagacttgttggcttcgttttagggaggggacggaaaagagataaactttacccggctggcctttgggcctgcgtggagagggataggagtttgcttggtttcagccaaaagataggaagaggattttaaataggttgcatatgcatgctttgtctaaagaaaattcctaaaaataaatgaagcaacaataaatcccaccaaaattctcataaatactaaacaacaccctaagcttccagcaattttagtttgaatttatcacatcaattgataacccaaataaatctttcaacacagctaaaaatctggaaacagcataccaattagcctagtttgcaccttcaccaaaattaaaccataactcctctagcaaaatctcaaggtcagaatgttaaacatactttatcatctggtgcaatggcttagtctaattcgaaatgtaaccacatgaaatgagagccataaattacgtaaactttggaacttggcaccttgaaccatcaaatccttgtctaccttgccgtctcccccctaattctaaattaaatgtatgagagaaagagagtaatatagtttagtgtgatagtgccaacacatggaaaatttagagcttctagttctctccttctacatctctcttaaatgtgggaccaagtccttgtggggcccactcatcatacaaccatagccaacacatcatctgctcttctctcatttaaatcttcttttatttctcaaaaggtgagagaagggtttaaattgaatttccacccaaaatgccactctaccactccaagccttctaggaaacatctatatatgggcctatttgtcgtccaaatacctacaaacaaccttggtgaatcatctctttgatcctaaattatattttcaaagagagaaagaaagagagagagggaattaaagtccaatttacacccaaacttcaccatacctctcatcttctcataggaaacatctacatggggccactagacagccactcatgctaggttgagtgaagtacaagtgggatcat

SEQ ID NO: 4883 - DNA, 5643 bp, Oryza sativa
atagtagtgattcatgaagttccttctctacttgatcgatccattttctttgtttcttttttggcatagatcgaacacttggtggtgcgctcgtcggcgttcccggtgtccagagcgccaccatcgtcccactttgtcattcccgtcaacttgaatcatctccggctgtaccattgcgccactgacatcgcctaggtcccagcagaacgacgcccacatatgatgaagccaatacgccgccacgaacgctgttggtcgccgttgctctcctgctgcctctgcttctcttgccgccgagtcactgacatgtgggcccggctgtttagccacttcattaggtgctaaggactttaattagtagaaatttaaatcttgtaaggttctttttgtaaaattgctttgtttgccatgtgggtttatggacctaaatgcaattcacctaatgcccagggacctttttgtatagggtttagggcttaccctaaaacatgaaattactatttcatgcactcattacttgagattttgccgaagccaggagtttaatcatataaattagtttcattccaacttagttcccaactctagattagatagatggtttaattctatagcaaaacattagagttggctcatcctatagcttctatagtaatagttagccacaatcttgtaaatacccaattattttatgtaaagaaatttccattggagccttaatcaaatgtatgcgatgaagattcagattgttgaacctgtatcaatctactgatccaggggttgattgtcacgcccggaatttctatccaaaattccaaacgcttacatgtgcgttaaaccctcatccaggaatcagccgaggcacacaataacaaatgataatagagtactatcaaatatctaattaatgtgtgcaaaataaattattacagaggtggatagttcctctcaaagaataaagttctacgcagcggaaaaaaaacaaaagactaaacatctttggcgactccactccacaagcaactcgacccgaacaaagcctaatcctcctgatcatcaccttcattgaagcactcctcctctgaagaatgaaaattgcaagaatgagcatatgatatactcaacaagccacacagcaaatatgcaaatgcacaggataacaaaggatggcataattaagctcattcgcataaacagcatttaataaacatttgagagaatagtaaaacagttaagtaattaagcaatattaaataaacactatacaacacacccatgttgcataggcccaaccttatctgaacaaccaacccctaggtgtacaaatcaaacctccaaactaggaaatataccattccaaaccaggagtcaatttagttatcacagtattttcattaatactgagtaatatgagactaatcacgaaaaatattgttagacccacccataaccgctggcatggctattcgaatagttttactctgatcagagatgtaccactgtacccacaagacacaactctacaacatgacacaactccacaagacacaactccacaacatgtcacaacatgtcaccacaaaaaggaatgtgtagcaccggaatcaaaaagcacagttgcgggtatagagttagtaggaaacgtacccaaaaccacatcaggtgtattctgggcttctgcggctgcaacatgattaacacgagccttcggtgctggagcattggagttgttctgaacaggagcattcttcacacgccgaggcttgggacacttatcagcataatgtcctggatcaccacaattgaagcacacccctggcttgcttccctgttccttcctgacaggatgattctgagttggagctgctacaggacgagtgaccatattacgattatcgttgctgcgattaccagtgttgttgttgtagaactggcgttgagggcgagcaactgaagaggatcctccctgtgggtatggtgcagcttgaggtcccaaagcaatgtgcggcctctggctactaccctgttgtgccttgaaatgagcagccctacgctttttctgttccatcctattatacttgtcttcttggcgaatcgccttgtccatcaactgctggaaatcccagtaatccatagccatcaatgcataagacaactcatcattcaatccctctaaaaacttctcctgatgttcttcatcagtgcgacatcttctggggcataacgagctaagcaattaaagtcatggaggtactctgtgacagaacgggatccctggttgagtgctctgaactctctcttcttaagggccacaacacctgatggtatgtgtgtcttcttgaaagcagcagcaaactcccgccaagtgataggctgtccctcggctctgtttagacgaaactggtcccaccacttagcagcaggaccatgcaactgatgtgaagcaaaggaaaccttctcctgctcagtgcactgaatcaaatctaacttcttttccacagcatgcagccaatcacctgcctctactaggttagtggtgcttgagaaggtaggtggtctcacacgtagaaaatctgccaacttgttctacggaggtggtggttgattgttgttatttgcctgttggttctgcgcttgctgcactaacagattaatcaactcggtttgctgggccaaaacttgggcaagtgtgggatctccttcattgtgaccatttccacttccacttccacttccagtgcgggtgttcaccatctgaagaaaagcatgggcaaaaggaaagaacgacagagagatacccttagaacggagaactttaattaatttaaattctatattgctcttaactgtgtatgattacatttaaattgaattaacactatctcaccagctaacttactctctgacaagcaaaagaactaaactcatgtagttacatcccaccattgatgtaagcaacatgctaaacccacacacggacaagcaatcttaagctagcaaagtaacacagcgaactacagcaacggtctaactagacaactactctcgccttgcgtcagaatgaagagatggatcttcctcctctggagtagctggctctctttcttctaggtcttcctcttcttcctcatcacttaagacatggatgacaggtttagcatgatcaggcacagcgtctcccaccacaccagtcttcgaagctaactggagacgaggtggtggacgggttctcttccttgcggtgaggcgtagcttgggtgctggcggtggtgcttctcccttaagctcagctagttccttctgcagacggtacaccttgctctccaacttacaaatcctgccacggttccagttttccctatcatgagctgctttctcccgctccacgcctactgcatccatggcgctaagcatatacacggcgtgcatcacagtggcactaccttcaccttcgggacagttgtaagttccatagtcttgaccatgaggcttgtgtgggtgatactggaaagctgatgactctaactcctcatcaaagcgatgacgtagctctccaatggccaccaaggctgcttcctgacaagcatggctgtactttcttcccccagcttcaaactttatcgacggaaggtcttcacgatcactagtcaacgtcacgcgaacacgacacttctcctcattggggtcatagggaatctggcaatactcgggggcaacctcgtaacctacttcaaatgccatcattctcagctccctgacgaatcctagcacctcgatcaagtttttcggcggatggggcggcatataaaggaacattgaaaggaaggaattaatgcatatttttaagttagctgcacaaactagacttaattaaattggacccaaagaaaaagaaaataaaagaaaaggagcaaacatgactcaatttttttttctttttggaacataaatcaaccttgaacagagacaaataacttttgacaaatgaataaattaaaactaaaatatttaggatctaccaggagcacggtacagagtcaccattaacagggatgagtagtactgatgccatcttgattgaatcgataccataatagatgtacagtgccgactaaccaatgaaattcagaaaattatactatttaataccctaaacagtaaagttctttttctttcaaaataaaagaacaaatttctgttttgctaaattagaatttaataaattttgtacataaccttgcatgtggtgccaacttaattaatttataagagaatagagaagagcagttctattttccaaaataatttgaaggaaacttaaggtttaccatttggcttgtcctaaggtcaaggtggctctgataccaacttgtcacgcccggaatttctatccaaaattccaaacgcttacatgtgcgtcaaaccctcgtccaggaatcatccgaggcacacaataacaaattgataatagagtactatcaaataattaattaatatgcgcaaaataaattattacagaggtggatagttcctctcaaagaataaagttctacgcagcggaaaaaaaacaaaagactaaacatctttggcgactccactccacaagcaactcgacccgaacaaagcctaatcctcctgatcatcaccttcactgaagcactcctcctctgaagaatgaaaaatggcagaatgagcatatgatatactcgacaagccacacagcaaatatgcaaatgcacagaataacaaaggatggcataattaagctcattggcataaaaagcatttaataaacatttgaaagagaatagtaaaacagttatgtaattaagcaatattaaataaacactatacaacacacccatgttgcataggcccaaccttaatttgaccaaccaacccctaggtgtacaaatcaaacctccaaactaggaaatataccattccaaaccaagagtcaatttagttatcacagtattttcattaatactgagtaatgtgagactaatcacgaaaaacattgttagacccacccataaccgcgggcacggctattcgaatagttttactctgatcagatatgtaccactgtacccacaagacacaactccacaacatgtcagcatgcgcctcagtaccaccacggtaccttggaaaggaactatgacaatacctctcacacaacacaactcaccacattgcaccgttcctgatcataatctccccctcataaccaggggcaatggactccctcgcgacccccacggacttctcgccgcttcacagtctggcaccccgtaatgaatcatgctatacaaaaggtaaagccgttgcccacgctggcttgtggttggcacggtaaatgtttcacaacagtagctcgtgaaacggtccttaattgttatgagcacgaccatcaaaaccatgtactcacaacccactttaatcaggtttatgtatcaattaattatcataacacgattaaccatcgtgagctaccactaaatataaccataagtaatatccttatatgattaaccccattaatgagctaatgtttctaagcatggctaagcaattatacctatatagcacctagctaaaccaaaccaatatataaggtccaagctattcaatttatta

SEQ ID NO: 4884 - DNA, 4552 bp, Oryza sativa
tattgttctttaattaattcaaggccaaaaatccgacaatcaagttgggacaagaaagtatagcgcctagacaaagcatctgcaatcgcattatctttccctttcttgtgtttgataacataaggaaaagattcaatgaattcaacccattttgcatgtctacgattcaaattattttgagagcgaagatatttaagcgattcgtgatcggagtgaataacaatttttttaggccacaaataatgacgccacgtctctaaggaacgtacaagagcatacaattccttatcatacgtggaataattcaaaacatgtcggatcccaaaactaatgatttggaaaccgacatgtttaactgtatcaagccctggatcagtagattgatataggttcaacaatctggatcttcattgcatacatttagtcaagactccaaaggagatatctttatataaaataataggacatttacaagtttgtggctaactattacagcagaagctatacgatgactcaactctgccgttttactatagaattaaaccatctaactatgctagacttgaagattaggtttaaagggaactaacttatgtgattgaactcccagcatcaacaagaactccaaatagactctgaaaaagaggggttgaagtaagggtgagtacaacgtactcagcaagctattatattattcaacaatgaatgcatgagaggtaatatccgtgtagagctaggtttacttgcagaaggctgagaataaagagggagaaagcctgcaacgtatttgatgcaatagtatttaataaaatctggaattgagtttctaaccaaagtaccatatgagtcccgatcctcaaatccgtcagttcggctattcgaatagattcaaggatattcatactgcagtagatgtacgctttacccgcagtccatgacttgccactaatcattagcttagtcatggcccattattaggttattaacaattgtggcacctgttccatgaactctagtccccatgcgctatgactgtaacgttatcagcagcgagaggagttctggcattcccacgtcatctcaaccaggttttcataaatttacacacacatcgcgcgataatcaagatatttacctgcgcctcggtaaatatcacatttgcccttcgcggcatatatttgcctccttcgcgaggacttacataagaaccactgtacagaggtaccacattgttaattaacataatatctaggtctgtccccattgtagaagctgcggtcgtactcgttcgtttgacataagtacttggtaaacttatatcgaccgagacagtactagccacccggaaatcaaccaaatcttgcgtactgtcccaatctaagttcattatattttatgcaatctaacttggcagggctaagcaaaagctagcatatctggtttgctatatgtttaggttatgcattgtaaatcatgaatggctaatgcatgtgtaacatacccgaaattttaggacttaaaatttcttgtcaaaatagttagaggttaatttctccaattttgagagccaaaaatttctgttttaatttaggtgatgaccaacttaaaccattgcatgattaaaatttgagaacaaaataaaaccttttcattcccaacattagactagaaatatcatcaagcatacatgtacataatgcatgcctaggcttgagttctttgtgcatttggagttttggtcttgcattccataataggtcccatgagcataatctaaaagaattatttcactaaacaaacctatagttaatcttgggtgataacatgtggacttaatattaaactcaaatatcatcttctcagtctaaaagaaatttaatgtaatccctataataatattagatgcaattatgaagtgggaatacatatacaaacaaaggtcatcctaattctctaaaatattttgtgcaagataaaatcatggaaaaatttatgtgtacagtgattagcacaaacttatcctctgtaattttggtaacatgttaacactcaagttgatatctcaaattaatcagttaaagcagacaactaaaagaaatcaaattaaatttaatcggctaaaaccatatttcatccaaaagtacatttaactgcacataagtgaacatggaaaataatttattcaaatactagattagttatcatgaataaatgtaatttttctagaattttcttctctgtttaagcctcctaaaaattcaatctagctttctaatagcccatctttgtttaatttctgtgagcagtccacccattatttttgagtgcaaccaaataaaatggaatctaggtgtaatcatctacctccagtaaaatcaacactagataatttggtccacacattaagttatgaagctacaaagttagaggagaaaataattccgaaaaaaatgatataaaactcaagtttacccagaatcttacccaaccctctcaccctagcctagtttgccacgacttggtcccacctggcagcctctccagctcgcccttcctctgtcccacatcctcagccgaccaagaaacacagagagggagagatcgagagccgaccgagtcctggacgcgtcgacgcgtggtgacgacgtgtcgacgccttcaagtcactgagtcatgcctccatctcctctagaccgagtcgcccaactccacacatcactttgaagctgaagaagccgagggagaggtcctcagcctctccgtcatcctcaacctcgccgccggtcgtagtgacgacgaccttcgccatctccgtttgagtcaaggtcacctccatctctttcgcgttcccatctctccacacaatgccgagcatttcctcttttgacctaaacccctctcgtgcagtgcatcgccgggaacgcaagccacgtcgacaacgccctggagcacgcaccggagcgccgccgcttcaaccatcgtcgtcgtcgtccggccattctcattcacctcagagaaagctgctgcgccattgtcattgcctcaacctcctcttcaaaacgcctcaagaaccccagccggaaacatcaagaacacggagaacacatccttttcttcaccggcgccaatctaggatcgcctccgccgtcatcgtcgtttaccgctgcctcggtgagccattgttcgattccttgcgcatacaccatctccttgacctcacaaccctcgtgcatgcttgcttgaagcagctcattgtcccgttcgagccgtcgtcgttcacccgaggaggagcgccgtcgccgagccgttccacaagtcaccgctgccgccaagacctcgacaaccctagctcgacccacggtgagcatcctgaagtctagaagactacatgcatgcatccttttcgttcgtaatcgacttccatgcacacatgcactttcaccccaaaaccaccgccgctcacactcgccatcggcgctactccgatgtcctctaaccaggaaaactagaggaatggaatcgcgagagctttctcttcattttatcttttgacctcaacctcaaacgagccaccgtttgccgccggcgagctccagatcgagctcagccatggctagctctgctctgcctagagcagagggatgacttccgtgaattagattaagtgcagggatctgtttacaattgtagaaacacactgacatatgggcctaggactgcgggttgattcctagaaacctcaagggcctttgtgcatattggtccctcacagccatgtggacccatcctttaaaatctgaagaataattaggaaaatgcccaaacaaatatgtttagcagaaaaatgcacaaagttgtaaaatctatataaaatcaaatatagctcattttgaagtgattccagtttctgtagattcttgaagttatgaactttattccaggaatataaaacttgacactcactgtacaaataatgtctctaagatttatctaagataagtcatgcataaaacatgtacaaacttataaaatacatagaaaattcatttcaactcattttgaaacaaaatcaaattctacagattcatcattcatcatcatacagtctctgattaagtgaaataaaagtaattacttactttgcatcaaaagcctctaaaactattatctttaaaatgactagttttagataagcaaaactttagaaattcatgtagaacccaatttagcttcaatttgaataaacttaagttatgtaggatcactaacacatgtatttccaagttatgaaataatattatatacttactgtgtagtaaaagtctctaaatattcatataaggatttactaacatagagcagcctttaatttgtaaaacttgtagaaaattcatttttagtccaaatgaaatgaacaaagtttctatagaaccagcaaatagttagcttcaacatagtaaaataaaatttggcaccttttgtagagaacatagatcaaaaccttaacttagtgaaataagaatttaaacacatagtgttgtttaagtaatac

SEQ ID NO: 4885 - DNA, 916 bp, Oryza sativa
ctgcctataaatagcagcagcaccttacattcaagaatcacctctcaacacacaactaagaaacatagctaggtaaccagggaaggtagcatcagcagcaggaggcaatggagggaaagaggactaccacttcgatggtgatcatgtgcctggtcatcttgagcctcactgtcgactccgccaccgcggcacagtgcggctgctgcatatcctctcgggcaaaagcatgttgttttggttgtattgctgctggtggctccgactcaatctgcaagaacacttgttgtttcccatgtattctggccgattctggtaaattcactgaagtcactcttttaaatgcacttcttatatgtagatacagactttgtagcatatcgtggactaatacatatgtgtggccttccatgcattttcatcaatatagtttgttgacttcacttcccatctgacaacttcaggcatatatcttgcaacatgaagacaatttatgctctacttccactacaaaattaattaactaatgcgctaatgtgatttccatattttaatttcacagttgttgctaagatggacgaaatgggagttcttgctaagatggaaggacaagcctaaaacaacctactcgcattgctaccagtcttaatgcctttcataagaatatgttgttttgcttcaagttatggccaagttatgttaatgtttatctccaataaattgttgaccatatggagcgatctatagtcgatccatctgttggtcccaactatttgtatgtcgtgcatatgtgcgctcacaagcatatttaatttctcttgctacttttaataaggccatagcactatccaatgtgtcatctgttggtctctgaccttagcaatttaatgcaacatgattattattatttgtgtgtgca

SEQ ID NO: 4886 - DNA, 8264 bp, Oryza sativa
cgaaagtgtcgtacgccgctcttgtgggatcaaaccggtgagcgtcaagtatttgggacagacatattgcgagaggcagaagaaaaagtgaagattatccaagaaaggttgcgcgttgctcagtcacgtcagaagagctatgccgacaatcgtcgcagagatttgactttcgaaggagattatgtgtaccttcgggttacgccgttacgaggtgttcatcgtttccagaccaaagggaaattggcaccgcgtttcgtgggaccttttaagatcgtaagtcgaagaggtgaagtagcttatcagctagagttgcctccgtcaatggcgggaatacacgacgtgttccacgtgtcacagttgaagaaatgtttgcgtgtacctacggaggaagcagatccggaacatatagagcttcaagaagatttaacctatgttgagaagccagtcagaatcttggaagtaagtgagaggaataccaggaatcgcgttatacggttctgtaaggttcagtggagcaatcattcagaagaagaagccacttgggagcgagaagatgaattaaagtcagctcaccctcatctcttcgccggttcttctgaatctcgaggacgagattcccaagttaaggggggcatatatgtcacgccctaaaaattgcctaatttaaaaatacattgtttaagtcatttttagaaattaaattaaaagcctacaagctaaacccaaattatctaggaaaattttcaacataaaaatgagctagataaaattttattaaatactttgcttattcctctatttttaagaattttctgggaattatttgagcaagggaagtatttttaataactgaaacaacatttcacgatttattttaattgaaaaagttctaaaacccctcctttaagttgttgggccatttttgccccaacatttcttcttcccgcgctgccaagccggcccaaagccggccgagctggcccaccagcccaccgagccgccagcccctctcccctcacatggaggctgacaggtgggacccacctgtcggtggtgtctcccacctccagccggccggctgtgcaagccgagcccgagccgagcacgagcatcgccgtgccacctccaatcccaccccaaaccggccccgattcttccggatttttgaggggtttttatcctctcattctcctctatctatccccccaaaaatcggagcaaatcgttgagtattttatcagaatcgaactcgttttcgagtttatctccaaaaccgagtttttgatttcccaagtcgatttcttgcgggaggagtccgatctcttcaatccaaggctataaataggaccccctagtccttctctttcgtttgccccaactcccgtcctctcccgtgcctcctagccgccgcgccgccgccgctaagcttgccgccgccgccggccatctccggcgccgccgcccagccgttgccgccgtcgccgccgcttgccgccaccgcctttaggtgcgtgggagcgaggagaagctcggccgcctcttccccgcagccgccggccgccgtagcccgccgcccccgtgcaagccgagccgccgccgccgccccttcgtcgccggccgccgtcgtgcgtcgttcggcgtgtaggtgagcaccgtcgggttcgtctcgtcgccctctacgtgtccatgtgctccaaattcgcagccgactgctctagctccggcgaggttgccatcctagccggccaccattgatgatgtcatcatgacatcatcggtttttctttttcccgattttctaatagattaaatcttcggaaaatcataactaaataaccgtagatccgtttcaggtggttcaagttgctaaatttttctaaaatcaagatctacatgttaaaaatatccacatgtactgtttatgcttgtttttgtactgttttgttgatttttgtttaattgctttagtttccgacgtttcggaggagagcgtttccgttgaggatggttccgaagcgtttgcggaagcccaaggcaagtcgcacagatcccaagcaaccctttgagcatgttgaacccgtttaaagctattattttatttcaactatgcattgttttcgaatgtcatcgggtggtgaaccttttccaattaattaatggcctacgatgactttattttcctatgggttataatttgattagcatgaaccttatatattggattggttcagctaaatgctatatgtaagtttgcttagccatgcttagaaacattagctaactaaaggggttaaatatagattataatatactatattattattattaattatggttatatttaatggtagctcacgatggttaatcgtgtgaggttaattaatggataattaaaacttggttaaggtgggttgtgagcatatggttttgatggttgtgctcatgacaattaaggaccggtttgcgagctactgttgtgaaacatttaccgtgccaaccacaagccagcgtgggcaacggctttatcttttgtatagcatgattcattatagtgtgacagactgtgaaacggcgagaagtccatgggggtcgctggggagtccattgcctctggttttgagggggagattatgatccaggaacggtgcactgtggtgagttgtgttgtgcgaggggtaatgtcacagttcctttccgaggtaccgtggtggtactaaggcgcatggtaacatgttgtgggattgtgtcttgtgggtacatgggtacacctctgatcagagtttaatctattcgaatagccgtacccgcggttatgggtgagttgagcaatgtttttcgtgattagtctcacattattcattactggtaattgtgttaattaatgtgattcctggtttggaggtttaatttgttcaaccggggttggttgttcaaatgaggttgggcctatgcaacacgggtgtgttctatggtgtttatttaatattgattaattatacaactgttttactattctcttaagtatttattaaatgatgtttatgcaaatgaggtatattatgccatcctttgttattctgtgcacttgcatatttgctgtgtgacttgttgagtatgtcatatgctcattcttacaatattcaatcatcagaagaggagtgcttcagtgaaggtgatgatctggaggattgagcttcttcctggttatgatgcctgtggagtggagtcgccatagctgttccgtagtttgctttagttttttttctgctgcgtagaatgttattctttgagaggaactatccacctctgtaatatttttttatttgcgaatattaaatagttgattatttgtactctattatcaatttgttattgtgtgcctcggctgattcctggacgagggtttaacacacatgtaagcgtttggaattttggatagaaattccgggcgtgacaagttggtatcagagccaccttgaccttaggacaagccaaatggtaaacctcaagtagccttcaaaatattttgggaaattagaactgctcttctctattctcttacaaattaattaagttggcagcacatgcaaggttatgcacaaaatttatttaacttaattccttttcttttgaaagcaaaacgttgttcttctcaaaatgtttcttatttcgctttattaaacttcattgattagtcggcactgtacatttattatggtatcgattcaatcatgttagcacaagtactactcatcccttttaatgatgatactgtaccatgcttatagtaggtcctaaatattctggttttattttatttatttgtcaaaaattatttgtccctgtttaaaaagttaaattctaaaaatatatatataatagcttagtatgtgtcttttcttttatttttcttcctctttggtcaaatcagttaagtctagatggtgcagctaacttaaaaatatgcattaattcctcccttctatgtttctttagatgccgccccattcaccgagaaatttgatcaaggtgttaggattcgtcagggagctgaggttgatggcttttgaggtaggctatgaagttgctcctgagtatcgccggatttcccatgaccccaacgaggagaagtgtcgtgttcgtgtgacgttggctagtgatcgtgaagactttccgtcccttaagttcgaagctggaggaagatcgtatagccatgcttgccaggaagcagctttggtggccattggagatttgcgtcaacgcttttaagaagagttggattcatcagctttccagtatcatcctcacaagcctcatggtcaagattatggaacttacacctatcctgatggtgaggagagtgccactctgatgcaggcggtgcatatgcttagttctatgtatgcagtaagtgtggagcgagacaaagccgctcatgacagggaaaactggaatcgaggcaagatttgcaagttggagagtaaggtgtaccgtctacagaaggaattagctgagcttaaaggagagacgccgccgccaacacccaagcttcacctcaccgcaaggaagagaacctgtccaccacctcgtctccagttagcttcgaagcttcgcgtgatgggagatgctgtgccagatcgtgctgaacctgtcatccacgtcttaagtgatgaggaagaagaggaatacccagaagaaagagtgccagctactccagaggaagaagatccatcgcttcgttccgacgcaaggcgggattagtcgcttagttagatcgttgccgtagttcgctgtgttagattgcttgtttaagtttgcttgtgagtgtgtgggttttagttgttgcttacatcattggtgggatgtaacagcatgagtctagttcttttgcttgtcagagtgtaagatagttggtgagatagtgttaatgcaatttaaatgtaatcatacacagttaagagcaatatagaatttaaattaattaaataactccgttctaagggtgtctctctgtcgttctttcctgtgtttgtgcttatcttcagatggtgaacacgcgcactggaagtggaagtggagctgctaacaatggaggagattccacgctagctcagattttggcccaacaaacacaactgatcaatctgttagtgcagcaggcacagaatcagcaggcaaacaaccagaaccagaatcaacccccacctccccaaaacaagttggcagatttcttacgtgtgagaccccctaccttctcaagcaccaccaatccagtagaagcaggagattggttgcatgcggtggagaagaagttggatttgatccagtgtactgagcaggagagtttcttttgcttcgcatcagctgcatggtcccgctgctgaatggtgggatcactttcgccaagccagggctgaaggagaacctatcacttggcaggaattcacggccgctttcaagaacacgcacataatgacaggtgttgtagctctgaagaagagagaatttagagcgctcaaccagggatctcgttcggtcactgagtacctccatgatttcaatcgtttagctcgctatgctccaaaatatgttcgcaccgatgaagaacgtcaggagaagtttttggagggactgaatgatgagttgtcttatgctttgatgtctacggatttccgggatttccagcagttagtggacaaggctattcgtcaggaagacaagtacaatcgaatagagcagaagaagcgcagggctgcccaatttaaggctcaacagggcagtaaccagaggtcgcgtctcgttacgggacctcaagctacatcataccctcaaggaggatcttcgtcagttgctcgccctcaacgccagttctacaacaacaatactggtaatcgtggcaatgacaaccgcaacgtggtcgctcgtcctgcagcaactccagctaagaaccagcctgtcaggaaggaacagggaagcaagccaggggtgtgcttcaattgtggtgatccagggcactatgctgataagtgtcctaagcctcggcgtgtgaagaacgctccagccccgaacaactctaatactccagcaccgaaggcacgtgttaatcatgttgtagcggcagaagctcagaatgcaccagatgtggttttgggtacgtttcctgttaattctatacccgcatctgtgctttttgattccggtgctacacattcctttttgtctaaaagttttgcgagcaatcatgggatggaagttattagtcttgggagacctttactagttaataccccaggcaatcaagtatcttcgacacagtattgcccttccgctactatagaaatagaagaagttcctttcccatcctctgctggaatccaaagatctagatgttatcttagggatggattggttatctcgtcacagaggagttatagattgtgccaaccgaaaggtgaccttaacctgtagcgatggggaaaccgtttctttctttgtgtcctctcctaaatctcatggtgtgaccttaaaccaagtcgctctacaagaaatcccagtagtacaagactactcagatgtgtttcccgaggatttgccaggtatgccacctaagagagacatagagttccggatagacttggtccctggaaccaaccctatccataagagaccttacagaatggcagctaatgagttagctgagataaagaggcaggtggatgatttgcttcagaaaggatatatcaggcccagtacttcgccgtggggagcaccagtcatctttgtggagaagaaagatcatactcagagagtgtgtgtggattatcgagcgttgaatgaggttactatcaagaataagtaccctctacccagaattgatgacttgtttgatcaactggaaggtgctacagttttctccaagatagatctccgttccggataccatcaacttcgaatccgtgaggaagatatatcaaagaccgcctttacaacccggtatggtttgttcgaatgtaccgttatgtcatttggactcactaatgcccggcctttttcatgaatctgatgaacaaggtgtttatggaatatctggataagtttgtcgtggtgtttattgatgacattcttatttactccaagacaaaagaagaacatgaagagcatcttcgtctagctttagagaaactacgtgagcatcagctctatgccaagttcagtaaatgtgaattttggttgtctgaagtgaagtttcttggtcatgtcatctcatccggaggagtggcagtagatccaagcaatgtggagtcagtgttaaattggaagcaacccaagacggtttcagaaattcgtagtttccttggacttgcggggtactaccgcaggtttattgagaacttctcaaagatcgccagaccaatgactcgtctgcttcagaaggatgtgaagtataagtggacagaagattgcgagcaaagtttccaagaactgaagaaaaggctagtgactgcgcctgtgttaattctgcctgattcaaggaaaggttttcatgtgtattgtgatgcatcccgactcggtttgggttgtgttttgatgcaagaaggaatggtggttgcctatgcatctaagcaattacgtcctcatgagaataactacccgacgcatgacctagagttggcagctgtagtgcatgcattgaagatttggcgtcattatcttttcggtaaccgtacagagatgtatacggatcataaaagtttgaagtacattttcactcaacctgatttgaacatgcgtcagtgaagatggttagagttgattaaagattatgatatggaaatccattatcacccgggtaaagcaaatgttgtagccgatgccctcagcaggaaaagctattgtaatatgtcagaaggtcgacatctaccttgggagttatgccaagaatttgaaaagctgaatttggggatagtcagcaaaggttttgtggctgctttagaagctcaacctaccttgtttgatcaagttagagaagctcaagggaatgatcctgacatccaagaaatcaaaaagaacatgagaagaggaaaagccatcggttatgtagaagatgagcaaggaactgtgtggttaggagaaagaatttgggtacctgataacaaggagttgaaggataccatcgtgaaagaagctcatgaaactttgtattccattcaccctagaagcactaagatgtaccaagacctaaagcaacaattctggtgggctag

SEQ ID NO: 4887 - DNA, 6859 bp, Oryza sativa
aaagctattgtttctattcaactattgcatttattttcgaatgtcattgggtggaattaacctattatttgttatggcccttttgttcttgattactttattctttgataccttgggttaatgtaatttgactagttgagctttatatgatggttcagctagatgttaggcataattgcttagccatgcttagaaacattagcacactactgggataacttatgcttcactattatttaatgatggtttaataatagctcatgatggttaatcatgattggtttattaattaatttgccaactaaaacttgataatggtgggttgtgagcacatggttttgatggtcgtgctcatgacaattatggaccggttcacgagtttcggttgtgaaacatttaccgtgccaaccacaagccagcgtgggcaacggctttactttctgtatagtatggttcattgtagagcaccagactgtgaagtggcggagataagcccacgggggtcatcttcggccattaattaattgggaaaggttcaccacccgatgatattcgaaaataatacatagttgaaataaaaataatagctttaaacgggttcaacatgctcaaagggttgtttgggatctgtatgacttgccttgggcttccacaaatgtttcggaaccttactcaacggaaacactctatccggaacgtcggaaactaaagcaattaaacaaaaattaacaaaacagtacaaaaacaagcataaacagtacatgtgaatatttttaacatgtagatctcaattttagaaaaatttagcacttgaaccacctgaaacggatctacggttatttagttatgattttccgaagatttaatctattagaaaaaaaactggaaaaagggaaaaccgatgatgacgtcatgatgacatcatcaatggccggcccgggttggcgacctcgccggagatagggcggtcggccggaactttggaggacacgtacacgtggagaacgacgaaacgaacccaacggtactcaccctcgagccaaacgacgaacgacgagggccggcgacgaaggggcggcggcggcggctcggcttgcacggggcggcggagctccggtgaccggcgacggaaaaggaagggtggccgagcttcccctcaccacggcgcacccaacggtggtgacggcgaccggcgacgacgatggagacggcggcgcggcggcaccggagatggccggcggcggcggcttgctaggcggcggtggcgacggagctacggagcacgggaaggcttgggaaaaggggcaaacgaaagaggggaactagggggtcctatttatagccttggattgaagagatcggactcctcccgcaagaaatcgactcgggaaatcaaaaactcggttttagagataaactcgaaaacgagttcgattcggataaaatacccaacgatttgctccgatttttgagggtaaagatagaggaagatgtggggataaaaacccctcaattaatcggactcgagggcgaccggaagaggcgaaattggcggagagaggcggcagctcgggctcggctaggcggccggccggctggaggttagggatgaccccgacatgtgggccccacatgtcggtggctaaaggaggagggggcggggcggctcggctgggccgacttgggccggcttggccacgcgcgggaagagaagagttgggccggaaacggcccaacaactttagggaggggttttggaactttttaattaaaataatttgttaaatgttgttccaattattaaaaaaaaacttcctttgctcaaacaattcccagaaaaatctagaaaatagaggaacaagcaaagtatttaataaaattttatctagaccatttttatgttgaaaattttcctagattattagagtttaacttgtaggcttttaaaataaattctaataattccaattaaacaacaatttatatatttaggatttttagggcgtgacaaacctaccccccttaaacggaatctcgtcctcgagattcggaagaactggcgaacagatgaggatgagctgacttcaattcatcttctcgctcccaagtggcttcttcttctgaatgattgctccactgaattcttctgaataatccacgcacattctctgagtatgatctttcttctccacaaagatgactggtgctccccatggcgaagtactgggtctgatgtatcctttctgaagaaaatcacccacctgtctcttcacctcagctaactcattagctgccattctgtatggtctcttatggatagggttggttccaggtaccaagtatatccgaaactctatgtctctcttaggtggcatacctggcaaatcctcgggaaacacgtctgggtagtcttgtactatggggatctcttgtagagcaacttggtttaagatcacaccatgatatttaggagaggacacaaagaaagaaacggtttccccattgctactggttaaagtcaccttacggttggcacaatctataactcctctgtgacgagataaccagtccatccctaagataacatctagatctttggattctagcaagataagtgaggatgggaaaggaacttcttctatttctatagtagcggaaggacaatactgtgtcgaagatacttgattgcctggggtattaactagtaaaggtctcccaagactaataacttccatctcatgattgctcgcaaaacttttagacaaaaaggaatgtgtagcaccggaatcaaaaagcacagatgcgggtatagagttaacaggaaacgtacccaaaaccacatctggtgcattctgagcttctgctgctgcaacatgattaacacgtgccttcggtgctggagcattggagttgttcggggctggagcgttcttcacgcgccgaggcttaagacacttatcagcataatgtcctggatcaccacaattgaagcacacccctggcttgcttccctgttccttcctgacgggctggttctgagctggagttgctgcaggacgagcaaccatgttgcggttgtcattgccacgattaccagtattgttgttgtagaactggcgttgggggcggacaactgatgaagatcctccttgagggtacgatggagcttgaggttccgtaacgagacgcggcctctggttactgccctgttgtgccttgaattgggcagccctgcgcttcttctgctccatccggttatacttgtcttcctgacgaatcgccttgtccaccaactgctggaaatcccggaaatccgtagacatcaaggcataagacaactcatcattcagtccctccaagaacttctcctaacgctcttcatcggtgcgaacatcttccggagcataacgagctaaacggttgaaatcatggaggtactcggtgaccgaacgagatccctggttgagtgctctgaattctctcttctttagagctacaacacccgttggtatgtgtgtcttcttgaaagcggccgtgaattcctgccaagtaataggctctccttcagccctgccttggcgaaaatgatcccaccattcagcagcaggaccatgcaattgatgcgaagcaaaagaaactttctcctgctcagtacactggatcaaatccaacttcttctccaccgcatgcagccaatctcctgcttctactggattggtggtgcttgaaaaaggtagggggtctcacacgtaagaaatctgccagcttgttttggggaggtgggggtggattctggttctgattgtttgcctgctgattctgtgcctgctgcactaacagattgatcagttgtgtttgttgggccagaatctgagctagcgtgggatctcctccattgttagcagctccacttccacttccacttccacttccagttcgcgtgttcaccatctgacgataagcagagacaacaggaaagaacgacaaagagacacccttagaacggagttatttaattaatttaaattctatattgctcttaactgtgtatgattacatttaaattgcattaacactatctcaccaactatcttacactctgacaagcaaaagagctagactcatgctgttacatcccaccaatgatgtaagcaacaactaaaacccacacactcacaagcaaacttaaacaagcaatctaacacagcgaactacggcaacgatctaactaagcgactaatcccgccttgcgtcggaacgaagcgatggatcttcttcctctggagtagctggctctctttcttcagggtcttcctcttcctcctcatcacttacgatgtcgatgacaagttcagcacgatcgggcacaacttcacccatcacgcgaatctttgaagctaactggagacgaggtggcggacaggttctctttcttgcggtgaggagaagcttgggtgttggcagcggcgtttctcctttaagttcagctaattccttctgtagatggtacaccttgctctccaacttgcaaatcttgcctcgattccaattttccctgtcatgagctgctttgtctcgctccacacttactgcatccatagcactaagcatatgcaccgcatgcatcagagtggcactctcttcaccatcaggacaggtataggttccatagtcttgaccacgaggcttgtgaggatgatactggaaagctgatgaatccaactcttcttcaaagcgttgacgcaactctccaatggccaccaaagctgcttcttgacaagcatggttgtacgatcttcctctagtttcgaacttaatggacggaaggtcttcacgatcactagccaacgtcacacgaacacgacacttctcctcgttggggtcatgggaaatccggcgatactcaggagcaacttcatagcctacctcaaaagccatcaacctcagctccctgacgaatcctaacaccttgatcaaatttctcggtgaatggggcggcatctaaagaaacatagaagagaggaattaatgcatttttttttaagttagctgcaccatctagacttaactgatttgaccaaagaggaagaaaaataaaagaaaagacacatacttaagctattatacatatatttttagaatttaactttttggacagagacaaataatttttttttgacaaataactaaaataaaactaaaatacttatgatctattatatgcacggtacagtgtcaccataagaaggatgagtagtactagtgctatcatgattgtatcgataccataatagatgtacagtgccgactaatcaatgaagtttactaaggcggaataggaaacattttgagaagaacaatttttttttcttttaaaagaaaagaaaatgaattaatttaattttgtgcataaccttgcatgtgctgccaacttaattaatttataagagaatagagaagagcagttctatttttttcaaaatattttgaaggctacttaaggtttaccatttggcttatcctaaggtcaaggtggctctgataccaacttgtcacgcccggaatttctatccaaaattccaaacgcttacatgtgtgttaaaccctcgtccaggaatcaaccgaggcacacaataacaaaattgataatagagtacaaataattaactatttaatattcgcaaataataaattgctacagaggtagatagttcctctcaaaaaaataaccttctacgcagcggaaaaaaactaactataacaaactacggaacagctatggcgactccactccacaggcatcttaaccagaacaagctcaatccttcagatcatcaccttcgctgaaatactcctcttctgatgattgaatattgcaagaatgagcatatgacatactcaacaagccacacagcaaatatgcaagtgcacaggataacaaaggatggcataatatagtttcatttgcaaaaacagcatttagcaaacatttgagaatttaataaaacagttaagtaataaacaatattaatccaacgctatacaacataccctgttgtataggcccaaccattcagaacaaccatcccgggtgcacagttctatctccaaaccaggaatataccattccaaaccaggagctaatcaaattattaccaattaaagcatcatttactatggtgagaaaggtgagactaatcacgaaaaacattgctcaactcacccataaccgcgggtacggctattcgaatagattaaactctgatcagaggtgtaccactgtacccacaagacacaaccccacatcatgtcaccatgtgcctcaataccaccacggtacctcggaaaggagttgtgacaataccccttgcacaacataatccattacagcgcacctttcctggatcataatcacccccttataaacaaggcatggactacccagcgacccccgtggacttctcgccacttcacagtctggcgcactatattgaatcatgctatacaaaagataaagccgttgcccacgctagcttgtggttggcacgataaatgtttcacaacagtagctcgcgaaccggtccttaattgtcatgagcacaaccatcaaaaccatatgctcacaacccaccttaaccaggttttaattatcaattaattaacatcacacgattaaccatcgtgagctaccatttaatgtaaccataattaaaataataaagtaacatagtttataattaatccctttagttagctaatgtttctaagcatggctaagcaaacctacataaagcatttagctgaaccaatccaacatataaggttcatgctaatcaaattataacccataggaaaataa

SEQ ID NO: 4888 - DNA, 11303 bp, Oryza sativa
actctttgaaatataaccataagtgcgttttttttttttttccccccccccctttttttttttttaaaaaaaaaaaaatttttttggaaaattttttttttaaaaaaaaaccccccccccccccccccaaatttttttttaaaaatttttttgaaaaggggccctttaaaattgtgggggtttttttttctttaaaaggccattgggcctaattcaattttatcccttatatagctacctagctaacctaactctatatataaggtccaggctattcgctttattacccatagacagttaaagtcattgtcggccattaattaactgggaaaggctcaccacccgacgacattcgaaaataatgcataagttgaaataaaacattagctttaaacaggttcaacatgctcaaagggttgtttcagatctgtgtgacttgccttgaacttattcaaacacttctgaaccttcctcaacgtaaacgctctcctccggaatatcggaaactaaagcaaataaacaaaatcaacaaaacagtaaaaaaacaagcataaatagtacatgtggatatttttaacaaagtagatcttgattttagatgaatttagcaacttgaaccactcgaatccgagttacgatgatttagttatgaatttccgaagtttaatcgattttcaacgaatagaaaaaactaataaaaaggatttatgacgtcatcgatgacatcatcgccggccatggtacggctccacgcgaccaccggcgatagagagctcggttgggctatccggggacacctacgagaagaggacgacgacgcgaactcatcggtgcaagaaactacgacggacgacgatgtacggcgaccggcgatgaggacgaacggcagcgcggctcgggtcgacgacggcggcggcattccagcggcttgcgacgacggcgaaggggtggccgaggtactcctccaccgtgcgaacccggcggcggcgacgctagcggcggtgtggcgcgactggatagtcgccggcgacggcggtggcttgagctacgcggcggcagcgctacgagcaacggcgggactcgggacttggggcaaatggaagaggacgactaggggatgctttatataggcttggattagagagatcggactccaaccgagaggaatcgagctgggaaaaactagggttagttttttttaccaggaaaactgccagggctttgcccaacagtgtaattttataaataaagaaaatatttacaaggttacaaatattacatgcggttcacacagagatactataaggtttgtacccaattaaaaacagtttgctttaaaggttcattcattatgcacatatgcagaagaacttctttgacgaaaagagatctccatgcctgaaaagagggttggatgttctgaaatatgaagccatttctttgtttccagatgtgccaagctgccaaaaagaaaatttccaggaaacccttgtgagcaaatttgattcttgctagagagatcatttggaaaaactccaaattgttattccactcaattcctaggtattgccaacacctgatgctgaaagggcataaaaagaagaggtgcagtcttgtctctctgcagttcgcattgcacaaaacacatgtgagatcatcttctttggtacaatgtcttctatccagcatatctcttgtattaagtctatcacagaacattagccaggcaaagaccttgatcttcatgacacattttgttttccatagccaaatcatgtgtctggggggttgcaatgcagaataatttcttagcagtgtacttatctgagccccagataaaattccaagcatcccccatccctgattgtaagttcaaggtgtccagaaccccctgaagttgcaagaattctgaataagcctcatccgagagggatagagcaaaagaatcttctaggggtagctggtagacatggccttgactgaatcagacttatacaaagtcacagcaaagagattggggtagctggtgcacttaaaatcatcattccatagatcattccagaaaagggcagttcttcctgtcctgatttcacattttgctatccccctgaatatgtctgcaagagttgtgatgtccctccaccaaaaagaacccttattcatcgtcaggtgtggaactttagaaacatagtatgattgtgagattaatttcacccatggtaaatcagcaccattatagaacttgatcatatgctttaggagaagggctgtgttttgaactctcagattgatcactcctaagcctcctttctccttaggcatgcacaccctatcccaggacgctagagatttccttgtcgaagaagggttattacctctccacaggcaattcttacgagctgtgtcaatgaccttgatgactgtaactggtagctgtagtgaggacatgtaataggttgggatagaggacaggactgagttgatcaaagttaatcttcctccttgcggtaaaaaaattgagcttgccgtcagcctcctttcaaccctgtctaccaatgtagcaaatcaaccactctaggcctggtggttcctaaaggtagccccaaataagtgaatggaagagaaccgatcttatatcccaagacgccagataataagatagctttgtcttgagacatattaagtggatacaggcttgatttattatagtttaccttgaggcctgtggattgagcaaacatatttaaaatagccttgaaacagaagacttctttctgagatacttttaacaagatcaaagtgtcatcagcatactgaatgattgggaaaccatcctcactgctttcattaattggttttgacaaaagtccttgatgaaaagctttattgattattctttgcaacagctctgcccccaagacaaaaagcagaggtgagagaggatccccctgtctgactcctcttctgcatttgaaagtattccctggcaccccatttaataacacagcagtagaagcagtagagaaaaccatctgtacccactcaatccattttggagaaaaacccatatgttgcataactgagaaaattgcagaatgctcaatacattggtgaatatattcaaaagaccaggtaagacaatcctgtatggtttttcctttgatgaaaccatattggttatcactcaccagtgtaagaattaccccttgaagtctatcagctagcaatttagttaagattttaagactgatacccgtaagggaaataggtctgaaatcattaacagtctctggggaggttttctttgggaccagggttatgaaggaggtattaaggatttccaaatcaacatttccgtcagtcgataatagtcctgagctatgataggccaacactttttcatgaaaaatccattgaaaccatctggccctggtgctttgtcagctggaataatagagatgagactatctacttcttgagttgaaaacatgtcaaccaagctactcaagtctatatgtctgccaaaaagggagtccaagtcaaaagccatctgtggggaattagatacactcaacctattctgaaagctgcgatgaaacaatgaagccttctgctcatggagatgtagaatctgtccatcatgatcaagcacctatgagatagtgtttattcttaacctttctatggctattgactgaaagaattttgtattttcctcccccaacatcatccatctactagtacacctctttttccaatagatcttcctgaattccaatagtttcaaaatctataccttaactatttctctgaaattccactcatagactgatagcattctgttttcttcaactaagtcaagaaagtccactactttgttccaattttttagcaatcccatcaactttgacagattcttactccaggcaaggagctttttcctaagcactttcaatttgaaagaaatgcaaactagggttagtttggagagataaactcaaaacgaattcgatttggttgatccgggcaaaattgatctccgaaactctaggggaaaaggaggagatgatttcccctcaagcaatcggactcgggggcgaccggttgaggaggaatcggaggagaggctgcggcgctcgggctcagctcggcccggccggaggtaggggatgaccccgacatgagggccccatatgtcgacggctagaggagaggaggggcggctcagcttggattgggccggcgtgggccgcacggctacgcgcgagggagagtgatgttgggccggaaacggcccaacgggctaggggaggattttaaagactttttcaattaaaataattcgtgaaatgatgtttcatttattaaaaatacttcccttgctcaaataattcccagaaaaatctagaaaatagataaacaagcaaagtatttaataaaattttatctagctcaattttatgttgaaatttttcctagattattagagtttaacttgtaggttttaaaataatttctaaaaatgcattgaaaactgaattattaaattaggctattttcagggcgtgacattgatatagtttaaacatgtatgttaccgaatctttaattttaggacccgacaaggtgtgtgggtgggggcccctgcgatttgggagcctagagcggctgtaccgctcccccccccacaccaagcttgccctgactacatgggccttgaaaggccacatggcatcttatgacgatttctgggcttgatggcgacgaaaatggacgtcatagactctatgacgacagaaggatcgtcactagattagtaacaaaaagataagctttctttatagaacgccattagagacgcatgataggtaacgaatgatattcgtcacacgaatgtcatagatttcacaacatggtgaatcatctatatatgggcctatttgtcgtctaaatacctgcaaacaaccttggtgaatcatctctttgatcgtaaattatattttcaaagagacaaagaaagagagagagagggagttaaagtccaatcttgtcacaccctgaaaatcccaaatatataaattgttgtttaattagaattattagaaataattttaaaagcctagaagagaagatctaattttaaataaaaaattccaatataaaagtgggccagataaaattttattaaatacttctcttgattctatagttcctagatttttcagggatttatttgagccaaggaactatttttaataaatggaattgcatttcatgaataatttaaattgaaaaagttttaaaaatcctccttttggctttgggccgaaagttggcccaaaaccctttctctctctccctcagcccagtcggcccagtcagcccgcagccacccgcgcgcgcgccctcgcccgctgacaggtggggcccacctgtcaggcttcccgagccgcgccgccgtctccttccaaattcgatcgcgtctttccttctccggtcgaatcaatagaggggaaatgatctccgggacctcctctaccttttctcttttggaatcatcgtctaattttgtttggaaagcgccagattcgatctcgaatcggattcctctctctctcccgccgaaccctaatttttccatcgccgtcgccggcagccatgggcctccaccgccgcccctagcccctttataagaacccccgagacctcctctccacgctgccaccctcgccttagctcgcgccgcctgtagcgccgcctccgcgttcaaccgtgcgccgccgtcgccgccgcgagttcagccgagcaccgccgtcgctccagtcgtcgtcgtcgctcgggaaggacaccgtcgggatcaccaggtcatcgccgaggatcgccggaagaccgccgtcgtcgtcaagccgaccgtcgccgccgcttcttcctcgtcgtcgtcgtcgtccggtcgccgtccgccgccgttcgtgcctcggtaaggatcgccgcgtcacccgctacgtgtagatgtcctccgtttgcgccgccgcgccgtcgttcgccggtgagcatccgtgtccgagccgccgccggtgatgacatcaccgctgatgtcagcgctgacgctagcggtggaccgccggtagatcgataagatctcggccgttcgttttggatagaatatatctcggccgttcgtttccgtagaccgccgccgtgcacccggtccatcgatgcacccgagccgctgacgcaataatccctttttccttttcaaaaataattcattattgcgtcataattcaattaaaatctatataaatgatttaatccgatttaaactttgaaaattcataactaattcatcttagctcggatttagttggttcaagtctctaattttttctaaaattgagatctacgtgttaaaaatatccgcatgtactgttcatgcttgtttatgtgctgttttggtgattttgctcttttctctttagattccgacgttcccggagagtccgaatttgcaggagaagactttgaagagttccaaggccagcaaggcaagtcacacagatcccaaacaaccctttgagcatgttgatcccgtttaaagctattgtttctattcaactatctacctctgtaatgacattatattcacttattaattagagttataattgtactctattatcaatttgttattgtgtgcctcagttgattcctggacgagggtttacacacatgtaagcgtttggaattttggataaaaattccgggcgtgacaagttggtatcagagccacctagaccctaggttatgccaaatggttaccgatagaagccctctaaaaatattggaaaagtagaactgttctcctctctttctcttttaattaaaccaaactaatggcacatgcagtttatagtctcttttaatggttctcattcaaaatttatttatgattcctgtgttgttagtactgtacatctattactgtactaatggcccatttaccagcaaaagtttcacaacattgatttatttaatcttgctgcaatgaaataagcttagcatgttgattttataactttcttttattttatttcttttgaaactcgttattaaaaagtgcaaaatttctaatcatgttttcaactgtttcaacttatcttgcaagattggtttactttatttatttaccttttactttgattttctaactttaatttaatccaaaaacttgtgctattaattggataaatgtcttaactctgtcctttcacttgtctttagatgccgcgctacaagcctgagtacttgtttggcactaagggatttgtccaggagttgcgtacgatgtcctttgccataggatttgggactgctcctttgtatgcccagattcctcatgatcgtgatgaagagaagtgccgtgtcaaagtcaccttgaacagtaatcgtgaagatatcccatcggtgatgttcgaggctggttggggaagctacattcatgcttgtcaggaggtggcaaggatcaccataggagagctccgcgaaagctacaatgatcggttggccaacactaagtatcgctaccatcctcgccaaccccagggaagcgatcgtggcagctaccttgaacctgcagggattgagaatgatgctaccacaaggcatttggttgagatgctgtgggccatggatgagacccgcgctgagattgtgatagcagctcaagatcgtgaagacaggaatcgcggcaagatctgcaagctggaggacaaggtggatcatttggagaaggaactagccgcattgacgggagaagcaccaccgaaaaaggccagggtttgtcttaccgcaaggaagagagctctattcgttcctcgctaccagttggcgccaaaggttcgtgtggtggaaaaagaagctaccccagccccagcggatcctccggtcgtcaacgtaagtgatgatgatgaagaagaatccaagcgcacccatttaaaggtcgagtggggagctactcaagatgatggggacgcgccgaacgagccttcaatcaactccgatgcccggaagacctagaacgccttgtcaagccgttgccttagatcgttgtgttagtttgcttgtttaagtttggttgtgtgtgtgggtcttgcatgtgatttacatcattggtgggatgtaaatgcatgcgtttgtttgctttcgagtgattaggtagttggtgagttaagtggtgtgagagtcttcagttttgtaataatgaaactcagttaagatcaataaaagtcaagctagtaaaaaaaaattaatttcctgtcctaagtagttttttcccctgtttctctttttgtgctcctgtctatgccagatggtgaatactcgcagcactgggaatggccccaacaacaacaacaacaacaatggagagaatcccacgcttgcccaagtcctggctcaataggcacagcttatgaatatgatgatgcagcaactccagaaccagcagaaccagggaaataaccatgcacctccccagaacaagctagcagaatttcttcgtgtgaggccgcccactttttctagcactaccaatcctgttgaagctggtgattggctgcacgccatagagaagaagttggacctgcttcagtgcactgatcaagagaaagtctcctttgcttcacatcagctgcatggccctgcctctgagtggtgggatcacttccgtctcaacaggactactgctaaacctatctcttggctagagttcaccgctgcttttcggaagacgcacaaaccatcgggagtggtgtctcttaagaagaaggagttcagagagctcactcagggatctcgctctgtcaccgaatacttgcatgagtttaatcgccgggctcgctatgctccggaagatgtatgcactgatgaagagcgtcaagagaagtttctggaaggactgaatgatgagctttcttacccattaatgactggggattatcatgatttccagaagttggtgggtaaggctattcgccaggaggacaagtacaaccgtatggagcagaagaaacgcaggattgctcacttcaaagctcagcaggggaatagtcagaggccgcgtcttgcttagggacctcagtcagtacccagggaggttcttcgtctgttgttcgtccgcagcgtcagttcttcaacaacaatgctggcaacaacaaccgcaatcaagctccacgtccggtggcaactccgacacagcatcagcttgccaagagggagcaagggaacaagctcggagtgtgcttcaactgtggtgaaccaggacattattctgactagtgtccgaagccccgccgcgtgaaggttgtccctgcccagaacaactcctccgcaccagcgacaaaggctcgtgtcaaccatgttgctactgcagaagcccaaggtgctccagatgtgattttgggtacattccctgttaattcagttcctgcaacagtgcttttcgattctggtgctacacattcctttttatctatgagttttgcaggaaatcatgggatggaagtagaagatcttagacgtcctttgatggttagtactccgagtaaccaagcactctcatcgcaacgtagcccctctgtcagaatagagattcaaggagtaccatttctggccaaccttattctgttagaatccaaagaccttgatgtcatcctagggatggactggttagccagatataaaggtgtgatagactgtgccaatagaaaagtaactctcaccagcaatgacggtgaagttgtaactgttcatgcattgtcctctgaacctctaaggtcaagtctgaaccaaataacgttggaagagattcccatagtacgggagtacccggatgatttacctggtatgccgcctaaaagagatatagaattcagaatagatctggtaccaggaacaactctgatccataagagaccttatagaatggcagccaatgaattaacagaagtcaagaggcaagtagatgatttgctttagaaaggatacatcagaccaagttcgtctccatggggagctccagtcatctttgtggaaaagaaggaccatacccagaggatgtgtgtggattatcgtgcactaaatgatgtgaccatcaagaataagtacccgctgcccagaattgatgatttgtttgatcaacttaaaggtgccaccgttttctccaagatcaatcttcgatcagggtatcaccagttaaggattaaaaaggaagatatacctaagaaggcttttaccactcggtatgggttatttgaatgtactgttatgtcttttggacttactagtgctcccgctttcttcatgaacttgatgaataaggtgtttatggaatacctagacaagttcgtgctggtctttattgatgacattcttatctactcctgaaccaaagaagagcatgaagaacatcttcgccttgcactagagaagctacgagaacatcaattgtatgccaagtttagcaaatgtgagttttggttgtctgaagtaaagttccttggtcacgtcatctcagccggaggagttgccgttgatcctagcaatgtggaatccgtaaccaactggaaacaaccaaagacagtttcagagattcgcagtttcctgggtctcgcaggttattaccggaggtttatagaaaatttctccaagattgctaagcccatgacacgactgcttcagaaagacatgaagtgcaagtggtcagaagagtgcgagcagagttttcaagagttgaaaagtcacctaatatcagcacccattttgattttgcctgatctaaagaagggtttctaagtgtattgcgatgcatctaagcttgggttaggttgtgttctgatgcaagatgggaaggtggttgcctatgcatctcgtcagttacgtccgcatgagaagaactaccctactcatgatcttgagttagctgcagtggtacatgcgttgaagatttggcgtcattatcttttcggtactcgtatagaggtgtacaaggatcacaagaatttgaagtatatctttacccagccggatctaaacatgagacaacggagatggttggaactgattaaggattatgacatgggaattcattatcaccccagaaaggctaatgttgtagcagatgctctcagcaggaaaggctactgcaatgctacggaaggacgacagttgccatgggaaatatgcaaggaatttgaatgattgaatctgggaattgtcagtagaggtttcgttgcagccttaaaagc

SEQ ID NO: 4889 - DNA, 6045 bp, Oryza sativa
atttttccgtgtcgtcctctttaatggaccgcttgcgaaaatgagccgattttcccagaagcaacgagataccgcccgcacggaatctaaaagatccctatccaggaaaatcgtttctgtagtagtgattcatgaagttccttctctacttgatcgatccattttctttgtttcttttttggcatagattgaacacttggtggtgcgctcgtcggcgttcctggtgtctagagcaccaccatcgccccactttgtcattcccgtcaactcgaatcatctccggttgtaccattgcgccactgacattgcctaggtcccaggagaacgacgcccacatatgatctagccaatacgccgccacgaacgccgtcggtcgccgttgctctcctactgcctctgcttctcttgctgccgagtcaccgacatgtgggcccagctgtttagctacttcattaggtgctaaggactttaattaggttctttttgtaaaattgctttgtttgccatgtgggcttttggacctaaatgcaattcacctaatgcccagggacctttttgtatagggtttagggcttaccctaaaacatgaaattactatttcatgcatttattacttgatataatagcttgatgagtatattgttatcacccttgctttaaccccctcttttaaatcaatttggagtttttgccgaagccaggagtttaatcatataaattagtttcattccaacttagttcccaggtatagattagatagatggtttaattctatagcaaaacattagagttggcttatcctatagcttctacagtaatagttagccacaatcttgtgaataccctattattttatgtaaagaaatttccattggagccttaatcaaatgtatgcgatgaagattcagattgttgaacctgtatcaatctactgatccaggggttgatacagtttaaaaatgtcggttacccaatctttaattttaggacccgacaaggtgtgtgggtggggccccctgtgatttgccagcctagagcgggcgtaccgctcgcgccccctccccccagagccggccctgactacatgggccttaaaaggccaaatggcatcttatgacgatttctgggcttgatggcgacgaaaatggacgccatagactctatgacgacagaaagatcgtcactagattaatgacaaaaagataagctttctttatagaacgccattagagtcgcatgataggtgacgaatcatattcgtcacacgaatgtcacagatttcattgcatgacttaaaattcaatttttatgacgtaaatgagcatcacctatcataagattcttggctatttgagaggcagtttgcagacatacagcacacagtttcataccgtgtgcgtgcctagttggcaactggatcctagtagatgcaaattttgaaacattcaacccaacccaatccttcttctcttaatcttctcttcctacacttgtgtttgtgtgtgtgtgtctaagaggctagtagtagagtagctagcctaaaattttttgcacgttgcagctactaactgtgctgctggcttgtcgtcctctgcttcaacattaaagagaaagctaatagatcggtgattcactttggtttctttgatgctatccagccacgtcaccatgtatgcgaattttgtggatggagtcagaggctctgcatgcacggagctgatttaattaattaacttgttgccagctagtacctaattaagcatgtgtgttaatttattattaattactttgctagtgttaatttatccttagtttttttattccaaactactagcatgcatgcctttgtcagagagagaaaccgatggaatatcctcgtttcaaaagtccatgcataatgtgcatgctgtgtggattcgtgctgtattttcctgggtagataagaccaaaaaatcccacttaccaactaggttttttaaaagtctggtacatcgtgaaccatactgcttcacgtggtcggaactatatacgttaagatcaaatgtgctcaacgtggtctggcacatcatggaccatgctgtttcatgtggtcggatctagatgcattaggaataatccttttcgtagtagtgaaactaaagaacttcacttgcgaactacttcctccgttttacaatgtaagtctttctagcatttctcacattcatattgtttctaatgaatctagatagatatatatgtttaaattcattagcatcaatatgaatatgggaaatgctagaatgacttacattgtcaaacggagggagtagtttttgtagagactgaacaaagatgaaactttttggaaaggtgctcctgatgaccaagttcaattcaccaactgaaatcgcacactggatttacatgaaaaatgcgagatagacaaaaatgatttctttcggttttaaattaatactcccggccatttgggaggagcaatatgtacatatgcattcatcacacttcaggttttttgtcttttttttccttggagttgtaagaatgctcataattagggcatgcaagttgatccattgatatattcgcaatatttgacgatttttttttcattttaaaaattgttgacgatattagcttaattttggtatggaaaatatcggttaatttatctccaatttttatcaagagagaaaatgaaccatgagagttgaggtgcgaattaaccacaagcaaatattcattttaatttgtggtatatatatatacacgagcatgcatgtaaagatggaaatatgtgaaaaatacaatggtgctagtagatttgtctaaaacacttccataatactatgatcaggacactcgataaggacaaagttaaattttagggattgtgtcattatcaaaattatcaatgaataattggccagagggccgggattagcatgggtctactactgtcctgccatttcattaattaattagattaagtccccgattgcttgcatccctaattggcctacgagaaccgacaaaaatcgcaagatgggaggattgtggtaggttatcttctccaactgtgcctctcaagtggccataacatattagccagaaggataaataatcatcaatctgccttcacagttttgatcatctcatgagacatatatataaaccacccattagcaagagtctcctaggtgaattaattaactatactgatacacatatacttaattggtataagaaaattagtggtagttaattagtataaaagcatcaatcaaatggagactattagctagctaggagaccgggcaatttttgcaaagcattgatcttgactaggaatcgtgcacgtacaaggcacgtataaaaaaaataagtataaaatgtaaactacatataaaaattaggaagtgtgataaaatgtcataactgcataatttaccaacgtaacagccaaaaaaattaaaattatctcagtgcaccaataacataaacaaaccaaactttggtagatatatattaaaaaattgaggcacatcacagattgaaattagtcaacaagttcagggaatgaactcagaaatgaaccggtaccacctagaatattaagttcaggtacatccccggataagatcagaaaatactatagcaaatgttccaaattttgtttctgaattctccttaatccacatgaattgtccttaatacaatccaggataagatcagaaaacaagacctctcttacaagcaataacgcatatattatttgtcaagacaaagccaagtgcataatccacatcaggttatcctctagatgatactccagccatgctccctggtcctccaaaaacaaccaggttcaatagtccaatgcataatgtaaataacagggccggcagaagaatctgaacatggtaatcttaaagcgaccttatataatctccacaaataatattggaaattatttgaaatactatcaagtgacaggagcaaggttacaacattattagcaagtgacaggtgcaagactaaaacattagatcagtgaacctgaagtaagacaaacaattgttgattaaaaataaataacacttgttgacaaacacaaaatggcattttattcttgcacgaagaccatgtctaagccttgatatatgcattatgccttcatgatctttaaagtcaatagatacctgcataaagcatcaactaagaaaatacattgtttttgttccaaaaaaactgataaataacaaaaatggcatgataaaaggaacaccttaatggatacttttgttaaaaaagatagtgaaattcttgattattcaacgccggatcgaatcatgtccaatggtcattggaattttgtctatccttctattcttcaaaataattcagatttgttagccaaaatgcgaagaaataggtttgccattccattacagtatcatcaagaacaagcgaaagaaccaatatcctgttttgggatttcgattgaaataccctttatgggtgttttacgtagaaatactatagttgcttattttgacaacccacgatacaaaaagagataaaaaggttttgagaattgttaaatttagatataggaccacataagcaacacaattaatttaaatacagaacatatggacatacttctctctttgctgccctgtgtttgtagatggttcaactatcaacataggatgctcctcagcataaaagctaataaagcaaaaaaattcagtagttgcatctccatgccatacaaaggaaatcctactatttaatcaactttatccggttgtacacataagaagggatttcactatcagtatatttgaagagcataaataaatatgtaaggtgaaaagatggtgggcataaagcagtaaccatgctgacatccaaaagattccatagaggcatagaagattaactttgttgctgattctaaagaaactatgttaaagatagagtttggttcatcccaaacttccccagaaacaagttaggcacgttcggccttttgcggcaacgggcaagtgtttggccaaccacataagcagtgtgccaaacctggttactccagtgcctctcatgtcatagatttatttttcagacaagttttgccacaagtgtggccagctttttgggcgtgcacttttggcacaaaattactcagatctgcatcaaatagataaagcaactcacctgaaagcatgattccatatattgtcaacaatatcccaatcaataaatgttccatctttcattggtgaaatcacctattgggcatggaagaaaatcagtgataaacaatagttaacaaaatcatgagcatcaatattgatattttagaatgttgataaactaacctccatatgatccctcctaaatagaataaaaacaccttttagtacatacactacaatagagtattatcacaggccaaatataaattgtctccaggtaaaataaaggtagcaagcaaagcaaaattcagacaaaaaataatagtacatgttattgcagaaatttgtagtgtagagcttcgttgattatccattgaaagtattcagaaagcacggctatgttgtggaccactattatggtagagaactgcaaatgcaagacactcttatgcatcagttcagaatcctcttatgccatggacgcccatcgtagacagccagagccagccagcaacccactcagccatggacgccatggacaaagcaatcaaagcaaccataaaaccaagaaaagaaaaatcaccggttgccgaggagagcctggaggtggacgatgagcttctcctcctgctcagtgaagttcccccgcttgatccccggctggaggtagttcgtccaccggagcgggcagctcttgctgcaacgcatcacccctgcacacacgcacagatcaaacatgcaaaaatctcagatctcgcaacccaacgcagatcgatcgatcaagaacacacaagaacacgtaccggtgttggtcggcacggcacgccagttgccggcgccg

SEQ ID NO: 4890 - DNA, 14462 bp, Oryza sativa
  unsure (1)..(14462): unsure at all n locations
ggatgcatcgtagtacacttggaaacccttctttggatcaggcaaaatcaaaatgggagctgatattaagtgacttttcaactcttgaaaactctgctcacattcttctaaccgcttgtacttcacatccttctgaagcagtcgtgtcatgggcttggcaatcttggaaaaattctctatgaacctccggtaatatcctgcgagacctaggaaactgcgaatctctgtaactgtcttcggttgtttcgagttggttacagattccatattactaggatcaacggcaactcctcctgctgagatgacgtgaccaaggaactttacttcagacaaccagaattcacatttgctaaacttggcatacaactgatgttctcgcagcttctctaatgcaagacgaagatgttcttcatgctcttctttagtttaagaatatatgagaatgtcatcaataaagacaaccacgaacttatccaggtattccatgaacaccttgttcatcaagttcatgaagaaagcaggggcattggtaagtccaaaagacataactgtacattcaaatagcccataccgagtagtaaaagctgtcttaggtatatcttcctccttaatccttaactggtgataccctgatcgaagatctatcttggagaaaacggtggcacctttaagttgatcaaacaaatcatcaatactaggcagtggatacttattcttgatagtcacatcgttaagtgcacgatagtccacacacatcctctgggtatggtctttcttttctacaaagataacaggagctccccatggagatgaactcggtctgatgtatcctttctgaagcaaatcatctacttgcctcttgacttctgccaattcgttggctgccattctatatggtcgcttatggatcggagttgttcctggcaccagatctattctgaactctatatcccttttaggcggcataccaggtaaatcatcagggaacacatcagggtactcccggtctataggaatctcttccaaagttatttggtttagacttgaccttcgaggttcagagggcaatgcatgaacagttacaacttgaccatcattgctggtgagagttacttttctattggcacaatctatcacacctttatatctggctagccagtccatccctaggatgacatcaagatctttagattctaacagaataaggttggccaggaaaggtacacctcggatctctattctgacagaggggctacgttgtgaggagagtgcttggttactcggagtactaaccatcaaaggacgtctaagctcctctacctccatcccatgattttccgcaaaactcatagataaaaacgaatgtgtagcaccagaatcgaaaagcactgttgcaggaactgagttaacagggaacgtacccaaaatcacatctggagcaccttgagcttctgcagcagcaacatggttgacacgagccttggctgctggtgcggaggagttgttctgggcagggacgaccttcgcgcggcagggcttcggacacttgtcagcataatgtcctgggtctccacagttgaagcacacaccgggcttgctgccttgctccctcttggcaggctattgctgcgacggagttgccaccggacatggagctggcttgcggttgttgttgcccgcgttgttgttaaagaattgtcgctgcggacgaacaacagacgaagaacctccctgtggcatggacaggggtcccgaagcaatacgcggcctctgactatttccctgctgtgccttgaagtgagcaatccggtgtttcttctgctccatgcgattataattgtcctcctgacgaatagccttatccactaacttctggaaatcgtgataatctccagtcatgagtgggtaagaaagctcatcattaagtccttccaagaacttctcctggcgctcctcatcggtgcgcacatcctctggagcataacgagccagatgattaaactcgtgcagatactccgtgactgtgcgagaaccctgtgtgagcgacctgaactccttcttcttgagggacaccactcccgatggtatatgcgtcttgcgcaaagcagcggtgaactcaagccaagagataggttcagcagtagtcctgttaaggcaggagtgatcccaccattccgaagcagggccatgcagctggtgtgacgcaaaagagaccttctcctggtctctgcactggagcagatccaacttcttctctatggcgtgcaaccaatcactagcttcgacaggattagtggtgctagagaaaacaggtggcctcacgcgaagaaactctgcaagcttgttctgaggaggcgcatgattgttcccttggttctgctggttttgaagttgctgcatcatcagattcatcaactgtgtctgttgggccaggacttgagcgagcgtgggattctccgcattgttgttattgttgttgttgttggggccattcccgttgctgcgagtgagcaccatctgacatagacaggagcacaagaagagaaacaggggaaaactacttaggatagggaattaaattaattaacttaacttttattgatcttaactgagtttcattattacaaagctgaagactctcacaccacctaactcaccaacttcctaacactcgaaagcaaacaaagacatgcatttacatcccaccaatgatgtaaacacatgcaggacccacacacacaaccaaacttaagcaagcaaactaacacaacgatctaaggcaatgacttagcacaacggtctaggtcttccgggcatcggagttgattgaaggctcgttcggcacgtccccatcatcttgagttggtccccactcgatcttggaatgggtgcgcttggattcctcttcatcatcatcacttacattgacgaccggaggatccgctggggctagggtagcttctttttccaccacacgaacctttggtgccaactggtagcgagggacgaatagagctctcttccttgcggtaagacgaaccctggccttctgcggtggtgcttctcccttcaatgctgctagctctttctccaaacgatccagcttgtcttctagcttgcagatctttccccgattctggtcttcacgatcttgagcggctatcacgatctcagcgcgggtttcatccatagcccatagcatctcaaccaagtgccttgtggtagcatcattctcgatcccagccggttcaaggtagctgccatgatcacttccctggggttgacgaggatggtagcgatactcggtgtcggccaaccgatcattgtagctttcacggagctctcctatggcgatccttgctacctcctgacaagcatggatgtagcttcctcctccagcctcgaacatcactgatggaatatcttcacgattgctgttcaaggtaactttgacccggcacttctcttcatcacggtcatgagggatctgggcatacaaaggggcaatcccaaatcctatgaggaaggacatcgtacgcaactcttggacaaaaccttcagtaccgaacaaatactcaggcttgtagcgcggcatctaagacaagtgacaggagggagttaagtcaattatccaattaatagcacaagtttttgggttagcttgaataaaatttgaaaagtaaaatggtaaataaagtaaaccaagcttgcatgataagatgaaacagttagaatcatgctcacaaattttgcacttttgaataacaagtttcaaaggaaataaaataaaagagggttataaaatcattatactaagcttagcttattgtagcaaaattaaataaagcagagttataaatcttttgatggtaagtgggccattagcacggtaatagatgtacagtactaacaacataggaataataaataaattttaaatgaaaacagctaaagaagtcataaactgcatgtgctattagtttggtttaattaaaagagaaaaagaggagaatagttctacttttccaatatttttagagggcttctataggtaaccatttggcataacctagggtcaaggaggctctgcaaccaatttgtcacacccggaatttctatccaaaattccaaacgcttacatgtgtataaaccctcgtccaggaatcagccgaggcacacaataacaaattgataatagagtataattattactctaatgaatattcgaataaaatgtcgttatagaggtagatagttcctctcaatcaatatagttctaagcagcggaaaataaaagaaacagcgcaggcgactcctctccataggcagcttgaccagggctacgcctaatcatccacaccatcagcatcgctgtaaaactcctcctctgatgaatgattgcaaggtgagtatatgacatactcagcaagccacgcagcaaatatgcaagtgcacaggataacaaaggatggcatagtataggctcatttgcataaacaacatttaataaatatttcagaatttaatgaaaaagtaaactattaattaaacagtattaatcgaacgctatacaacataccctgttgcataggcccaaccattcccggctgcacagtgctatctccaaactaggaattaaccattccaaaccaggagttaaacaagacattaacatcatcatttaatagagtgagaaatgtgagactaatcacgaaagacattgttagacccgcccataaccgcgggcacggctattcgaataatttaaactctggccagaggtgtaccactgtacccacaagacacaacctcaacatcatgtcaaccatgcgtcgcgatacttgacaagtacccgaattgagattgtgacaataccctctatataatacaattcaaagcagtgcaccgttcccggatcataatgacccccttataaacaaggtatggactccccagcgacccccgtgggcttatcaccgccacttcacagtctggtgctgtacaacgaaccatactatacagaaagtaaagccgttgcccacgctggcttgtggttggcacggtaaatgtttcacaaccaaaacttgtgaaccggtccttaattgtcatgaacacaaccatcaaaaccatatgatcacaacccaccattatcaagttttagttggtaaattaattaattaaccaatcatgggctattattaaaccatcattaaataatagtgaagcataagttatcccagtagtgtgctaatgtttctaagcatggctaagcaattatgcctaacatctagctgaacaatcatataaagctcaactagtcaaattacattaatccaaggtatcaaagaataaagtaatcaagaacaaaagggccataacaaacaataggttaattccacccaatgacattcgaaaataaatgcaatagttgaatagaaacaatagctttaaacgggatcaacatgctcaaagggttgtttgtgatctgtgtgtgacttgccttgctggccttggaaatcctcaaagtcttctcctgcaaaatcggactctcccggaacgtcggaatctaaagagaaaagaacaaaatctccaaaacagcacataaacaagcatgaacagtacatgtggatatttttaacatgtagatctcaattttagaaaaatttagagacttgaaccaactaaatccgagctaagatgaattagttatgtattttcaaagattaaatcgatttaaatcatttatgtagattttaattgaattatgacgcaataattaattatttttgaaaaggaaaagggaattattgcgtcagcgggtcgggtttacggtggaccgggtgcatggcggcggttcacgaaacggacggccgagatcgatccatccaaaatggacggccgagatccatcggtccacggctagaccacgagggacgacgacgatgacgtcagcgacgacgtcaccaccggcggcggctcgggcacgcatgctcgctggcgaacgacggcgcggcggcgcgaacggagggcaccgatacgatgcgggcatcgctgcgaactcaccggtgaccaaagcgacggcggacgagcaacggacgacgtcggcgacgaggaaaaggcggcggcgaccttcggcttgacaatggcgacggcgttccggcggtcaacggcgacggagaaggtgcggacagagacggcaacgagacggcgatcacgacggcggccttcccgagcggtgacgacgaccggagcgacggcggcgatggctgctcaaggtctcacgcggaggcggcgctacagacggcgacgggctaaggcgagagtggcgacgggtagaggggagctggggggtcaatttataggggctagggagcggcggtgaaggcccacggcgaccggcgacgggaaggaaagtttagggttcggaggagagagatcgatccgaatcgaactcaaatccggcgatttccaaagcgatttagacgatgtttccaaaagggaaaaggtagagtggatcacggggatcctttcccctcaatcaatttcaccggaaacggaaaggggcggccggatttggaatggcggcggcggcgcagctcggctagagtttcggcgagaggaagacgacaactaacaagtgggacccacctgtcagcggcggttgcacacgcgcgtgcgggcgggcgctcggcttgccccgacttgggccgagggagagagagagagagcggtttgggccgactttcggcccaaaaccaaaagggaattttaaaaacctttttccatttaaattattcattaaatgcaattccatttattaaaaatacttccttagctcaaataaatcccagaaaaatctaggaattatagaattaagcaaagtatttaatgaaattttatctggccccattttatattggaatttattaattaaaattagatcttctcttctaggcttttaaaataaattctaataattccaattaaacaacaatttataatttggagatttttagggtgtgacaactagttaagttataataacccaaggtatcaaggaatagagtaatcaagaacaaaagggctataacaaggcaataggttaattccacccaatgacattcgaaaataaatgcaatagttgaatagaaacaatagctttaaacgggatcaacatgctcaaagggttgtttgggatctgtgtgacttgccttgctagccttggaactcttcaaagtcttctcctgcaaattcggactctccaggaacgtcggactctaaagagaaaagagcaaaatcaccaaaacaacacataaacaagcctgaacagtacatgtggatatttttaacatgtagatctcaattttagaaaaatttagagacttgaaccaactaaatgcgagctaagatgaattagttatgaattttcatagattaaatcggattaaatcatttatatagattttaattgaattatgacgtaataatgaattatttttaaaaaggaaaaagggattattgcgtcagaggactcggctcacggtggaccgggtgcacggcggtggttcacggaaacgaacggccgagatcgatctatccaaaacggaccaagatctaacggtctacgaccggtctacggtggacggcgtcgatgatatcagcagtgacgtcatcaccgacggcggctcggcctcgcgtgctcgccggcgaacgacggcgcgacggcgcgaatgaagggcacctatgggttgcgggcgacacggcgaactcaccggtgaccaaagcagcggcggaaggtcaacggacggcgacggcgacgaggaagaagcggtggtcaccttcggctcgacgacgacggcggggctccggtgatctacagcgacgacggagaggcggacgaggtcgacgacgacttgacgatcacgacggcggctttcccgagcgacgacgacgaccagagcgacggcggcgcacggctggacgaacggcagcgacggcggcgctagactacacgacgctagggctctaccggcgacgagagacgtagccgagggtggtggtgggtagaggagacaccgggggtccttttatagcggctagggggcggcggcgaaggcccacggcgaccggcggcggcgatggaaagtctagggttcggggagagagacgaatccgattcgagttcgaatccacggatttccaaacgattttagccgatgattccaaaagagaaaaggtagaggggatctcggggatcatttcccctctataaatttcaccggatcgggaaagacgcgatcgaatttggaatggcagcggcacggctcggctagggttcggccgggcgacggcgcaaggaagacgacgagtctgacaggtgggtcccacctgtcagcgggcgagggcgcgcgcgcgcggacggcgctcagctgcgggccgacctgggcttggagagagagagaggtttgggccgactttcggcccaaagccaaaagaggatttaaaaaacctttttcactttaaattattcatgaaatgcaattctattgattaaaaatactttcttggctcaaataaatcccagaaaaatctaggaactatagaatcaagcaaagtatttaataaaattttatctggcccaattttatattgaaatttattatttaaaaatagatattctcttctaggcttttaaaatcaattctaataattccaattaaacaacaatttatatatttgggatttttagggtgtgacataggtgacgaatattcgtcacacgaacgttagatttcacaacatgacttaaaattcaattttcatgacgtaaattagcatcacctacactagtggagaaaccctttttcctcccggttcgtaacccccctttagtcccggttatccaaccgggactaccaatccgggactaaagatcgctatctttagtcccgggtgaaataacctggaccaaagatcgatctaccaatttttttcttatttgcatggccctattgctgcaaggtttagagtttatgttacaatacatatatatgctttatatatatatatatatatatatatatatatatatatatatatatatatatatatatatatatatatatatatatatatataggacggctctttcgtacactcaggtgtatgtacacccttttattaatggatgatccaattagcattcaaattagctatgaaaaaaattaataatattaatttccaaatgactgcatgcatgtggcatagctgcacaccggattgggtgcagatttgaacaagattgttggcatgcatttgctttcaaatttgataacttaccttagatatccccaccttttctagtatgcaactgtcgcgtcccaaaacgactctaaaatgcatcctcaaaattgtgcatagaataattaaaatccatgtgaaagcctccaacaattaaaatgtgcaaagttaaaagtcgaataaggcttggaggatttttgtatatttcctaaaagcctaaaatgcgtaaataaattttagtggaattttcagagcacaaataataattaagaagaaataaacaaagttaaaaaggttttataaaaagaaaaaccctaaaaagtctttttcccccttccccctcttgggccggctcggcccagctccctccctctctctcctctcccccgcggcccatccggccttcccccgcgcgcgcgccgctgacgggcgggcacgcccgccaccctcgctgacgggtggggcccacccgtcatcccctacctcgcgccgcacccgccgcctcgcccgtgccctagcgccgccgccgccgcggattccgccgcatcccgccgcccccgcgcgcaataaagagggggaaatcactccccgtgattccctctccctttccccccacttttccctctctctctccctcggattcgtttggaaacactcccgcaaacctcgccggcgccattgatggagcccgagatcgccgcgccggtttccttcccctccggccgttctctccccctcccaacactatataaacgctccccgtgcctccctccaccgtttccgccactcgccgctctctctccccgtcggaatcgagctcgcgccgtcactccctctctccgccgtcgccgccgagctccggtccgccgccgtcgtcgccccggaccctctcccgtttcggcgtcgcttttttcgggttcgccgcaacctcgccgacctcgtccacccctccgtttcgcccgccgaccgccggaacgccgtcgccctcgttgacccgagccgcgccgccgccttcctccgctccggtcgccgtcccgtcgtcaccgtcgacccggggtgagccgtggaccgccgtttcacttcccccttccctcccctttctcgggcgccgctccgccgcgccggtggtcgccggcggcgaccatcggggcgcgggcgcgtcgcctcccgtcggcttttccggcgaggccgccttcgggcgcgccccgcggctgccatgtggggcccggccgtcagccgcccgcgccctcgggtgcggctgacgcgtgggacccacggcgccgggcggcgtaatccgcgtgcacccggtccaccgtggaccgagaggctgccgcgtgggccccactcccgtggacccggtccgcgcgctcctcccctcagctgacttaataaatccgattttaaattaaaatttaaatgaagaaattcgcaaatatccatttaaagagcatataaacttcaaatggccataacttggccatttgaactcggaattggaccgttcaagtctctaatttttccttaagaagccaagaacccatttttgtgctttgtttctgtttgttatatggagtttagtagagtaaaagccgtttcttttccgttggtcgtgtagacgctgcagcttcggaagatccgctcttcgtggaagttgaagccggcgtttgggaaagcgagcaaggcaagtcacatcatctttgaacatattgaatcccagtttgtaaaattatgttgatttaaattattgcattatcgctttatttaaattcccgcgttatcactgttttatttagccatgcctatttacctttgttatgaccttattatcattgttattgttattatttccttgttcaccctagaataaacaaaaccccaactagtggacactctactcatggtatcactagtatgattttaggtagatgcttcgcttttaattaggtaacattaggcggttttacaactctagactttggggatattcatatcacgtggacactatggaatggtttggttatcgtggaattggcttcacaccgctccttccattcaaaatccccaaaatggttttaggctgggctcggggtgcatggttttgatagtagcacctcggccatataaggaccggtcttcgggcctctgttgcaaagcactaccgtacttccacatgtctagtgggtaaggcttagtttgtggctcagtctagttataaacaaaagtacacggatggagatggaagaagtcgggggtcgatggacatctccagggcaaatgaaggctacacgagctgcggcccggtagtcgagatgtcatggcacagggccggtgtcctgctgctaggggctcagtcctgcctgcctgtcccgggggttccggccgtaggtgggattgggtcggtactcttgtctatggctaggatgggttggaaactatgtcacgtcttccgtctgtataccgtggtggtatgtggcacgtggttacacgtgaggaagatgtgtcttgtgggtaaagatgtacacctctaatcagagtataatctattcgaatagccgcgccctcggttatgggcaagccgagcaatgtacccaagttagtgttttaattcttaaaacctgcttaacaactaaaatgtggaatggttggcctgggttggcttgggacgagctgggacccagggtcgggttgccagttcggtctgaatcatcgtaggccttgggttaaggcaggttcgtgtgggttcacggccttgataaataacattgtatagtactagaatcgtgtttgcaaaatagccctgagcaactaatgtctttaaatgctgtttactgcaaccctaaccctttatagtataactcctttgtactcccttgcatttattctgcacttgtgggtgtgtcttgttgagtacggtggttgtactcagtcttgctcaatttttcccaaacccagaagaggagttcctagaggatgaaggcttcggtgtctagctcgtgcctgccgtcaagtgcctgtggtcgtcgcccttgtcttccgctgtttctcgtttgtctttttgtgtgctgggccttcgctgcccgtgtaataaattaactatttacgcttccgcttgttaaactctgaattgtatcaacttttggtgtaccttgcctcctgggacaaggattaatgcacgcacgtaaggaacgcccgttgggttatttccggtcgtgacagcaacagtatatactgttttttaagccgcagtatatatactctttgaagtgatgagcagtactatatactagttttttttattagcagtacgtaataaggagtaccttatatttttgttgtagcagtgaatagttctttttttaattagcagccgtatatacttactccagaactaacgagtatatatatactgattatgtctttttattggtacgcgcagtatatactactgcaacgagcgaatgagtatatactgttctttctcagaatgagtatatactgattttttttggaacgagtatatatactgacttttctcggagtggtatatacttatttcttctccaatcggtatgaacagctactcggagtggtatatacttatttcttctacaatcggtatgaactcattgaaggagtatatactgcttctttggtcagtgtatatatactacattcctcattgaaggagtatatactgcttcttttttttatcagtatatacatttgttattaattgagtatatattgtatgcactacttgtcctgtcagtatactgcatatactaattgtcatgtttggtcggtatactgcatcgtcctcgctaaaggaggttatactgccttttcgtttgatcggtaaatactacgtatactacttttttttcactcagtatataaataagtatgtaccagtatttcttagataagtcgtatatttgctatccatggaagctggatgcatatgcttttcagttgaatagaataattaatatgcttttcacgtgcaaattcagaagtctgcctgaatcactagcaaagtatcggctgttgcattatgaataaacctaaattaatgaaataccctagaagggcactgaattctgaatggacattaccagaccaaagaaaaagatcaacgcagactttcggaaactaagaacaaaacataacgggatcacccctcgatgtggctcatcgaagaatctctgcatccccacagacagatctcggttaacatcgatgggatcacgccgaccgcacgccagagagaggtggacaagaatgtgtcttcctggattaacaccgttagctaggaatcacgggttcgatgccgacgacgatgctgttgccgcacggccacacatgctggactgttctgtcatcagcaccatctacgtccacgatacatgcatctcgcatttgcatgcaccaaacaaattcgatctgcatgcatgcattatcgatttgcaacctagaaaaagcaaatcaagaaaatcgaaagaaggaaggacttgcctgcagcatagtcgatgttccagttccggacgacgctcagcgtcgtcttgatcgtagcatgggcctgcatcgatgccgtcgccgtacggccacactgacttgcccgaagatcaatggcgtcgttgtctggtcacagctcttcggccagccagtcgcctgcggatagtcatactgaaggcattggtaatggaagacgccggcgtagacatcagcagacgccgtgaccttcgaatagccgatgggtcgcgccgtcgtcgccttcgaatcgccgatcgcgataacctgcggatcgatctgtcgattctgtttacaaccacccacgagattttaatacgagctattcaaaagggttctggttagtacggaataattcagattatgaggatttttttcgtaactaaaaatcaaaacgggctcggtatatggatccgcttgctgacttgatcggtggtgttcgctgatggacggtggatggaaccgggagtacctactcctgggagtatagaatcattatatatgtatatatatatatatatatatatatatatatatatatatatatatatatatatatatatatatgtgtcctatatatatatatatgttgatgaactgctgtaccaactgatagtccatttcnccactca

SEQ ID NO: 4891 - DNA, 14346 bp, Oryza sativa
  unsure (1)..(14346): unsure at all n locations
cttctttaatgaagcctgccgctaacagcttggttaattcctccttgatcgcgtccttcctgtcttgcgcaaatcggcggagtcgttgtttgataggctgggcatcttctttgacatgtaaggagtgctcaatcacctctctaggaataccgggcatatcagatggtttccatgcaaagatatctttattgttctgaagaaaggtgatgagcgcgctttcctatttacaatctaactcggcgcctattacagcagttttagtagaatcagagggatctaggggaatctttttagtcttagcttcgctttctccgctttttgaagtcttggtagcgggcatttctccttcgctcgtcgtggctgcagccagtcggatatcctctcgggcagacgctatctcgcgggtttgggccatgtcgcaactctccttgtcgcatgtgacggcttgcttgatgtcgctccgtagggataggactcctcggggaccaggcatcttcatcatcatgtaagtgtagtgcgggacggccataaacttggctaacgccgggcgtccgagtatggcgtggtatgctgtctcgaaatcggcaacttcaaagctgatattctctgtgcggaagttttcccgagttccaaaagtgaccgggagggtgatctggccgagtggagttgcggataatcctggaattactccgtgaaaaggtgcattgctgggttttagctcggagcgaggaatctgcatatcatccaaggtcttggcgaagaggatattgagtgcactgccaccgtcgatgagggttctgcgaagcttgacattacggaccactgggtctagtaccagggggtaccgccccgggtggaccactcggtcaggatgatccgagcggtcaaacttgattgcaatctctgaccatcgaaggtactggggcgtgtcgggctgaacagcattgatctcccgttcggtcaacttttgcttccgtttagactcataagccaaggggccaccgaagatatggttgagctccttgcggtggtcttgaaatcctgccggggcgtcgccgtcgtccttcttcctcgacgtgctttgttcttcgtcggagttcttccgtgtagtcttggtgtattgatccgcgaattgcttgtagacgaaacaatctttggccacgtggttggagttaggatggtgcgggcattgggagttcatgatcttgtcgaacgtgttgacgcgcgagcgctgtcgagaagagtgactggcggttgcaacaagttccgcaggcttacgcttgcggtccttatgattgttacttccacctcctcccgtagccggcgtacccttatttggcttccaactaggacccgactgctttgatgcggtgacggcgtcttcagctttggcgtactcgttggctttttcaaacataagcttgactgtcctaggaggtttacgcccgaacttgccaaccaattcttcgtggcgaatccctttggtgaaagcggcgatgataacgtcgtcggtgatgtcggagatcttattacgttgttcagaaaatcgccggatgtaatctctgagggattctccggacttctgaataacgttgtagaggtcgtattgtgtgccgggacgctcgaaggtgccttggaagttggcgatgaagtggtcgcgtaattcggcccaagatccgattgtaccacggggtaatccatggagccaagatcgggcggaatccgctaaagccactggtagatagttcgccatggccttgctgtctcctcctgctgcgcggattgcaagaccgtagacggtaagccacgattctgggttagtggtaccgtcgtacttctctattccagtcggcttgaagccggctggccaatccactcgacgcagatcgtcggtgaaggctgctactccgtcaaggtcgtcgtcgtggcggtccggcgaatgatgatggcctcgagctgctcggcgctgtatgatcgtgtcgcgaagatcgacggggcggcgacgaggtggtgagcgaggccgttccactcggcgctccccatgatggtcgggaggtgagtgaacggaccgcccgtcgtgacccttgctcctgcgattggatcctgcgccggtgatgctgaggcttggatgacggtagtcatgagatcggaagtggggaactcggctgccagtcggcgtgtggacgctttcggagttaactgggaccgaagccgcaatcatggtcttcgtctggttcaagatgttgacgacgtgatcagattgattgagctcgttttccttgaggagggtgtcgaggagggtgatcgcggcaaccgcattctgctgaggggtgcggaaaaccggtgtcccttcaacatcttgttggccgatgagatcacgcgctcggcgccctgcttccaaagctcgctgtcgtcgatcttcagcctccttcgcggtccgctcacgctcctgctgctcacgccgtaaccgttcttgttcttgtgcttgacgctcctcctccagtcggagacgctcagcctcgcgacgtgcttcggtctcccgggcttggcgttgctcctccgtctcgttatcggccatgaagacgccgaagtagagaggggtgtagttgtcatctaggctttcgtcgaagtcgtcgagatccggttcgttgtagcgagagctaaactcgtcgtactccacgatgtctgtggggcgcgagtcgacggtgggagagctgtagtggccgtccaactgatccgtcgaaaccgtgccgagtggttggaggatgacgccgacttccctgaagctaggcgaaatcggcgttgaagccgacttccgcctaggcctacgggatgaagacgctgtcgtgatgggggcggccgccgaatcgtcggggagcttcattaggatcggtgggtaagccccatcatcttgatctggtgtcgttggggaagatgcgatttcgcccgagtggtttgaagccaactcgattgagatggtcttgaagtaactttcggccgcgtttgggagtccaaacgggaccgaaagccggttctctcccgactgggccgacaccgagtcaaggagagagatcttgccgaagttgttggtgacgaagtcgaggctgccgaaccgaaacgtctgcccgggtgggaagacgaggtcgtcgatgccggagacggaacccattgcactgatcggcgaaaagcttgacgctacccctacctggcgcgccaactgtcgaaactagatttcggcaatagtaaaagggggtggctatcaagctagaaaagtgtatgggtttggagacaaaggatttatacaggttcaggccttcttattcaagaagtaataccctactcctgtccggggatggatccgccgagtgtattattgattgtatgattgggagaaaatcaacctatgccccaagaggcacccggaccctccttatatatgggaaggagtccgtgttaaaaaagataatctatatccctaacggaatatgcagatacaggtaaaatacagtcgtaaccgactaagtctcaaggtgtttccttgatgtacaagttaagaaacgaacccgagatacaaataagatattctatatatattcggtatcctatatccagtccaaatatcctcgccgtgtagatatgggatatccataatctccacaggccttttgctctaatagtagattgaattgtttttgaaggaacagaaactattccgttacatattcataattataggaacagggagattagcttctgttgcatgcgtatacatatttatgttatgcagattagcttctaccatatttttagcctgttttttcatttgccggctagtatatatcttctgtcggccaggagcagaaaatcaattccaaaaagaacagaacatcagttagttaggagcagaaaatcaatttgaaaagagcataacatcaacaattgcatgtgctgcccgtttatatacaacatatcaccaaacagtgctcactttcaaacgaaattaataataaaaatattggtttgagagcagaacatattctgcctccttataagtagatcgagtttgttttgaaagaacagaaggtattcttctttcttcttgccaaagcttcctataagtaaacggactttgttttttgagcagaagatatatattctgctttcttgtttctagaaacagagataatttcaggtacaaaattcaaatctctttctgctccctttctaaccgatgttctgctcctttggtagtttctgctgattttcaagttttggatcaaggagcagaacttaccgatgatgagatttaattagacgaggagaagttgaatatgtactacttatctaagtacgtacacagcagaaactatacccagcagaaactcggttatgcagaatatgtactacttatctaagtacgtatagatgacatacagtatgttagtaatcaaccgacagaacatgtactgccatcaaaaacagatacggagaaaaaaattaggtggctgttctgctaatttttttaagttgatgttctgtcattctttttaattcatgctctgccattttttctgttggccggctaatatatatgttccaccggcacgagcagaagataatatgccaggacgagcgggtgcgaggaagaaactgcatccgagaagttggtttgcatgcagccgatgatttagcaactatctgaactaacaaactatttaattaaacaacacaggtattcatcgttattggatcctcgtcactccattaactgaatccgatccataataggagggagtaactactctcggtagtaggaaataggctatatatatatatatatattagaaaaactattctacacccggggtatagaatagctattctatacctccctcccaccaacccacctcctctccccccaagggcccaaaacccacctcccacctcggtcaaaggccagtcaaaggtctctcacgtcggtcaattctaggtcaaacccgtcggtgactttccccacgaccctctctcttcttagctctcgtctcggaatgacgtagtaacgtgttgttcatcgtgtagtaacatagtgttttacttgcagtaacaaaattaaaatttactcataatatacttatgatggatctacttttggtaagcaattttttttgaacatcatggtgcaaacggtttttaaaaatagtacatggtgtgagagatattacccttcaaagatttgtttttgaagatttaactctccacaagtagtaatactatatcaaaagttttactactgcctgttttgcgttactgcaatcacatcatgtcattactacaagatgtagtaacgattataattttcacgtaacatagtgtcttactgtaattacttgataacgttactgcaagactataagttttgcagcaataaagcgtctaactacattttttgagtagtgttactgcataaacacgtggtaacgtgtaattgtcgtgcagtaatacttttacttttgtgcagacttttgtgcagtgacaagtgtatgattagcatctgagacttttaacccatatatttttgtttcaattcctgaattactgcaattcaccacaatattacggtcaaaagtgcaataacgtcatatacatgcagtaacgttatattggagggaggaaaccaattttcttgagaagagggaggaaaaacggttcttgaggaggggagtacgtagatgctttttgaagtttaatcctccacatgcagtaacacgataacatcatggtggaaacggttttaaaaaataatacatatcttatgacatattgcttttcaaagattgacattttgaactttagccctccacatgcagtaacagaatgtgtaatttacagtaataggggtttatacatgcagtaacatggttttaccaaatgtataaaattattcaaaatactcctacatcaatcagaccttgctcaaagccacctacaaactttatctatggcccacctattcgaacttcatctcgtaaaaatgacatagtaacactgcatttatcatgcagtaacatatctacttggaagtggtaacatgcacctattatgtagtaacgcttctacttttgtgtagtaacaagtatatggttagcatgtgaggctttaactcatatatttttatttcaattcctagtttatgtagtaatactattcaagaaaatgcaagacactttgttactgcaaagcttattgtctttactagactcttatagtaacgttgtgatagaaatgtagtaacgtacagtagtaacaagtaatgctattgtattattacttgtggagagtcaaattctaaaaagaaaagcttttaagaacaatatctctgatgtcatgtatggttttttaaaattgtttgcaccatgatgctagaaaaaaaatgcttatcaaaagtacatccatcatgactatatttcaattatatttgagcgttgttactgcacgtaaaacacagtgttacgagacggtgaccgccgcgttactgcacagtttcgcgaaacgagagctaagaagaggtgggtggtgaggggagttagtaggtgggtttgactgagctttgaccggcgggagggagctttaaccggcgtttgaccgaggttggaggtggtttttgggccttagaatggagggggaggtgggtgtggcccttgagagcgaggtgtacaatagtcttaccctatatatattacatatatattacgcacatatatatatggaatacatatatatatatatatgcatatgtataaatacatatacatgcatgtatagtacaattcatttgctcactagctagctatgacttcgacgccggcgttatgtcaaaagaagaaagaccgacgttatgaattgtcgatccgtcgtagtagaattcaccctcgggattaaggacttcttcgttgatgaatctcatcagttgttcctgaacaactgtgatagaatctttgtgtgggagattgtccctgatgtgaatacactatcattcgaaaaataatgacatatgaatatatgaaattaataaacaacaaatcgatacgcaatgaaattttgaatggtttatatatacgtacatcgagctctcgtgtggtgtagatttgggttgataggaagtgggcatactcgcatacgtagtagccgcacaggttagttccctggtcatgctttgcacattacatgagaaaggacaagagatttaatatacacttacattaactgtaactagtaatcatatataattagcatatgcatgatttaaaattgttaaaaattctaattatcatatgtaaataccacatgcatgatttaaaaatgttaaaagttctaataatcatatataactagcatatgcaaaatttaaaattgttaaaaattctaataatcatatgtaaataccacatacatgatttaaaattgttaaaaattctaataatcatatgtaaataccacatgaatgatttaaaattcttaaaaattctaataatcatatataataagcatatgcaggagttaaaacttttaaaattctaattatcatatataactagcatatgcatgatttaaaattttaaaaattctaataatcatacataattaacatatgccgtacaacaattgatttatatggatattcaatacatccaaaatattttacatcgtgtacacaacaattacggcaatacatcggcggtgacggttgaccgcacgtacttcctcctcactattgttccttccttatgatcgctacgtgagtaaggggtgtcttcgtttgataggaggatgctagggtcaaccgtcaccgtgaaagggggttgcccatcaaactgatcataatcttcatcagtcttgtcctcaactccgatgatttttcttttgcctgggagaaccacgtggcacttcggctcatcaggccctttgcccttctttcctttgctagacatgtccttcacataaaaaacttgcgttacatcattggcaaggacaaaagattcgtccgagtatcgaaccttgttaaggtcaaccgttgtcatcccactgtcatcaatcgttacgcctccaccaatcagccaaactcattggcaccggaacagaggaaccttgagaggtccatagacaagttcccatatgtcctcgatggcaccgtaatacgtgtcagttgtaccatcgtgtcccatggcatcgatacgaacagcactgttctggttcgtgctctttatgtcttggtttctcgtgtagaatgtgtacccatttatctcatatccttggaatgttgctatcaagccagatggtcccctcgccaggtaggcaagttgttggctaatcgtctcgttacccatgagatgttgtcgcagccacacgggcaatgtatcaatgtgatgccgtgtaatccatgcatcagacttaccgatgtttctggcaggaactagagccaagtgctcctcgatgtaaggagccaccaatgaagattgttgcagaaccgtgaaatgggctttacggaataaattgttgtctaccgtcattgctgcgttccttccgagagtcccctttccccgtagtctcccttcatggcgtgattcaggcactctgattgggcgaaggtcttcgataaattctacgcagaattcaatgacctcctctgttccataccccttggcgatgcttgcctctggatgagcacggttacgaacatacttcttcaaaacgcccatgtacctctcgaaaggaaacatgttgtgtagttacacaggcccgagaataccgatctctttgacaaggtgacaaagcagatgcgtcattatattgaaaaatgaaggtggaaatattaactcaaagctgacaagacattgcaccacatcattttgaagggcttccaatctatccggatcgatgaccttctgtgaaattgcgttcatgaaagcacattgctttgttattgttgcccggacattgtctggaaggataccccgaattataactggtagcagttgtgtcatccacacgtgacagtcatgagactttaggtttgtgaacttcttctccttcgtgcttattattcgctttatattcgtgaaggacgtccaagaattcccaatagggtaactcccaaaatatatagttctttttccacatcgccgcgtgaccatcttcgctatcaataggctggctgccaggcccctttccaaacactactttaagatctttcaccatagcaaacactgtttttccactgcgatgtttaagcttcgtacggtggtccgccttatgttcaaagtgattgcctttcttccgtacagggtggtttgcagcaaggaatcgacgatgacccatgtacgcaaccttcctacagtgcttaagatacgtactttctgtttcatctatacagtgagtgcaagtcttggaccacttattagactgccccgataggttgctaggtgtaggccaatcgttgattgttacgaacagcagcgctcgtaggttaaactcctcatgtttgtcctcgtcccacacggggacactttctttcttccacaacagtttcagatcttcgaccagtggtgttaggtacacatcgatgtcgttaccaggttgcttggggccttgaataataatcggcatcattatgtacttcctcttcatgcatagccaggggggaggttgtagatacacatcataacgggccaagtgctatggccgctgctcatctctccaaaaggattaatgccatccgtacttaaaccaaaccgtatgtttcgtgcgtccttaccaaagtctttgaatgttctgtcgatgtttcgccactgcgaaccatcggcggggtgtgacacagtatcccgtcctgttgatgttcttcagcgtgccaatgcatcattctagcatttccccttgctcctgaactaacgccttagccgtggtattatagggaaataccacatcaccttagcaggaattctcttcttcgttggctgcccataaacttcacatggatcatctcgtctaatcttgtatcgtagtgctttacaaacagggcatgcttttagattttcgtactcctcaccgtgatataggatacaatcattcggacatgcgtgaatcttctgaacttctagtcctagagggcagactatcttcttagcctcatacgttgtctcgggtaatttgtttccctccggaagaatgttcttgacgagtttcaataaatcgccaaatgtcttgtcactaacatcattttttgccttccattgcatgaactccagagtggtatccaactttttgtgcccctgctcggaacctgggtacaacgacgttctgtggtcctctaacatacgcttcaatttatgggcctccttttcactttcacagtcctccttggcgtcctacaacatctgaccaagatcatcgcagcgtcgttattgtcagcatccctgtccacctcgcccgtttgatttccttcaaatccagcgtactgagcccagtccggaatgttctcgtcttccacttcatcttcttccatctcaaccccttgctcaccgtgggatgtccaacaattatagcttggcatgaaccccgactaaaacaagtggaaatgagtagtcctgcatacagaatactccttctagttcttacacttattgcatagacaacaaataaaacccttatgcttgttagcttcggccactctcaaaaaataatgcaccctgtcgataaactatttggaccaccggtcagcgtacatccattgccgatccacctacatgaaatgaaaaaaagtcatacataaataaatattcataaaataatgacagccatacaataatgatcaaacaattaaaaactctttcaatagtcatacaataatgacatatcattattcatacaataattataaaataatccaacaaacaattcttatttattatttttgaatttttaaactaatattaatgttgtacttcttttaattttcaatttagtttgttttctatttttcaagattaattttcattatattttaaactatgagaataaaacttttttaagtaaacaaacaaaattcctatatattcttcttccccacacaatttgtttctctcatcaacttacgacaaagttttggagacaaaaaatgtgtgaaacatagctccaaaagtaatataacaacaaaaaacattggaggatgaagttactaaccttttagatacctccgatttgtatataatcaccaaaaaaattcacaagaaattttggcatgacctcccctcttttttggagaaaatttgaagcttgctcgggctggaggaggaagaagacacatataaagagggagataattagtcccggatgatgttatcatccagggctaaaaatcgccgagatctttagtccccgggggcctgacaaggcctaacatctttagaaccgagactaaagatgatcttaccaactgggattaaagatcatatatgcccgctgtagccaccaaccgggactaaagatgatctttagtcccggtttttagtggaaccgggaatattgtgaatttcggctgaccgaccaaagatggtttctccaccagtgctatgataagatctcttgtagtgacggcttgtttggttattagagaggcagtttgagacatacggcatacagtttcatactgtgtgcgtgccaagttggcaattggatcctagtagcagcaaattttgaaacactcaacccaacccaatccttcttctcttaatcttctcttcctactcttgtgtttgtgtgtgtgtgtgtaagaggctagtagagttagctagcctaaatttttttgcacgttgcagctactagctgtgctgctggcttgtcgtcctctgcttgaactttaaagagagagctaatagatcggtgatccgcttgggtttctggtgatcatatgcaacatggactagctacttggatttgttcaaaggatctgcttcttggatgctgtctgggcacgtcgccatgcatgcgaattttgcggatggagtcaaaagctgcatgcacggagctgatttaattaagggcatgttcagattgtagtcaaaataaaccttaccaagtttttggcaatgccaaaattttggcaggatttcttatgtattaaccaaatttggcaacaactaaacgtagatatttttttggtaactttggcaaaaaatgatttggttgaaaatgacatcaaagtgaacaggccctaattaacttgttgacagctactccctccattccaaaatataaggcataaccacccttaactcaaagatcaagaaataattattatcatcttatagtttgaatcatgctaataaatataatgcatgcatccaataggattagataacatgagagtaaaggatttaaaaaagtaataacttaatgaagaagatgtcatagttaattgcatgcttgcatacatgccttatattatggaacatctaagaaaagtggttgtgccttatattatggaatagagggagtagtacctaattaagcatgtgtgttaatttattattaactagtaatctgcccgtgctaacgctgcggcgacatttagaaatacaaattaagatcgatggatatagctattatgttgttaattaaattgccacatgcataaaataacatagttattatcctggttcaaatggagtcattagtgacaacataccatggtaaaagcaaaagtaattaaactttggaacttggcaccttgaaccatcaaatccttgtctaccatgctgtctccctgtcaccccccccccccttaattctaaattaaatggatgagagaaagagattaatatagtttagtgtgatagtgccaacacatggaaaatttagagcttctagttctctccttctacatctctcttaaatgtcggaccaagttcttatggggcccactcatcatacaaccatagccaacacatcatctgctcttctctcatttaaatcttcttttatttctcaaaaggtgagagaaaggtttaaattgaatttccacccaaaatgccactctaccactccaagccttctaggaaacatctatatatgggcctatttgtcgtccaaatacctgcaaacaaccttggtgaatcatctctttatcctaaattatattttcaaagagagaaagaaagagagagagggagttaaagtccaatttacacccaaacttcaccatacctctcatcttctcataggaaacatctaaatggggccactagacagccactcatacttggttgagtgaagtacaagtgggatcacagcctcaaaccactgccaactcctttaaatcgtttctacccctcatgttgacaactagctctcactttccaccttcacttttaccattcactactacaaccaagatttttgtgtgagggctaaaacgatttttgcgagcgggtaggcggcccgcacgcacctaggggtctaggaaaatgatgatttttgcgtgcgggtggcgcacccccacgggaaaacaaaaatccgaaataacataattttttttaaaaaaaacgaaaccctagaatccggcggcgggcttccgcccgatagccatagtgccgcctgcctcccgccggcctccgcgccacccaccgtcggatccgcgctcccctccggctgcaacgccgccgacgcccctcccctccgccggatctagggagggaaggaaggggagaggaggggagctggatcccacgcggggagaaggcggctggctgccggatccatgcggggacgaccgccaccactggattcttgcgttgacggccaccaccgttggatccgtgtagggactaccaccgcccgccggatcccgcgccctccaccgcagccacatggaggaggccggcgcgctcctactcccaccaccgccgcgccgctgctgtcgccgcgtgccgccgctgctaccgccgtcgggaggagaggagaggagagtgcagagaggagaggagaggcgtgagacagagaagactgagaggagatgctctgcgtggaaattttaaagtggaaaaagggatagaggggaggggagaggagagaaagagggaaaattttaaagtgggtgagagaggaaagagggacttagtatttttgcatgcggctctcttaataggtccgcacgggaaaatcggctcattttcgcgtaaagtccataaaagaggaccgcacggaaaaatcgatttttcccagacgcaacgagttaccactcgtaaaaattatgtttgatacaagncggtacacgggtagtaccatncccgcagc

SEQ ID NO: 4892 - DNA, 34997 bp, Oryza sativa
  unsure (1)..(34997): unsure at all n locations
aatgtggggccaacatgtgggggtcatcccctacctcgggctggcagagccaagccaaacaaccgccgcttttcatctaattcctcatcaccgggtcgccccagagtccatttgcttaagggaaatcattctcctccttatcctctccctttcccatagagtttgggagatcaattttgcccgaataaacaaatcgaattcgttttgagtttatctctcctaactaaccctagtttttcccggctccattcctctcggttggagtccaatccgattttcccagaagcgacgagttgccgcctgcacggaatctaaaagggtccctgtactagtgattaatctaggcaactcgccactgtgaacctcatctatttctcacagtgttccactatgcaaaccaccaaaaactacctcggaatctccaagaacttccacttactcttttcacctgaaggagtttcatccatcgcacgtattctctggtgagcttcaccgcactccaaccatgggaacgtgaagttccttctctacctaatcaatccattttctttgttcctattttggcatagatcgaacagttggtgatatgctcgtcggcgttcccggtccattgcgccaccatcgcccgacttcgtcattcccgtcgactcgaaccatctccggccgagccattgcgccaccgacgtcgcctacgtcccaggagaaagacgcccaaaaatgatcaagccaatatgccgccgcgaacgccatcagtcgccgttgccctcctattgcctctgcttccctagccgccaagtcaccgacatgtgggccccggctatttagccacttcattaggcgtaaggactttcattagtagaaatttaaatcttgtaaggttctttttgtaaaattgctttgtatgccatgtgggcctatggacctaaacgcagttcacctaatgcccatggacctttttgtatagggtttagggtaagtcctaaaccctacttagagattactatttcatgcattcattacttgatataatagcttgatgagtatgttgtactcaccattgctttaaccctctctttgagaatcaatttggagtttttgctgaagccgtgagtttaaacatataaattagtttcattccaacttagttcccatgtatagattagatagatggtttaattctatagcaaaacattagagttggctcatcctatagcttctacagtaatagatagccacaatcttgtaaataccctattattttatgtaaagaaatcacctttggagccttgatcaaatgtatgcgatgaagattcagattgttgaacctgtatcaatctactgatccagggcttgatacagtttaaacatgtcggttactgaatctttaattttgggacctgacaaggtgtgtgggtgggggcctagagcggccatcccgctcccccctccccccctcgtcggccctgactacatgggccttaacaggccacatggcatcttatcatgatttctgggcttgatagtgacgaagatggacgtcatagactgtatgacgacagaaggatcatcacaatattaatgacgaaaagataagcattctttatagaacgccattagagacgcatgataggttgtcacgcccggaatttctatccaaaattccaaatgcttacatgtgtgtaaaccctcgtcctggaatcagccgaggcacacaataacaaattgataatagagcacaattattactctaattaataagcgaataaaatgtcattacagaggtagatagttcctctcaatcaataaagatctaagcagcggaaaataaaagaaacagcgcaggcgactcctctccacaggcaacttgaccaaggctacgcctaatcatccacactatcagcatcactgtagaactcctcctctgatgaatgattgcaaggtgagtatatgatatactcagcaagccacgcaacaattaagcaagtgcacaggataacaaaggatggcatagtatagtctcaattgcttaaatagcatgtaacaattatttcagaatttaataaaatagttaaataataattaaacaatattgatccaacgctatacaacataccctgttgcataggcccaaccattctgaacaaccagtcccgactgcacagttctatctccaaaccaggaattaaccattccaaaccaggagctatcaagttattaacagcatcatttagtatggtgagaggtgtgagactaatcacgaaagacattgttagacccgcccataaccgtgggcacggctattctaatagtttaaactctggccagaggtgtaccactgtacccacaaagacacaacctcaacatcatgtcaaccatgcgtcgcgatacttgacaagtacccgaatagagattgtgacaataccctctatataatacaattcaaagcagtgcaccgttcccggatcataatcacccccttataaacaaggtatggactccccagcgacccccgtgggcttatctccgccacttcatactctggtgctctactatgaaccatactatatagaaagtaaagccgttgcccacgctggcttgtggttgacacggtaaatgtttcacaaccgaaaatcgtgtgctcacaacccatcaaaaccatatgctcacaacccaccattatcaggttttagttggcaaattaattacttaaccaatcatgattaaccatcatgagctatcattaagccatcattaaataatagtgaagcataagttatcccaatagtgtgctaatgtttctaagcatggctaagcaattatgtctaatatctagctgaaccaatatataaagctcaactagttaagttataataacccaaggtatcaaggaatagagtaatcaagaacaaaagggctataacaaggcaataggttaattccacccaatgacattcgaaaataaatgcaatagttgaatagaaacaatagctttaaacgggatcaacatgctcaaagggttgtttgggatctgtgtgacttgccttgctagccttggaactcttcaaagtcttctcctgcaaattcggactctccaggaacgtcggactctaaagagaaaagagcaaaatcaccaaaacaacacataaacaagcctgaacagtacatgtggatatttttaacatgtagatctcaattttagaaaaatttagagacttgaaccaactaaatccgagctaagatgaattagttatgaattttcatagattaaatcggattaaatcatttatatagattttaattgaattatgacgcaataatgaattatttttgaaaaggaaaaagggattattgcgtcagcggactcggctcacggtggaccgggtgcacggcggtggttcacggaaacgaacggccgagatcgatctatccaaaacggaccaagatctaacggtctacgaccggtctacggtggacggcgtcgatgatatcagcagtgacgtcatcaccgacggcggctcggcctcgcgtgctcgccggcgaacgacggcgcgacggcgcgaatgaaggacacctacgggttgcgggcgacacggcgaactcaccggtgaccaaagcagcggcggaaggtcaacggacggcgacggcgacgaggaagaagcggtggtcaccttcagctcgacgacgacggcggggctccggcgatctacagcgacggcggagaggcggacgaggtcggcgacgatttgacgatcacaacggcggctttcccgagcgacgacgacgaccggaaggacggcggcgcacggctggacgaacggcggcgacggcggcgctagactacacgacgctagggctctaccggcgacaagagacttaggcgagggtggcggcgggtagaggagacaccgggggtccttttatagcggctagggggtggcggcgaaggtccacagcgaccggcggcagcgatggaaagtctagggttcggggagagagacgaatccgatttgagttcgaatccatggatttccgaacgattttagccgatgattccaaaagagaaaaggtagaggggatctcggggatcatttcccctctatcaatttcaccggatcgggaaagacacgatcgaatttggaagggcagcggcgcggctcggctagggttcggccgggcgacggcgcgaggaagacgacgagtctgacaggtgggtcccacctatcagcgggcgagggcgcgcgcgcagacggtgctcggctgcgggccgacctaggccgggagagagagaggggtttgggccgactttcggcccaaagccaaaagaggatttaaaaaacctttttcaatttaaattattcatgaaatgcaattccattgattaaaaatacttccttgcctcaaataaatcccagaaaaatctaggaactatagaattaagcgaagtatttaataaaattttatctggcccaattttatattgaaatttattatttaaaaatagatcttctcttctaggcttttaatatcaattctaataattccaattaaacaacaatttatatatttcggatttttagggtgtgacataggtgacgaatgatatttgtcacacgaacgttagatttcacaacatgacttaaaattcaattttcatgacgtaaattagcatcagctacactggtggagaaaccctttttcctcccggttcgtaacccccctttagtcccggttatccaaccgggactacgaatccgggactaaagatcgctatccttagtcctgggtgaaataacctggactaaagatcgatctaccaatttttttcttatttgcatggccctattgctgcatggtttagggtttatgttacaatacatatatatgcattatatatatctatatatatatatatatatatatatatctatatatatatatatatatatatgatggctctttcatacgcccaggtgtatgtacacccttttattaatggatgatccattagcattcaaattagctatgaaaaaaattaataatattaatttccaaatgactgcatgcatgtggcatagctgcacaccggattgggtgcagatttgaacaagattgttggcatgcatttgctttcaaatttgataacgtaccttagatatccccaccttttctagtatgcaacagtatatactgttttttaagccgcagtatatatactctttgaagtgatgagcagtactatatagtagttttttgtgtattagcagtacctaataaggagtaccttatatttttgttgtagcagtgaatacttctttttttaattagcagccgaatatacttactccagaactaatgagtatatatatactgattatgtctttttattggtacgtgcagtatatactactgcaacgagcgaatgagtacatactgttctttctcggaatgagtatatactgattttttttttggaacgagtatatatactgacttttctcggagtggtatatacttatttcttctccaatcggtatgaacagctactcggagtggtatatacttatttcttctacaatcggtatgaactgctctttggtcagtgtatatatactacattcctcattgaaggagtatatactgcttctttttttatcagtatatacatttgttattaattgagtatatactgtatgcactacttgttctgtcagtatactgcatatactaattgtcatgtttggtcggtatactgcatcgtcctcgctaaaggaggttatactgcctttttgtttgatcggtaaatactacgtatactactttttttcactcagtatataaataagtatgtaccagtatttcttagataagtcgtatatttgctatccatggaagctggatgcatatgcttttcagttgaatagaataattaatatgcttttcacgtgcaaattcagaagtatgcctgaatcactggcaaagtatcggctgttgcattatgaataaacctaaattaatgaaataccctagaagggcactgaattctgaatggacattaccagaccaaagaaaaagatcaacgcagactatcggaaactaagaacaaaacataacgggatcacccctcgatgtggctcatcgaagaatctctgcatccccgcagacatatctcggttaacatcgatgggatcacgccgaccgcacgccggagagaggtggacaagaatgtgtcttcctggattaacaccgttagctaggaatcacgggttcgatgccgacgacgatgctgttgccgcacggccacacatgctggactgttctgtcatcagcaccatctacgtccacgatacatgcatctcgcatttgcatgcaccaaacaaattcgatctgcatgcatgcattatcgatttgcaacctagaaaaagcaaatcaagaaaatcggaagaaggaaggacttgcctgcagcatagtcgatgttccagttccggacgacgctcagcgtcgtcttgatcgtagcatgggcctgcatcgatgccgtcgccgtacggccacactgacttgcccgaagatcaatggcgtcgttgtctggtcacagctcttcggccagccagtcgcctgcggatagtcatactgaaggcattggtaatggaagacgccggcgtagacatcagcagacgccgtgaccttcgaatagccgatgggtcgcgccgtcgtcgccttcgaatcgccgatcgcgataacctgcagatcgatctatcgattctgtttacaaccacccacgagattttaatacgagctattcaaaagggttctggttagtacggaataattcagattatgaggatttttttcgtaactagaaatcaaaacgggctcggtatatggatccgcttgctgatttgatcggtggtgttcgctgatggacggtggatggaaccgggagtacctactcctgggagtatagaatcattatatatatatatatatatattatatcctactaccgggagtagctactcctgcatcatctgctatacgtgctttcaagatttgtgcagctttctgctaattcgaatttgtcattagcgggttaattaacccgttaaaatatgccgatcgctattttcgtgggatacaaacttttgaatgcattatgcacgtcagatgtttgcattatctgcctgacggccgcatatatatatgatctgctcgtccacgcatgtatttcgcatctatagcatatcatcaaccacaactaaaatgaacagatgatgttctgctggcacactgcgtgtggtaattacgtactgtccaactatagccttgtgaacaagataattaaattgagcagaagatgttctgttctttctctctatatatacctattcaaagaataataaaaaaaggcagcacatattctgctacctttcatggatgggaagaagatattctttttgaatgaagcagaacatgcagttttctagtttctgctcccggttcacattctgcccattttctaggttctgcattttgaagttctggaggagcagaacgtatccatgctggtattcaattacacaatcagaacttgatatggggaccagaacaaaaatgttctgctcttgtttctgctggggccttgtcgaaactagatttcggcaatagtaaaagggggtggctatcaagctagaaaagtgtatgggtttggagacaaaggatttatacaggttcaggccttcttattcaagaagtaataccctactcctgtccggggatggatccgccgagtgtattattgattgtatgattgggagaaaatcaacctatgccccaagaggcacccggaccctccttatatatgggaaggagtccgtgttacaaaagataatctatatccctaacggaatatgcagatacaggtaaaatacagtcgtaaccgactaagtctcaaggtgtttccttgatgtacaagttaagaaacgaacccgagatacaaataagatattctatatatattcggtatcctatatccagtccaaatatcctcgccgtgtagatatgggatatccataatctccacagtagcccccgagacctttgcagtcaaccatcatagccttctcaaagataataatccgagtgcttcaaacttttcatgccaaggcctgccgagtagcgaagacgaagactgtaaagggcgaaaaaataaggaatatggtgcatcgaatagatgcacctaattaggtgtagcccccaactatgtgattagttaacaaactaaacatatagttgagaacaaaataatagcacaatcatgcatcatatgacagaagcatatgcggcgcctaaagaggcattctagccgactgctttttagtcataataaaaagaatccgagtggttaacactctaaaaggttcacgaatgaacacacttgacaggcatccgaataaaaaactctaaagattacccaccaaacattataaaaattatggtaatgaataagtctaatagcctaagctatgactatccatcataatgaaaacaggcatatgtggtgtaaaatccgagtaaataaactcataaaggatttaccaaccgcctaaggaaaaatgactataatatataatcagcctaagccataatattggtcaataaaaaatgcacacttacgtggcaaaaagcaacgatattgtatccaatcaattgcttaaaaacccaaacagcaccatgactatattaaaaagtcagcggggcagctatataaagctttactgtttgacaccttttaagatgcattgtaccaactcttaaaaagttgagtaactgcggtataaaaggattttaaggtattgagcacttgatcacgcgcactttggcctaagcgaaaagtgcctgagtccctaaaagaacgtgacaggccacacctgaaaattcgcattgtaataattccgaagaattatatgaccgcgtaaaaaaagattttatcagcattgggcaacactattgtgcgcataagttgccaaagcaaaaaatgcctaagtccctaaggagcacaatgggccacgctgttaaaagtattgggctgaggtactgttcaagcctaagcccattcgcacctccgatacccttaacaaaaaatcacgtgatccaagcgccacttcgtcttccccgccagaactctcgccattttccccacttcctgctacagtacagagctgcgccggcaaactagggttcaccattccactcgaatccaccttcgaaaagttcattaaaatccttcctgtgatccaccgcctcaattcctcacctctcccaagccatccctcgaatcaaatcagcgcattcaggtaaaatcgatggcgaaagagaaagaaagcttcgaaggccaatgggcaccatccgacgtgacggaggagaatctgaaggagatggtggcgcacggtgttctccctgccaaggagatcattgggtggcgaccagcgtgcggtgaggtttttccgtcccccgacacacatgaggttgtagttttttcccatttcttctatggcggcttcgctcttccgacctcaaaatttttccgcgggatattaaacttctatggaatcagcttgcatcacctaaacccaaattccatagtccatatcgccaatttcatccatgtttgtgaagccttcttaggaattaaaccccacttcgctctgttccgccgaatcttttttctcaagccccaaccgaacaagaataagccatgtgtagtcggaggggcaggatttcagttgaggggaaccctgagtcagaagtatttctctatgcccttcaagacctcaaacaaaggatggcatgcaaactggttttatattcagaaccctgagcctgctcttcccgagtactcttgtcttcctccggtgtaccaagatacttggaactctcttccgatcggagatgaagctgctcaagccttggagttgatggaccgcatgctaaaactcaaagaacaaggtttacaaggagagcagattactcggcatttcatcaaatgccgattggcaccaattaaagaaagatcccgcacagcattcgagtttgacggcaagcatgatcccaatcgtgaagaaccagactctctggactttaaaatcatgaaggagagaatgtataaaatcttctcaaatgctattgtcgtcagctactcacatcaactgccagttgtgccatataacgcattcaatccgcctccgcaggtatgtatctgaaatcttcaacctatgaccaaaatagtatcttgtcttcatgttgagttaactaaccatggaggcatcttattcaggaatatgtactgataaaatctgatcccccaatcactcagcgccggtctcctcgccagcacaccgttcagggaggtggaggaccaacaatcagaccagattcgcaacctcaaacctccaatccaactggacagacaggttctcgcaagagaaaactggtgccaaatgacgacgaaggcgacgagaaatctggggacaaaggctcgcctaataaactcccgaagcgtaccatgcccaggaaaaaactggctggccgtccaatgccaaagattagaacatcttctaggtataaacctcttggtaccattttatttcggcatgctcctctcatgaaaataatactgaatattgaaagaacattttgcaggaaaccatctgacatagacccaactggaaaagatcctgatccggctgccacagagccaaatttatccaaagatgctgagccgactgccgaaagccggccgattgccgaaagccagccgactgccgaaagccagccgactggtgcccatgcttcggatgacaaggcccatccgagtgaccagccgccgactggaaaccagtcggcagcaactgaaactgtaacaacccaagagcccccgactggaaaccagtcggatgtaagtctaaatcaagagattcctgaagctgaagcgcaggcgacaacttctcaaggaccaaaggctggtaatgactcgatgattgggtctccaaataaagaacaaggatcacctcacgctcagctaggaacatcctcaggtaactcatcttctcaagtgataccgatttaaataactccagtttatttgcctaatgtcttggaaatacatcaggaccaccgggcgatggcgaagaagaaattccccgcataaaggcggctgatgattctcgtcctcctatcttgctcaaatggtgggatgagaactcacaggttgccggcatcgtcataaaccgtcaaaaagaagatgaggaagtgtgccagctgaagaaggcgcttggagaaactactcgcattgtgaatgtaaatatttcaggcgactgcctttgatgactttgttttctttttagctgaactaaaccatgaaccatcatgcagagaatccatcttcgtaatgaagccaagaccgcaactttggagaagctggttcctcatttgggaactcttgaagcagttagggaccagctacacgaggccaaggagctcgccaaaaagacggaaaaagaattaagggagcaaattgctcagctccaggattcaaacttcgagctgagtggttcgtcaaaaggtaatcttctagacctgtcccattaatctatgctgtcataactatatcctcaaccatttggatttcgaacagcgcaagccaccaggatggttcaaatggagaaacaaattgaagccttgaaaaaagacaaagtagaactggctgcgcaaagggattcggccttgaaggaggttgaaggtactgccagctagcaatctggacgtctctcttttaaatgcagcagattcttatcataaatgtgttttgtagatcgtaaaatcaaatctcaagctcagtttgacgtcctggttagtaagatcaagaggcttgaaggagcaagagatgaagtcgccaatgtcgctataccactcgtccaagctatgttcctcaataacagtggtccgagtgcactcgacgcaaccgaaattttcgacaagctgagagttgctccggatgtatatttcaagaacatcaagaaagctggaagtatgggagctggcatggcattagcgatgaccaaatccttgtacccgaggattgaaattgacgccattgatggctttgcagacgggacaagcgaagaggctgctcttgatcttatcaacaatgctcaaaacgcggctgacaggattgcaagtgacgttgtagagcaattccgcaacaacgaccttcagccgagtaacaataactctgatgatgaaaggactgattctgactgagcataaatgtaacaaatggaggctcaatttgtacaatactggtgtatttatgctgtgcttgataactctagccaagtctttgatttcttaaaagcttttatcaagctctgttgagcctaaaacccaaagaagctattaaaaactttcagtcctcgcaaactaagtagaaaaatcgaacaaggcaatgaaaaaccaagtaggcaaattgaattgataaaaaatcacactctattattatgatgatagcccccgactgacaacttcgaggagaaaacttgatgttgacagtcaagacagggaagtacaatgataagcctaagcgtagaaacgacgaagatgttcaatgttccaagagttgtcgacgagagtaccgtcttcgcgcttgagtcgataggaacctggccgggtgacttcagagatgataaatggcccctcccatagaggagataacttgtgccgatcccgtgtagtttgaattttccgcaaaaccagatcgccgactaaaaaggcgcgggatcgaacattgcgattatgataacgtcgcagcccttgtaagtatcgagccgactgaatcaaagccgcttcgcggacttcttccaatcggtgcaagtcatccactcggtcctcttcgtagcgttcttcacggaaatttcgaaagcgcaaagactcgaattcaacttcactcggcaacattgcttctgccccataaacaaggaaaaaaggtgactggcctgtggcccgactgggtgtagttcgcaaagaccaaagtactgatgacagctgtttcacccatttgccggcataaggttttagccggtcaaaaacacgcactttaatcccttgaagtatcatgccattggctcgctccacctgtccattgctcatgggatgcgccactgaagcatagcaaatcttaattccaaagtcttcacaaaagtctttaaaaactccgcccgtgaattgtctgccattatcagtgatgatccgattgggcactccaaatctatgcacaatgttgatgaagaagtctcgagcgttatctgctgtgattgtgacaactggtttagcttcaatccacttggagaatttgtcgatggctacaaagaggtgcgtgtaaccaccgactgcctttttaaacgggccaaccatgtcgagcccccaaaccgcaaacggccaagacagtgggatggtctgcaacccttgagctggtagatgaatttgtctggcaaaaaattggcaaccttcgcacgtgcgcacaattttgtcggcgtcggacacggcagtaggccaaaagaaaccctgcaggtaagccttgccgacaatggtgcgtgcggcagcatggtttccgcatatcccagaatgtatgtcttttagcaattgtctcccttcctctaaagatacgcagcgttgcagaatccctgaagggcttttcttgtacaactcagcttcatgcataacataaagtttgctccgcctcgaaatccgctcggcctcatctttgtcttgggggagttcttgagaagtcaaaaatcgtatgaggggctctcgccagtcggcttcaaccataactacgtcatgaatgcccgcaacttgagtagtatctttgtgaggtaccgtcggcgtataaaggtgttcgacgaaaacatcagagggtgccgcctcgcgtttggatccaaagttggcaagtctgtcggcggcttcattattgtgtcgaagaacatgactgagctagagtccatcgaacttgtcttccaatttgcgtacctctggtcgatatgccatcatgttgtcgtcaaggcaggaccactctttcataacttggttgacgaccagctgtgaatcgcctcgaagtattagacgctttatccctagggaaattgcaattcgcagcacatgaaggagggcctcatactcggcgacgttgtgggacgccgaaaaatgtatccaaagcacatagcttaatctttctccagttggggaaatcaaaaccactcctgctccaatgcccgaaagtcgttttgacccgtcaaaatgcatggtccagtgctccatcttctccgcgggggtatcctcctggcactcggtccattcggcgacaaaatcagctaacacttgggacttgattgaaattcggggcttgaatgatatgtccaaagacatcaactccaaggcccacttagcaatacgtccgtttgcttcgcggttgtgcagtatatcaccgagtggaaatgatgtgaccaccgttaccgagtgaccttgaaagtagtgagacagcttcctggtagtaattagaataccatataacagcttctgaacctgagggtacctcgttttggagttggctaggacctcgctgacaaagtaagtcggtcgctggactttctggacatggccttcttcctcgcgctcaacgaccaagactgtgctcacaacctgggaggtggctgatacatacagcaacaacggctcctgcggatgtggtgaagctaagactggtggctcggtgaggagtttcttgaaatcttcgaaggccttctgtgcttcgggtccccactggaaatcatctgttttcttcagtagcttaaagaagggcatcccccgctcaccaagtcttgaaacaaatcggctgagcgccgccatgcatccagtcaacttctgaacatctttctgggtgcttggcggtttcatgttgaggatagcagtaactttctccgggttggcttggatgcccctatgagacaccataaaaccaagcagcttccctgacggtactccgaaggtgcacttttcagggtttaatttcatcctgaaagcgcgaatgctcgcgaaggtttcttctagatccgagatcaaatcatcctttttcttggtcttgacaactacatcatccacataggcttcaacgttgcggccgatctgcgttgagaagcatctctggatcatacgttgataagttgctcctgcgttttttagtccgaacggcatggtgacgtagcagtatgctccaaagggcgtgatgaatgaagtcttcaagcagtcggattccttcagtcggatctgatgataccccgagtagcagtccaaaaaactgagaagctcacagccggcggtcgagtcgactacctggtcaatgcgaggcaacccaaaaggatctttagggcaagatttgttgaggtcagtataatcaacacacatgcgccattgccccgttttcttccgtactagaaccgggtttgccagccagtcgggatgaaggacttctttaatgaagcctgccgctaacagcttggttaattcctccttgatcgcgtccttcctgtcttgcgcaaatcggcggagtcgttgtttgataggctgggcatcttctttgacatgtaaggagtgctcaatcacctctctaggaataccgggcatatcagatggtttccatgcaaagatatctttattgttctgaagaaaggtgatgagcgcgctttcctatttacaatctaactcggcgcctattacagcagttttagtagaatcagagggatctaggggaatctttttagtcttagcttcgctttctccgctttttgaagtcttggtagcgggcatttctccttcgctcgtcgtggctgcagccagtcggatatcctctcgggcagacgctatctcgcgggtttgggccatgtcgcaactctccttgtcgcatgtgacggcttgcttgatgtcgctccgtagggataggactcctcggggaccaggcatcttcatcatcatgtaagtgtagtgcgggacggccataaacttggctaacgccgggcgtccgagtatggcgtggtatgctgtctcgaaatcggcaacttcaaagctgatattctctgtgcggaagttttcccgagttccaaaagtgaccgggagggtgatctggccgagtggagttgcggataatcctggaattactccgtgaaaaggtgcattgctgggttttagctcggagcgaggaatctgcatatcatccaaggtcttggcgaagaggatattgagtgcactgccaccgtcgatgagggttctgcgaagcttgacattacggaccactgggtctagtaccagggggtaccgccccgggtggaccactcggtcaggatgatccgagcggtcaaacttgattgcaatctctgaccatcgaaggtactggggcgtgtcgggctgaacagcattgatctcccgttcggtcaacttttgcttccgtttagactcataagccaaggggccaccgaagatatggttgagctccttgcggtggtcttgaaatcctgccggggcgtcgccgtcgtccttcttcctcgacgtgctttgttcttcgtcggagttcttccgtgtagtcttggtgtattgatccgcgaattgcttgtagacgaaacaatctttggccacgtggttggagttaggatggtgcgggcattgggagttcatgatcttgtcgaacgtgttgacgcgcgagcgctgtcgagaagagtgactggcggttgcaacaagttccgcaggcttacgcttgcggtccttatgattgttacttccacctcctcccgtagccggcgtacccttatttggcttccaactaggacccgactgctttgatgcggtgacggcgtcttcagctttggcgtactcgttggctttttcaaacataagcttgactgtcctaggaggtttacgcccgaacttgccaaccaattcttcgtggcgaatccctttggtgaaagcggcgatgataacgtcgtcggtgatgtcggagatcttattacgttgttcagaaaatcgccggatgtaatctctgagggattctccggacttctgaataacgttgtagaggtcgtattgtgtgccgggacgctcgaaggtgccttggaagttggcgatgaagtggtcgcgtaattcggcccaagatccgattgtaccacggggtaatccatggagccaagatcgggcggaatccgctaaagccactggtagatagttcgccatggccttgctgtctcctcctgctgcgcggattgcaagaccgtagacggtaagccacgattctgggttagtggtaccgtcgtacttctctattccagtcggcttgaagccggctggccaatccactcgacgcagatcgtcggtgaaggctgctactccgtcaaggtcgtcgtcgtggcggtccggcgaatgatgatggcctcgagctgctcggcgctgtatgatcgtgtcgcgaagatcgacggggcggcgacgaggtggtgagcgaggccgttccactcggcgctccccatgatggtcgggaggtgagtgaacggaccgcccgtcgtgacccttgctcctgcgattggatcctgcgccggtgatgctgaggcttggatgacggtagtcatgagatcggaagtggggaactcggctgccagtcggcgtgtggacgctttcggagttaactgggaccgaagccgcaatcatggtcttcgtctggttcaagatgttgacgacgtgatcagattgattgagctcgttttccttgaggagggtgtcgaggagggtgatcgcggcaaccgcattctgctgaggggtgcggaaaaccggtgtcccttcaacatcttgttggccgatgagatcacgcgctcggcgccctgcttccaaagctcgctgtcgtcgatcttcagcctccttcgcggtccgctcacgctcctgctgctcacgccgtaaccgttcttgttcttgtgcttgacgctcctcctccagtcggagacgctcagcctcgcgacgtgcttcggtctcccgggcttggcgttgctcctccgtctcgttatcggccatgaagacgccgaagtagagaggggtgtagttgtcatctaggctttcgtcgaagtcgtcgagatccggttcgttgtagcgagagctaaactcgtcgtactccacgatgtctgtggggcgcgagtcgacggtgggagagctgtagtggccgtccaactgatccgtcgaaaccgtgccgagtggttggaggatgacgccgacttccctgaagctaggcgaaatcggcgttgaagccgacttccgcctaggcctacgggatgaagacgctgtcgtgatgggggcggccgccgaatcgtcggggagcttcattaggatcggtgggtaagccccatcatcttgatctggtgtcgttggggaagatgcgatttcgcccgagtggtttgaagccaactcgattgagatggtcttgaagtaactttcggccgcgtttgggagtccaaacgggaccgaaagccggttctctcccgactgggccgacaccgagtcaaggagagagatcttgccgaagttgttggtgacgaagtcgaggctgccgaaccgaaacgtctgcccgggtgggaagacgaggtcgtcgatgccggagacggaacccattgcactgatcggcgaaaagcttgacgctacccctacctggcgcgccaactgtcgaaactagatttcggcaatagtaaaagggggtggctatcaagctagaaaagtgtatgggtttggagacaaaggatttatacaggttcaggccttcttattcaagaagtaataccctactcctgtccggggatggatccgccgagtgtattattgattgtatgattgggagaaaatcaacctatgccccaagaggcacccggaccctccttatatatgggaaggagtccgtgttaaaaaagataatctatatccctaacggaatatgcagatacaggtaaaatacagtcgtaaccgactaagtctcaaggtgtttccttgatgtacaagttaagaaacgaacccgagatacaaataagatattctatatatattcggtatcctatatccagtccaaatatcctcgccgtgtagatatgggatatccataatctccacaggccttttgctctaatagtagattgaattgtttttgaaggaacagaaactattccgttacatattcataattataggaacagggagattagcttctgttgcatgcgtatacatatttatgttatgcagattagcttctaccatatttttagcctgttttttcatttgccggctagtatatatcttctgtcggccaggagcagaaaatcaattccaaaaagaacagaacatcagttagttaggagcagaaaatcaatttgaaaagagcataacatcaacaattgcatgtgctgcccgtttatatacaacatatcaccaaacagtgctcactttcaaacgaaattaataataaaaatattggtttgagagcagaacatattctgcctccttataagtagatcgagtttgttttgaaagaacagaaggtattcttctttcttcttgccaaagcttcctataagtaaacggactttgttttttgagcagaagatatatattctgctttcttgtttctagaaacagagataatttcaggtacaaaattcaaatctctttctgctccctttctaaccgatgttctgctcctttggtagtttctgctgattttcaagttttggatcaaggagcagaacttaccgatgatgagatttaattagacgaggagaagttgaatatgtactacttatctaagtacgtacacagcagaaactatacccagcagaaactcggttatgcagaatatgtactacttatctaagtacgtatagatgacatacagtatgttagtaatcaaccgacagaacatgtactgccatcaaaaacagatacggagaaaaaaattaggtggctgttctgctaatttttttaagttgatgttctgtcattctttttaattcatgctctgccattttttctgttggccggctaatatatatgttccaccggcacgagcagaagataatatgccaggacgagcgggtgcgaggaagaaactgcatccgagaagttggtttgcatgcagccgatgatttagcaactatctgaactaacaaactatttaattaaacaacacaggtattcatcgttattggatcctcgtcactccattaactgaatccgatccataataggagggagtaactactctcggtagtaggaaataggctatatatatatatatattagaaaaactattttacacccggggtatagaatagctattctatacctncctcccaccaacccaccttttctgcccccaagggcccaaaacccacctcccaccttggtcaaaggccagtcaaaggtcccctacgtcggtctattctagcccaaaccggtcggtgactttccccacgaccctctctcttcttagctctcgtctcggaatgacgtagtaacatgttgttcatcatgtagtaacacaatgttttacttacagtaacaaaattaaaattgactcataatatacttatgatggatctacttttggtaagcaattttttttgaacatcatggtgcaaacggtttttaaaaatagtacatggtgtgagagatattacccttcaaagatttgtttttgaagatttaactctccacaagtagtaatactatatcaaaagttttactactgcctgttttgcgttactgcaatcacatcatgtcattactacaagatgtagtaacgattataattttcacgtaacatagtgtcttactgtaattacttgataacgttactgcaagactataagttttgcagcaataaagcgtctaactacattttttgagtagtgttactgcataaacacgtggtaacgtgtaattgtcgtgcagtaatacttttacttttgtgcagacttttgtgcagtgacaagtgtatgattagcatctgagacttttaacccatatatttttgtttcaattcctgaattactgcaattcaccacaatattacggtcaaaagtgcaataacgtcatatacatgcagtaacgttatattggagggaggaaaccaattttcttgagaagagggaggaaaaacggttcttgaggaggggagtacgtagatgctttttgaagtttaatcctccacatgcagtaacacgataacatcatggtggaaacggttttaaaaaataatacatatcttatgacatattgcttttcaaagattgacattttgaactttagccctccacatgcagtaatagaatgtgtaatttacagtaataggggtttatacatgcagtaacatggttttaccaaatgtataaaattattcaaaacactcctacatcaatcagaccttgctcaaagccacctacaaacttacctatggcccacctattcgaacttcatctcgtaaaaatgacatagtaacactgcatttatcatgcagtaacatatctacttggaagtggtaacatgcacctattatgtagtaacgcttctacttttgtgtagtaacaagtatatggttagcatgtgaggctttaactcatatatttttatttcaattcctagtttatgtagtaatactattcaagaaaatgcaagacactttgttactgcaaagcttattgtctttactagactcttatggtaacgttgtgatagaaatgtagtaacgtacagtagtaacaagtaatgctattgtattattacttgtggagagtcaaattctaaaaagaaaagcttttaagaacaatatctctgatgtcatgtatggttttttaaaattgtttgcaccatgatgctagaaaaaaaatgcttatcaaaagtacatccatcatgactatattttaactatatttgagcgttgttactgcacgtaaaacacagtgttacgagacggtgaccgccgcgttactgcacagtttcgcgaaacgagagctaagaaaaggtgggtggtgaggggagttagtaggtgggtttgactgagctttgaccggcgggagggagctttaaccggcgtttgaccgaggttggaggtggtttttgggccttagaatggaggggaaggtgggtgtggcccttgagagcgaggtgtacaatagtcttaccctatatatattacatatatattacgcacatatatatatggaatacatatatatatatatatgcatatgtataaatacatatacatgcatgtatagtacaattcatttgctcactagctagctatgacttcgacgccggcgttatgtcaaaagaagaaagaccgacgttatgaattgtcgatccgtcgtagtagaattcaccctcgggattaaggacttcttcgttgatgaatctcatcagttgttcctgaacaactgtgatagaatctttgtgtgggagattgtccctgatgtgaatacactatcattcgaaaaataatgacatatgaatatatgaaattaataaacaacaaatcgatacgcaatgaaattttgaatggtttatatatacgtacatcgagctctcgtgtggtgtagatttgggttgataggaagtgggcatactcgcatacgtagtagccgcacaggttagttccctggtcatgctttgcacattacatgagaaaggacaagagatttaatatacacttacattaactgtaactagtaatcatatataattagcatatgcatgatttaaaattgttaaaaattctaattatcatatgtaaataccacatgcatgatttaaaaatgttaaaagttctaataatcatatataactagcatatgcaaaatttaaaattgttaaaaattctaataatcatatgtaaataccacatacatgatttaaaattgttaaaaattctaataatcatatgtaaataccacatgaatgatttaaaattcttaaaaattctaataatcatatataataagcatatgcaggagttaaaacttttaaaattctaattatcatatataactagcatatgcatgatttaaaattttaaaaattctaataatcatacataattaacatatgccgtacaacaattgatttatatggatattcaatacatccaaaatattttacatcgtgtacacaacaattacggcaatacatcggcggtgacggttgaccgcacgtacttcctcctcactattgttccttccttatgatcgctacgtgagtaaggggtgtcttcgtttgataggaggatgctagggtcaaccgtcaccgtgaaagggggttgcccatcaaactgatcataatcttcatcagtcttgtcctcaactccgatgatttttcttttgcctgggagaaccacgtggcacttcggctcatcaggccctttgcccttctttcctttgctagacatgtccttcacataaaaaacttgcgttacatcattggcaaggacaaaagattcgtccgagtatcgaaccttgttaaggtcaaccgttgtcatcccactgtcatcaatcgttacgcctccaccaatcagccaaactcattggcaccggaacagaggaaccttgagaggtccatagacaagttcccatatgtcctcgatggcaccgtaatacgtgtcagttgtaccatcgtgtcccatggcatcgatacgaacagcactgttctggttcgtgctctttatgtcttggtttctcgtgtagaatgtgtacccatttatctcatatccttggaatgttgctatcaagccagatggtcccctcgccaggtaggcaagttgttggctaatcgtctcgttacccatgagatgttgtcgcagccacacgggcaatgtatcaatgtgatgccgtgtaatccatgcatcagacttaccgatgtttctggcaggaactagagccaagtgctcctcgatgtaaggagccaccaatgaagattgttgcagaaccgtgaaatgggctttacggaataaattgttgtctaccgtcattgctgcgttccttccgagagtcccctttccccgtagtctcccttcatggcgtgattcaggcactctgattgggcgaaggtcttcgataaattctacgcagaattcaatgacctcctctgttccataccccttggcgatgcttgcctctggatgagcacggttacgaacatacttcttcaaaacgcccatgtacctctcgaaaggaaacatgttgtgtagttacacaggcccgagaataccgatctctttgacaaggtgacaaagcagatgcgtcattatattgaaaaatgaaggtggaaatattaactcaaagctgacaagacattgcaccacatcattttgaagggcttccaatctatccggatcgatgaccttctgtgaaattgcgttcatgaaagcacattgctttgttattgttgcccggacattgtctggaaggataccccgaattataactggtagcagttgtgtcatccacacgtgacagtcatgagactttaggtttgtgaacttcttctccttcgtgcttattattcgctttatattcgtgaaggacgtccaagaattcccaatagggtaactcccaaaatatatagttctttttccacatcgccgcgtgaccatcttcgctatcaataggctggctgccaggcccctttccaaacactactttaagatctttcaccatagcaaacactgtttttccactgcgatgtttaagcttcgtacggtggtccgccttatgttcaaagtgattgcctttcttccgtacagggtggtttgcagcaaggaatcgacgatgacccatgtacgcaaccttcctacagtgcttaagatacgtactttctgtttcatctatacagtgagtgcaagtcttggaccacttattagactgccccgataggttgctaggtgtaggccaatcgttgattgttacgaacagcagcgctcgtaggttaaactcctcatgtttgtcctcgtcccacacggggacactttctttcttccacaacagtttcagatcttcgaccagtggtcttaggtacacatcgatgtcgttaccaggttgcttggggccttgaataataatcagcatcattatgtacttcctcttcatgtatagccagggggaggttctagatacacatcgtaacgggccaagtgctatggccgctgctcatctctccaaaaggattaatgccatccgtacttaaaccaaaccgtatgttacgtgcgtccttaccaaagtctttaaatgttctgtcgatgtttcgccactgcgaaccatcagcggggtgtgacacagtatcccgtcctgttgatgttcctcagcgtgccaatgcatcaatctagcacttccccttgctcctgaaataacgccttagccgtagtattatagggaaataccacatcaccttaggaggaattctcttcttcgttagctgcctgtaaacttcacctggatcatctcgtctaatcttatatcgtagtgctttacaaacagggcatgcttctagattctcgtactcctcaccgtgatataggatacaatcattcggacatgcgtgaatcttctgaacttccagccctagagggcagactatcttcttagcctcgtttgttgtctcgggcaatttgtttccctccggaagaatgttcttgacgagtttcaataaatcgccaaatgccttgtcactaacattattttttgccttccattgcatgaactcgagagtggtatccaactttttgtgcccctgctcggaacctgggtacaacgacgttctgtggtcctctaacatacgcttcaatttatgggcctccttttcactttcacagtcctccttggcatcctacaacatctgaccaagatcatccgcagcgtcgttattattagcatccctgtccacctcgcccgtttgatttccttcaaatccagcgtattgagcccagtccggaatgttctcatcttccacttcatcttcttccatctcaaccccttgcttaccgtgggatgtccaacaattatagcttggcatgaaccccgactgaaacaagtggaaatgagtagtcctggatacagaatacttcttctagttcttacacttattgcatggacaaccaataaaacccttatgcttgttagcttcggccactctcaaaaaataatgcaccccgtcgataaactatttggaccaccggtcagcgtacatccattgccgatccacctacatgtaatgaaaaaaagtcatacataaataaatattcataaaataatgacagtcatacaataatgatcaaataattaaaaactctttcaatagtcatacaataatgacatatcattattcatacaataattataaaataatccaacaaacaattcttatttattatttttgaatttttaaactaatattaatgttgtacttcttttaattttcaatttagtttgttttctattttccatgattaattttcattatattttaaactatgagaataaaacttttttaagtaaacaaacaaaattcctatatattattcttccccacacaatttgtttctctcatcaacttacaacaaagttttggagacaaaaaatgtgtgaaacatagctccaaaagtaatataacaacaaaaaacattggaggatgaagttactaaccttttagatacctccgatttgtatataatcaccaaaaaaattcacaagaaattttggcatgacctcccctcttttttggagaaaatttgaagcttgctcgggctggaggaggaagaagacacatataaagagggagataattagtcccggatgatgttatcatccagggctaaaaatcgccgagatctttagtccccgggggcctgacaaggcctaacatctttagaaccgagactaaagatgatcttaccaactgggattaaagatcatatatgcccgctgtagccaccaaccgggactaaagatgatctttagtcccggtttttagtggaaccgggaatattgtgaatttcggctgaccgaccaaagatggtttctccaccagtgctatgataagatctcttgtagtgacggcttgtttggttattagagaggcagtttgagacatacggcatacagtttcatactgtgtgcgtgccaagttggcaattggatcctagtagcagcaaattttgaaacactcaacccaacccaatccttcttctcttaatcttctcttcctactcttgtgtttgtgtgtgtgtgtgtaagaggctagtagagttagctagcctaaatttttttgcacgttgcagctactagctgtgctgctggcttgtcgtcctctgcttgaactttaaagagagagctaatagatcggtgatccgcttgggtttctggtgatcatatgcaacatggactagctacttggatttgttcaaaggatctgcttcttggatgctgtctgggcacgtcgccatgcatgcgaattttgcggatggagtcaaaagctgcatgcacggagctgatttaattaagggcatgttcagattgtagtcaaaataaaccttaccaagtttttggcaatgccaaaattttggcaggatttcttatgtattaaccaaatttggcaacaactaaacgtagatatttttttggtaactttggcaaaaaatgatttggttgaaaatgacatcaaagtgaacaggccctaattaacttgttgacagctactccctccattccaaaatataaggcataaccacccttaactcaaagatcaagaaataattattatcatcttatagtttgaatcatgctaataaatataatgcatgcatccaataggattagataacatgagagtaaaggatttaaaaaagtaataacttaatgaagaagatgtcatagttaattgcatgcttgcatacatgccttatattatggaacatctaagaaaagtggttgtgccttatattatggaatagagggagtagtacctaattaagcatgtgtgttaatttattattaactagtaatctgcccgtgctaacgctgcggcgacatttagaaatacaaattaagatcgatggatatagctattatgttgttaattaaattgccacatgcataaaataacatagttattatcctggttcaaatggagtcattagtgacaacataccatggtaaaagcaaaagtaattaaactttggaacttggcaccttgaagcatcaaatccttgtctaccttgctgtctccctgtcaccccggccccacttaattctaaattaaatggatgagagaaagagattaatatagtttagtgtgatagtgccaacacatggaaaatttagagcttctagttctgtccttctacatctctcttaaatgtgggaccaagtccttatggggcccactaatcatacaaccatagccaacacatcatctgctcttctctcatttaaatcttcttttatttctcaaaaggtgagagaagggtttaaattgaatttccacccaaaatgccactctaccactccaagccttctaggaaacatctatatatgggcctatttgtcgtccaaatacctgcaaacaaccttggtgaatcatctctttatcctaaattatattttcaaagagagaaagagagagagggccaatttacacccaaacttcaccatacctctcatcttctcataggaaacatctacatggggccactagacagccactcatacttggttgagtgaagtacgagtgggatcacagcctcaaaccattgccaactcctttaaatcgtctctacccctcatgttgacaactagctctcactttccacctttacttttaccattcactactgcaaccaagatttttgtgtgagggctaaaacgatttttctgagcgggtaggcggcccgcacgcacctaggggtctgggaaaataatgatttttgcgtgcgggtggtgcacccccacgggaaaacaaaaatccgaaataacatatttttttttaaaaaaaatgaaaccctagaatctggcggtgggcttccgcccgacggccatagtgccgcctgcctcccgccggcctccccgccacccgccgtcggatccgcgctcccctccggccgcaacgccgccgtcgcccctcccctccgccggatctagggagggaaggaaggggagaggaggggagctggatcccacgtggggagaaggaggctggctaccggatccgtgcggggacggctgccaccgcaggattcttgcattgacggccaccgccgccggatccacgccctccaccgccgccacgtggaggaggccggcacgctcctactcccaccgccgccgcgccgctgctgtcgccgcgcgccgccgccgctgacgtcgtcggcgttcccggtgtccagagtgccaccatcgccccactttgccattccagtcgactcgaatcatctcctgctgtaccattgcgccactgacgtcgccttggtccctggagaacgacgcccacatatgatcaagccaatacgccgccacgaacgctgtcggtcgccgttgctctcctgctgcctctgcttctcttgccgccgagtcaccgacatgtgggcccggttgtttagccacttcattaggtgctaaggactttaattagtagaaattgaaatcttgtaatgttctttttgtaaaattgctttgtttgccatgtgggcttatggacctaaatgcaattcaactaatgcctagggacctttttgtatagggtttagggtttaccaactcgacccgaacaaagcctaatcctcctgatcatcaccttcactgaagcactcctcctctgaagaatgaatattgcaagaatgagcatatgacatactcaacaagccacacagcaaatatgcaagtgcacaggataacaaaggatggcataattaagctcatttgcataaacagcatttaataaacatttgagagaatagtaaaacagttaagtaattaagcaatattaaataaacactatacaacacacccattttgcataggcccaaccttatctgaacaaccaacccctgattgtacaaatcaaacctccaaaccaggaatataccattccaaaccaggagtcaatttagttatcacagtattttcattaatagtgagtaatgtgagactaatcacgaaaaatattgttagacccacccataaccgcgggcacggctattcgaatagttttacactgatcagagatgtaccactgtacccacaagacacaactccacaacatgtcaccatgcgcctcagtaccaccacggtaccttggaaaagaactgtgacaatacctctcacacaacacaactcaccacagtgcactgttccgggatcatagtctccccctcataaccagaggcaatggagtccccagcgacccccacggacttctcgctgcttcacagtctggcacccccgtaatgaatcatgctatacaaaaggtaaagccgttgctcacgctggcttgtcgttggcacggtaaatgtttcacaacagtagctcgtgaaccggtccttaattgttatgagcacgaccatcaaaacgatgtactcacaacccacctttcatcaggtttatgtatcaattaattatcataacacgattaaccatcgtaagctaccactaaatataaccataagtaatatcgtaatatgattaaccccattggtgagctaatgtttctaagcatggctaagcaattatacctatatagcacttagctgaaccaaaccaatacataaggtccaagctattcaatttattacccataggaaaataaagtcattgtcggccattaattaactgggaatggctcaccacccgacgacattcgaaaataatgcataagttgaaatgaaacattagctttaaacctgttcaacatgctaaaagcattgtttgggatctgtgtgacttgccttgagcttcttcaaacacttctgaaccttcctcaacgtaaacgctctcctccggaacatcggaaactaaagcaaataaacaaaatcaacaaaacagtacaaaaacaagcataaacagtacatgtggatatttttaacatgcagatcttgattttagatgaatttagcaacttgaaccactcgaatccgagttacgatgatttagttatgaatttccgaagtttaatcgatttgcaactaatagaaaaaactaataaaaaggatttatgacgtcatcgatgacatcatcgctggccatggcacggctccacgcgaccactggcgaagaggacacctacacgaagaggacgatgacacgaactcaccggtgcaagaaactacgccggacgacgacgtacggcgaccggctatgaggaccaacggcggcgcggctcgactcgacgacggcggcggcgttccagcggcttgcgacgacggcgaaggggcgaccgaggtactcctccaccgtgcgaacccggcggcagcgacggacagcgacgacggcgatgctagcggcggcgcggcgcgactggagagtcgccggcgactacggcggcttgagctacgcggcgatggcgctacgagcaacggcgggactcgggacttggggcaaacggaagaggacgattaggggatgctttatataggcttggattagagagattggactccaaccgagaggaatggagccgggaaaaactagggttagttaggagagataaactcaaaacgaattcgatttggtttatccgggcaaaattgatctccgaaactctaggggaaagggagaggataaggaggagatgatttcccctcaagcaatcggactcgggggcgaccggttgaggaggaatcggaggagaggcggcggtgctcgggctcggctcggcccagccggaggtaggggatgaccccgacatgtgggccccacatgtcggcggctagaggagaggagggacggctgggcttggattgggccggcgtggctgcacggccacgcgcgagggagagggatgttgcgccggaaacggcccaacggcctaggggaggattttaaagactttttcaattaaaataattcgtgaaatgatgtttcatttattaaaaatacttcccttgctcaaataattcccagaaaaatctagaaaaatagataaacaagcaaagtatttaataaaattttatctagctcaattttatgttgaaatttttcctagattattagagtttaacttgtaggtttttaaaataatttcaaaaaatgcattaaaaattgaattattaaattaggcgattttcagggcgtgacaaacctaccccccttaaacggaatctcgtcctcgagattcagaagaactggcaaaaagatgaggatgagctgacttcaattcatcctcccgctcccaagtggcttcttcttctgaatgattgctccactaaaacatacagaaccgtatgacgcgattctgggtgtttctctcactcacctccaaaattctgactggcttctcaacataagttaaatcttcttgaatctctaaacgctcaggatctgcttcctcggtaggtacactcaaacatttctttaactgcgacacatggaaaacgatcatgtattccctccattgacagaggcaactctagttgataagctacttcacttcttcgactcacaatcttaaaaggtcccacaaaacgcggtgccaatttctctttggtctgaaaacgatgaactccccgcagcggcgtaacccgtaggtatacataatccccttcttcgaaagtcaaatccctacaacgattgtctgcatagctcttctgacgtgactgagcaactcgcaacctttcttggataatcttcactttttcttctgcctctcgcaatacatctatcccaaaaacttgacgctcaccaatttgatcccaaaggagcggtgtacgacacttacgaccatacaatgctttgtatggagccatttgaagactagcttgataactgttgttatacgagaattcagcatacgacagattcttatcccaacttccaccgatatctagaacacaggctctcaacatgtctcctagaatttaatttactctttctgtctgaccgtcagtttgagggtgataggcagtactgaaattcaaacgagtacccatcccttcttgtaagttctgccaaaacttcgaagtaaactgactacctctgtctgacactattttcttgggaacgccatgtaaacatacaactcttgccatatatagctctgcgagcttatttcccgtgtaggttgttttgacgggtatgaaatgagcaactttagtacgcctgtcaaccactacccaaatagaatcatgtcctgccgacgttctgggtagaccggtgataaaatccattcctatttcctcccatttccactctggaatcttcaacggttgcagcagaccggctggcttctgatgctccgccttgactcattgacacacatcgcatagagccacatattctgctatctctcgtcgcatgctggcccaccagaattgttgcttcaggtcttgatacatcttagtgctcccgggatgaatggaatacaaagtttcatgggcttctttcatgatagtatcctttagctccttattatcgggcacgcaaattctttctcctagccacacagttccttgctcatcctctatataaccgatggctttacctcttctcatgttctttttgatttcttggatatcaggatcattcacttgagcctctctaacttgatcaaaaagagtaggctgagcttctaaagcggcaacaaaacctttgttgactattcccaagttcaacttttcaaattcctcgcataactcccaaggtaggtgtcgaccttctgacatattacagtagcttttcttgctgagagcatctgctacaacatttgctttacctagatgataatccttgatcaactctaaccaccgtcgttgacgcatgttcagatcaggttgagtgaaaatgtacttcaaacttttgtgatccatatacatctccgtacggttaccaaaaaggtaatgacgccaaatcttcaatgcatgaaccacagctgccaactctaggtcatgcgttggatagttattctcgtgggggcgtaactgtctaggcgcataggcaatcaccttcccatcttgcatcaaaacacaacccaaaccatgtctagaagcatcacaatacacctgaaaacctttccttggatcaggcaagactaacactggcgcagtcactagccttttcttcaattcttggaaactttgttcacactcttccgttcacttatacttcacatccttctaaagcagtcgagtcattggtctagcaatctttgagaagttctcaataaacctgcggtagtaccccgcaagaccaagaaaactacgaatctctaaaaccgtcttgggttgcttccaatttagcactgactccacattgcttggatccacggcaactcctccagctgagatgacatgaccaaggaacttcacttcgggcaaccaaaattcgcatttactaaacttggcgtagagctgatgctcatgtagtttctctaaagcaagacgaagatgctcttcatgctcttctttattcttggagtagataaggatatcatcaataaacaccatgacaaacttatccagatattccataaacactttgttcatcaagttcatgaaaaaggccggggcattagtgagtccaaacgacataacggtacactcgagcaaaccataccatgttgtaaaagcagtcttaggtatatcctcctcactgatgaggtncttgcagtaganggcgaatcactcaaggcct

SEQ ID NO: 4893 - DNA, 5507 bp, Oryza sativa
aggccgaagtcggcgatcttggcgcggaaggccgggtcgagcaggatgttgctggacttgacgtcgcggtgcatgatcggctgcgcgcactcgtggtgcatgtagctgagccccctcgccgcgtcgatggcgatgcagagccgcgtcggccactggagcggcgccgtcggcgcgccgccgtcgtcgcggcggtgcagccaccggtcgaggctgccgttctccatgtactcgtagacgagcagcttggtgtcgtcgccggagatgcagcagaggaggtcgatgatgttgatgtggcttacctccccgaggatcctcacctcggcgtcgaactccttgtcgctcttcgcgtccgacttggccgccgtccgccatagccgcttcaccgccaccaccatgccgtcgctgcccttgccgccgatgttgatgcggtacaccttgccggagccgccgctaccgatcacgttctcctcgtggagattgccgagcacgtcgcattcggagaagtgcagggtacggaacggcgtcatcttccacccggcgaggtcttgctgacgcttctggtgtcggatgatcagcaaccagatggcgacggcgccgatgaacacgacgccggtgagcaccgagaagacgatgatcaggttcgtcgacgatttgttgtggctttggtgggggcaagccggaaggttcatgttcgtgttcaccgtggcacagaggccatggttgccgaggaagctacgatcgtaggcgccgttttgcagcgtctccgggacctcgccggagagctggttagaagaaaggttgagaaagttgagatggagattgctgaaatcttgaggtatgtcgccggtgagcccgttgtcggagaggtcaagaatgtagaggcccatccacccgactgcggcagggatctcaccggaaatctggtttctgctaaggttgagggaggtcagacttgtcaatgatttgatagacggcggaatcgagccggataactggttgccggcgaggttcaactcggtgaggttggcaagcctagacatgtcagctggcagttcaccggagaactggttgttctccgccgtgaaactcttcagaccgacggcggtcgacgggagggcaccggagaagcgattgttctccatctcaatcctcgagatgttaaatgatatctcactgggtagagtgccggtgaagttgttgttgtaaatcatgacattggtgagcaactcgaatgaccatatcttcttgggaaagtccccaacaaagtggttgttgtatgccatgatgttgttgatggttttgcaatccccaaggttcgtcgggaacacgccggagaagctattgttgaacaccacaatgtcaaagagcttcttattgaagcaaagtgtatccggtagctcaccagagaggttgttgttggacacctcaaaattccccaattctgaatgttttccaagctccgcgggtaggggcccagagagcttgttattgaagagacggatgtcggtgaggtccggcatcataccaacaccagccgggatgggtccagtgagattgttgtagtacaaatatagtaatctcaacttcttcaagtttgcaatgtcctctggtattgatccagagaacttgttcatggacaggtcaagctcctgcaggttgagagctgtgatgttaggaccaatctcgccactcaaattgcttgcatagagatatagattctcgagcttctggtgcttcaatacccactcggggatttgtccctgcatcttattttgtgacaagtccaacaatgtgagctccatcaatgacgacagatcatcagggatggtcccagtaaggttcatccatgacagccacagcattttcagctttgtcagcttgccaaactcctttgggactggacccggctcgaatgggttggatgccaacgtcagcgtctcaagctccacaaggcctccaatggcggcacccgggtaattcccattgaatctattagtgtcaaggaccaatgacttgagcttcgagaaccttgcaatagccgacggcacatcgccggtgaaagcattgctggacaggttgaggtgttgcatccccaacgatagcctgtcaatgcggtccggaagtctgccggataattgattgttggataggtcaaggaactccaaagctgagcaaccgtagagcaccgtggggaaatcaccggtgagattgttgcaagagaggtctatgtaggtcagattcttgaggctacaaacggaggctgggattggtctggctatatggagacttggcaaggagaggccagtgacctgacctgtgctgctactgataacaccagtccagttgccggtgctgctccatgaactgagtggagctgggttgtcccaatcttgcttgattgctaggagtagtttttgctcgtcggcgctgggctgcgcagtcgatagagagaagagcaatagtagtagaaagaggatgaggatgttgtagacagccattttttgcgagtgtggtgtgttcttggatgttcagacatggcgtcggagtgatcttaagtagaaattaaggcagagagagaaccaccatcgaagtgcgtcactacctcaggtcaagtcttcggtatagcttccttagcaccaatcctctagtgattgaaagatgctctgatagagacatgtgagttgtcagttgagcactatgctatcctctttcatccaacttgaatgtatttaagattagaagcatgaaaaggatgatcaccttctggtgtagtacaagacaattacttggaatatgttccgtttgatatatatgcgattatatatcactatgatacggcactcgaaagcaaggacatgcagtgagaatggaattgccgtttcctagtcgaaatgttcttattctgttctgtcgaaagtttttttatgctttacatacatatgttgttctgtcttttcggcagaaatgggggggggggggggcgagattgtatctactaccgtctcttgtagctgaagaaactcgtgtgattctcgatcgcccatatctgaaactctgaataattggtgcaggttcagagagttcaggacttcaggtatattcgccgcactctgtttctgaattcagtttcgtttcgttgtgcactgtttcttttgccacgtacgtgtgtaaatcatggaattctcacaagatgttattaatcgggacaaaaactaagctctctccaatggagtggtgtcatcgatttttattgatattacgtatggagaagggaaggtatctcacgctcatgatggattttatgttctaacatcaataatttgccacagtagcatactactataaatccggtttttccaaatgtccaattgtggagattatgagtatcccatacccacacgatatggttttccgactgattataggggataacttatatctatggaatatgtaacggatcatgacttgggtattacgtttccctgtttattatggaatagcctaaagtcctggtttgataaaattataaagtagatttaggaaaccgataccgtattggttaaggtttctatcttgtaatcctgccccccatcctatataaggtgggcaggaggccctctagggggcatgagcacatatgatggtcagatctatactacacccggcggattcaaatccccaaacatgattagggtattacctctctaaatccttgtctccgcatccatccacttttaggtctcgtgcgctaccccttttattattgccgaattcatgtttcgacaccaatcctagtttttgcaggcggcaaagcgatcatcacgtaccaaatggtctgtaaaaattgatatcgccgccggagcccgccgcctagagagaggagaggggagaggaggagtaggagaggtcagaggagatagccgggcatagagagtgtgggtgatgggagagagagaggagtggagaataaataaaatagagtgagctatttttgcgtgcgggtgagttaagagccctgcatgtaaacataccttatttttgtgtgcggatattttaagtggtccgtctgaaaaatttgaattttgcgtatagatctcttaaagagccgtatgagaaaatgagggtcgatttttgcagacacggacactaatggtccatctataacctattggggtgttcgtctagaaaaatcattttttaagaagtggcaagcataacccccaatgcaaaaacttttaccagatttgtagataacacctatacgacaatctatcatttcgaaaaattccaacacaaaacagtaacaaacctttgtcttctctaaagaaaaacaaacacaaccctcttatgtgtttcaaaaattacggaacaaatcacacgacaatatctcctaaactctcaagatgacattctctcgttgtttagaagtcaactaaatagttatgaaaatttttttaaaaaaaattaacaagactgattattatgataaatcactctacaaatatacaagttaaaatttaacttctacaagttccaacagaaaaaacaaattaaactatgactagttaacgtatattcgtaattaatttttttattgcagaagttaaatttgaccatgtttatgaagtggtttatcatatattaatctatcttgttgaatttttttaaaaaaaatcataactaattgggtaacatgcaaacaccgagagaaaatcctgtcaagagtttaaaatagttttgcaatctctatcctttctatacgcaagctatctttgcgacgaatattagccatttagcattatcaaattttagtagggcagagaaccggaagttcgagatattcgcacgtctgcttcagctggttgtggacaaagaggtgactccgtgactccccgtcgtccgcttgtcctattgaagtattgatgatagagcttgatgactgatgagtgaacgacatcggctgaactcgcagaagaattctctaacgccgacgatccagtcataatcagtgcggaaacttgaagctttctgctcttataacccactgtcgatctggccatttgtacaaacgaagggacgggtgtgtaaagttttggcattgtcacatcaggtattatgtaggatgtcgcatgagatgtttgggcactaataaaaaaactactccctccgtattttaatgtatgacaccgttgactttataaccaagatttgaccactcgtcttattcataatttttatgcaaatataaaaatacttatgtcatgcttaaagaacatttaatgataaatcaagtcacaataaaataaattataattacataaatttttttaataagacgaaagatcaaacgtttgtcaaaaagtcaacggcgtcatacatataatatggagggagtaattacagaatccgccagtaaaccacgagacgaatttattaaggctaattaatctattattagtaaatgtttattgtagcactacattgtcaaatctagagcaattaggctt

SEQ ID NO: 4894 - DNA, 5483 bp, Oryza sativa
taaatgacactttaaccccctcattcacatatataagagaaaaaaaatcgaatgcaatgaatttttttatagataatgcatcgtaatttatgtagaacgaaaataattatgtacttgcaagtgtatacgatagacattgcttaagtttgatgtgcacatgttaaaataatgggaagtatttctgcaatgttatttattcatcttggttttctcttttctagtgtatagttatatacaaattattggcaaaaaggatattttctaacagaaatattgactagaaatagccatatggcatattaagtgggcctaagaatgattttaagccaaaacaaatacttataggacctacgtggacaaaatgaaacctgaaggacctaattgaccttcggtgaaacttgagggattaaattagctattcacccatttaaatatatatggattaattgtttagaagaaaagactaagatgatgagactcaatgagagaaagagaaaaaggtatataaatcaattatccaaaaacaaaactaagttgatatgattttataagataaaaaaaggaaatgatataatttggacgatatatcaaacatccaagagttagaaataattgagatgatatggcttaatgagagaatagagaaataatattacctatacttaataagatgaattttatagatatataagaggcctgtgtgtctaattgtctatttcttccaatctgaaaataagttcaatataggctgtgtttacttcagcgcaaagtttgaattttagttaaaattaaaggtgacgtgactgaaaagttgcgtgtatatgatagattgatgtgatgaaaaagaactgaagtttggatgtaaactttgatctaaacacagccatattcacgagtaatatcaaagcgcatcaacgatcactttttacgagataaattacaacagctcgatgtgtggtgctctgctatgacatgacgttgacgtactcgttagcgctgtactccctttgtataaaaaaaacttaattcttaagtgtgtgtacaatgtttgaccgtctgttctatatgaaatttttttatgattagtatttttattattgttagatagtaaaatatgaataatactttatacataacttatctttttaaatttttttaaataagacggacggtcaaacaataaaaacagaaacccagaaattaagtgtttttgagacggagggagtagaggtgtaggttgtccgggcaacgcttgattggtgctcggcgatggcggctggctggattggttatgtcccttccttccccttctagcagaacagaggagcttatgtggtggctgcaaggagtgagaaggcgtggcactgtggcagtggttaggagcgcttagctccgttttatcttaagttttgaagcaagcaagaaaagctttaatcccagccttttaagtatttccttttcgcttgtttgttatttatgtcagttatgagattaggaaagtatgtactcgtgtaatctttggttatgtatatccacttgtgaatgttgtatatgctaaattcctatctattatttaaaaatacagtaatatcagagcattttccacataaaaacagtccagccgttgtactctttggaactgaggatccaccggaaaaaagattccatttgatttcttaagaaccaaaagacatgtggccctagtctcaattaaagattagctttcgttgtcgaagaccttgaccacttactttgcagtctcgagtgtttggctctttcctacaaagatgtgcacatgttaagaccattagcccaagtcttcggtcatctatgagctctgagggcatatccaatctcttctttctataaagctaatacctattaaacacataaaacttaacatacaagtataatatttattagcactcctaaaacttacatgcaagcatgtcacatcaacccattaattaatcacacaaaacccaatatgtaagtatatattagttatatttacattttagtctgcttcagtcacttcctctcaaccaatcggaaactcttcctcctctcgcgtcacctttccccgggtgacttgggaggcgacgccgccgccgccttcctccttctccctcctcctcccccgcctcgccaccgcctgagcgggcactggcaaagccgtgcggccgcaaggacagcggcggcggggccttctctcaccctccacgcgctcggcggccaggggcgctcctcggagcggcggcggcggcggtgtccatatccgggccgggcgcggtcggatcttgcggaggggtctctggcggcggggagtgaacgtggcgacggcggcacctggtagtggacgtggcggtgcggggtttggcggcgacggcggcggaggcccccagatccgccccaactcggcctgatctggatggcgattgccgaatggcggtcagcagcagctggcggcggcggtgttgactgctgtggtggcggatggcgacgaagcagtggctgtgatggcggcggcagcggctagcgacggcggctagtgacggcggtagtggcagacaacggtcaacttgtggcgtccgcggctatggaggccgggggtagcggaggccggcacggcgcgaggtggcgcgaccagtggcggtggaggtcggcttagcacggtgaggcgtggccggcggtgccgtaggcctgttacgacacggcgaggtgctgctggtggtggaggaggcgggcacggtgcgacaaggaggagctgccggtgggtgcggtgcggtctacgacgcacgaaggctggccggcagggggcgctgatgcagtggttccacgtgccagcagaagtttgatggtggtggagcatcggagcgccagctgtggactcgcaggtggtgattggcgggtgaaaacccagcccagtctcgaccaggccggcaacgatgacgttcgacgcgtcattcccctcctgaggacgttatcgtgacgtctcatccctcaagtgtggatgccgagcgaaagccctgtctcggttctctttgagaccttgacggatggggcggcggtgttttccatcgcttctcttcttgaaaacgtcgtttagacatcccctagcggaaacccccaagcaattgatgcaagctcgctctagatttcatcctcttatggcggcgtcctagacactataagttggtcacatcagagggcctaaggggagaagtgtttcattcttctctctcaccctctctctctaacttctgaagacttggatagagcggggtttgtgttgattgtaagggttgggttttgggcgatctcggctgtgttttgttgttggcctagcggcggtcggtcatgcttagcggcggccggttcggtgctagccttctcctggacctgtgtgttggcgttgccggtgtgtgggtggtggtatactttttttcttttcctggttacgactttccagggttgtaatcttgtaattttttttctgctctatcaataaactttgcaccgtcttttgcgagttgttcaaaaaaaatttacattttatgtcattctaaaactaaacatacatatgctaaattatcaatctcaaatcattttcataatatttcaatccaaatcatttcatcatttttgcaatatctaacatatattctgcagcaaagcgtagagcatcatctagtttatctatatctacatatcctatatagttgtatccaatagctcaatatgtattgagccgcatcatttagaaagaaaagtcatttgatcattttcatacttaatcacaaattcacaatcattcatttagtagttactattcctcgttaattagtatataagtcaacattagtgattcaattagtgtagaatattatcgctataaagaagttaggccatcaccatatttaacaccattgcatacactggtggagaaaccctttgtagtcccggttcgtaccccccccttagtcccggtttccaaaccgggagtaccaatccgggactaaagatcgctatctttagtcccgggtgaaataaccgggagtaaagatcgatctttagtcccggttggtgttaccaaccgggactaaagatagagctgaccttttttttttttgcatgcccctgttgctgcatggtttatatatatatatatatatatatatatatatatatatatatatatatatatatatatataaaccatgcatatatatgttatgcaaatgcatttgtatatagatatatatatgaacaaaatatatttacattatagaaaatgtgtacacatgcatatagaaacatatgtagtcatgtattaattacaatccattatatgtcctagctagctacgatttcgacgtagtagtactcgctgctagctcagaagctaaggaccggtgaattgtgtttccgtcgtagtagaattcacccttgggatcaaggatttcttcgttgatgaatcccatgagttgttcttgaaccgccgcgataaattccttgtgtgtggtcaggttatccctcatgcgaataaactatatgaatgtatgaaattgattagtaattaaacaagaaatcgctacgtaatgaaattttgaatttatttgtacgtacatcgagctctcttgtggtgatgatttggtctgtaaggcagtggcaatactcgcacacgtaatagccgcacaagttagttccctgcttttgctttgcgcactacaaataaatgacaaacaacgagagatctaattaatatacacttgtatgtatttgaatcggagaaatataaatgtagagcatgtgtactcacaggaaatttgaacttccgcctaagtctttctctccatttgccgcggaccaaatgacggaaccgataccaagccctacatggagtttaaagctatgattcgtagtagcaattaacataacaagattttcttaattaacaaaggaacttatgacggtacctgtctacaagttcgaaaaccttgtcaaacgtagactcttttttatccattgagtcatatacgttgacggtgcaggcctccaggtcgatgagtaaaagcacccagtggaatctgcaatgtgcgtgggatgcattacatatgaaacacttagcaagttcgtacgggaatgaaatttggtatgtaggaagacagtaaaattaaactaactctgtgttgtatggcaacagtatgaacgtcttgtaatgctgcgccttcaggagatggacgagattgtcctctgtttcttgtggatattggtcgagcattgcgacgtttactttccgagggtcgatgaatccagtatcgacattgtctggaaggataccccttattacaactggtagcagttgtgtcatcaacacgtgacagtcatgagactttaggtttatgaacttcttctccttcgtgcttattattcgcttgatattcgtggagtatccagacggtacctttatgctctccaag

SEQ ID NO: 4895 - DNA, 18376 bp, Oryza sativa
ccgttagactcttttagaaataataattagcatacttcctctgttttatattataagactttctagcattgtctacattcatatagatgtttgctataaaagtcttataacctgatgaaacggagggagtagcttcaaggtgaaaaagattcgtttatgaaaagaaaaaaacaaatggagcagaccaaaaatttaatatttgtaaatatttttaaatgtttccactgaaatttaaacccaactgaaaaaaactttgccttttcagtttcttggtgaatcttttgtatgtgtttcatcaaattcgtaaaaaaaaactattttctatatttggggtcataattatgtccagtttgattttatcacaattctttttagattatgtttacaaagtagaaagcataagtacgtatgacatataagtcattttgaaaaaatctaacagtcaactaatagaatagatataaaggagataaaaaaaacgcaaggacatgtaaagataagataaaattcatgaatatagaagggattctttgagcaatttgtttctatattctttgtgcaagttccatttaaccatcattttcaccatagcatacatatgtgtctgtgctaatgatttaattattgttttgacgttgtaattaattaattaatatttaataggccggagcaatggtgacatgttgggagagaagatcaacataccacctgggccgctatgtgcaaagcgaccagacctctgcaagaactgctggtgttgtgaggtcagcgacgggcaatgctaccagagtctcgaggcctgccaggtcaactgcccattaccatcgccaccggccatttgatcagatctcgatcgatgcatcatatcgtttgtgtgataataagctgatcaatcaaccaataaagaaggcattaattaagtatcgtactctgttcgttttggaaataaaatgctgatgccatcaatggatgcatcatgcatgcatgaattaatgttctggaaaatatgtgataatcacatgtcgtgaaaacttgaaaacaaccttggataaaataaaaggacacctgatatttatccacgttatttagagtaaaaattttacttgcggatttaatcatgagtaaaaattttactattgatgacgtggataaatctcatacgttcatttttaaatccaacggtagctttcaggtttgtacgtgatatattttccttcttaataacgtttatagtgccagatatgggacaattgatcttttgtccatattttaaagtctaactataactatacacatttgaccctacatttttaactttgcttatttgatcttattttttttaaatcgaagttgttatttggccctattgtataggaatagatttagaagaaaataaaaaatgaatttagagagggaagaagacttaactgccccctgtgatttaccaaagcacatacgcgcggctagagttacatgggcgcggaggagaccaatctcatgagcacagagccaatctcggtcagcaaccaaattgttacacattctgatatgcaatacttatattattatagtctttagacttatctttgtcggctttagtttctgcttgttccttggatttacattcttcggaagtttcaataacggatccaccaatatctgatttagacagattattgtgtgctttggtgaagaattagtacttaactggcccccgcgtcatcctcccttacgggcgatacgggaggcagaaaccaccgccatcgtccgctccccctctttcctcctccgcctcgccgccgcccgagcggccgcaaggacggcggcggcagggcttcgtttctctcactcgccaacggtgggggaccgtgcgggatggtgaaggccgcccagatccgggccgtcgcagtcggatcttgcagggacacagccggcggcagggtagtgtgatgaggcggcggcggttggcagtggtggcggtggagtatgaaggtggtggcgatgaaggagaagagaggggatccgtcggcggcggggatgaagatggcggcgaggatggcgacagcgggcaggactcggtcacgccgaaagcggatccggccccctgaggacggatctggtgcagggcgaggttgcagcggtagcggcgcggcggagctgcggcgacggtgtcggtcgcaacggcgcagacttcgtggtgacggtgacggtggcaacggcgtggagcttgtggcgatggtggcggcagcggttggacggcggcgacagcacggtggctggtcgacggaaacggcggctgccggcggctgtggcaacggggtgcactcacggtggtgatagcggcgcggagctcgtggcgacggtcgcggctggacggcggcgagggggctacggctagtcggcggcgaggtgtccgttggcagcagcggctgcggtggtggtgaccgtatctacggttggaggaggcatggcagtctcggacagctaaccgggggtgtggcagacggccgcacctggccggcgtggtagcgattggaggggtcggaggccagcttggtgcagagaggcgcagccgatggcagtggaggccagtaaggcgcaagaggcgtggccggcggcgaggaggcccgcttggagcgagaggcgttaccgatggcgggaggccgaactggcgcgagaggcgcgtccggtggtggaggccggcgcagcacgatgaggtgcggccggcagtaaaggaggcaaccacggtgcgatatggagctgccgggggtgtggcgcggtcttgggtacacgaaggctggctggagggggcaccggtgcagtggtcccacatgtcagcagaggttgagtggtggtaaagcattggtgcgacaaccatggacttgcaggtgatgagcggcgggtgaaaacccagcccggcctttgccggaccgacaacaatggttcattccccctcctaagggcgttgtcgtgccgtctcatcccttaagggtgtttgccgggcgaaagcccagtcttgactcttttgagtccttgacggacggcggcagtggttttccatcgcttctctccttggagacatcgtttaggcatctccttgtcgaaaccactcgaacgattggtgcaagcacactctagatagagttaggctttgtgttggttgtaagggcgtttttgggcattttcgtctgtgttcctttgttggcctagcggcggtcggtcacgcttagcggcaaccggttcggtgctagtcttctctcggacctgtgtgttggtggtggtatattttttctctttttcctggttacgaccttctaggaatgtaatcttgtaatttttttttctgctttatcaatagaacttcgcatcgtctcgtgcgagtcgctcaaaaaaatatctactttagagaatcaggttcttaggccctgtttagtttgcgagacgaaaagttttggtgtgtcacatcggatatacgggaacacatttgaagtaataaacgtagactaattacaaaacatattacagattccgcttgtaaactgcatgacgaaattattaagcctaattaattcaccattagcaaatgtttattgtagcatcacattgtcaaatcatggagcaatgaggcttaaaagattcgtctcgcaatttatacgcaatctatgtaattagttttttatctatatttaataatccatgtatgcgtccaaacattcaatgtgatagagtgaaaagtttttgtttgggaactaaacagggccttattcatctgaaagcctgaaacttatgtcattatcagattgcaaatcataaaatggtactcacaccgtcccaaaatataagcatttttgaccttaaaacaatctttgagacgctactctgaccaataatatctataaaattaagtcgttttaaataaaaagatatatatattatgatattttgtttaatgataaatctagtagcatcaatttaaaatgatcttttttatttttttcactattaatggtcaaaattaaaattgtttgacttagcattattttaaaaatgcttatattttaggatgaagggagtagtattcttgaataccattatcaaatatcaattatttatgtggaaaaatatgtcgagctcaaactgtccttttgcattatcgatgaccttgaccaacatagccccagcacacacggtaaagactagagacggccagctgcaagtctgcactagcgtactgcatacgtactgaaattggtagcttctcactctccaagtcagtctcacaagtccacattaaacaagcatcaccactcgtaactagtaacaaaaaatgaccaatagtaccgataatcttttgttactactgctcctcttcttctccggctccagtgcggagcttgatgacggcggcgagctccaaacgcttctgaccatcaagcggcattggggtagacctgctgcattcagctcatgggaggtgagaagttctaattcttttggttactgtgattgggtaggagttgcttgtacagatggccaggttacgtccctctccttccagagcttccaaatagccaatccaatcccagcttctatttgtagccttaagaacctgaagtacttagacctctcttacaacaacctcaccggtgatttccccacagtgctctacaattgctcagctttgcaattccttgacctgtcaaacaatgaattgaccggaagccttcctagcaacatcgacaagttgtccttggggatgcagcacctcaacttgtcaagcaattattttattggtgatgttccctcggctattgccaggttcttgaagctcaagtcactggtccttgacactaacagctttaatgggagctatccaggtgcttccattggaggccttgtggagcttgagatactgacgttggcatccaacccgttcatgccgggtccaattccgaatgagtttagcaagcttacaaagctgacatatctgtggttatcctggatgaatctgactggtgacatccctgatgctctgtcagcattgaaggagctcatactattggatttgtcaaagaataagatgcaaggaaagatcccgaagtggatatggaagcttcagaagctcgagatgttgtacctctttgcaagcaatttcagtggcgagattggtccttacatctcaacactcaatatgcaggagcttgatctatccatgaacaagctcaccggatcaataccagaggacattgcgaacttgaagaacttgagactgctatacttgtactacaacaacctcactggatccattccaaaaggtgtcagtatgcttccaaaccttaccgacattcggctcttcaataataagctctccgggcccttaccccctgagcttgggaaatattcagaattgggaaattttgaggtgtccaacaacaacctgtctggtgagttgcctgatacgctctgcttcaacaaaaagctctacgaccttgtggtgttcaacaatagcttctccggcgtgttcccaatgaaccttggggactgcgacaccatcaacaacatcatggcatacaacaaccactttgtcggggacttccctgagaatatatggtcattcgcaaagctcatcaacatcatgatttacaacaacaacttcaccggcaatctaccgagtgagatatcattcaacatcactagaattgagatagggaacaatatgttctccggtgccctcccatccgccgccatcgccctgaagaacttcatggcggagaacaaccagttctctggagcactaccagatgacatgtcaaggttcgctaatctcaccgagctggaccttgctgggaataggttgtccggcttgattccaccatctatgcaatctttgacaaagctgacctccctcaaccttagcagcaaccagatttccggagagatccctgcagtacttgggttaatggatctaaacattcttgacctttcgaacaacaagctcactggtcacatacctcaggaattcaatgatctacatgtcaactttctcaacctctcatccaaccagctctccggtgaggtcccagcagcattgcaaacgctagcatacgaggacagcttcttggataaccctagtctctgttgtcaatcagaatccggcatgcacatcaggacatgtccctggagtcaaagcatgagccatgatcaccttgcactgagcataagagccatattggtcattcttccttgcattactcttgctagtgtcgccatcaccggatggcttctcctcctcaggcgcaagaaaggtccacaagatgtcacgtcgtggaagatgacacaattcagaacgatagatttcaccgagcatgacatcgtcagcaatatcagcgagtgcaatgtgattggtaggggtggctcagggaaagtgtaccgtatccaccttggcggcgacatcaaggcgggacgacatggcggtggctgtaccccaaggacggtggccgtgaagaggatcggcaacaccagcaagctggacacgaacctcgacaaggagtttgagtcggaggtgaggacgttgggtgacctccggcatagcaacatcgtcgacctgctctgctgcatctctagccaggagacgaagctgctcgtctacgagcacatggagaacgggagcctggatcaatggctgcaacgctacaagcgagccggcaaaagcgggccgttggactggccgacaagggtggccatcgccattgatgttgctagaggcctcagctacatgcatgaggattttgtgcagccggtcatccaccgcgatgtcaagtgtagcaacattcttctcgaccgcgagttcagggccaagatcgctgattttgggcttgctcgtatccttgccaagtctggtgagtcggaatcggcctccgccgtctgtggcacctttggctacattgctccaggtatctactatatttatataacttttatcatgctctctactgtagtagaaatgatttcaacttatatgtattttaagcgaagtcttcatatctttatcaccttaattaattattggaagtagaagcgatagggtatagttgaccaatttcggctaaaaaattcctactactatttctatttgtattagaacacttccagcaaagggtttattaaagtactcatttatttttgtcgcaatctacactagagggcacatagacaatatcataatgttccattataatctgtctgaatttgaggtgtgcatacatttggtgtattaatttgcttattgcagagtacgcatacaggtcaaaggtaagcgttaaggtggacgtatacagcttcggtgtggtgctgctagagctggccaccggccgagggccgcaagatggtggcacggagtctggcagctgcttggccaaatgggcatcgaagcggtacaacaatggtggcccggtcgccgacttggtcgacggcgagattcaggatccttcctacctggatgacatggtggccgtgttcgagctcggcgtggtttgcaccagtgaggagccggcgtcgaggcctccgatgagtgatgttctccaccggctcatgcagtttgatcatagcggaacacatagcgatggcgtagtagctaaaggcgtgtttgacatcgatgattcttcggattgtattgtttaatttggatattgagatgatcaaccatgggtcaaacagtcccagtacgagtgaattgtccgttcttctcaacaaaccaaagattttaagatgaactgactactctgtgtgcaattcaacaagatgcatggttgtgcaaacagttggattagcttgagtcatcgttagattcatactatgaccagtagaggacaccgtcaaagtgttttcgtataggatattaatcctgcctaggtctggccttccactttcactcaactccgaatcctctacaaatagagctgcaaatagaggaagaattaatgatcaggtgttgtggaagctcatagactaaagttgctttctctgtgtctacagcaaggtgagagatcaagcctgcgcaagctagctaatatggaagataagcgcactgtcaaatgtcaaattcttcatctggttggggaaaaaatgcctcatagccgataatctcctcaaaagaaattggccacatcaacggagttgccatctatgtgcttcagctcacaaagattgaagcatttgttcgtctcttgcgtttttatatatatatatatatatatatatatatatatataccaacagaatttggagtgttgaaagcctgggtgggtatatcccttttcaacttacacgacatgggtgagtggtggtggcggtgcttttcggatgaactacaggaaatccttcaacacgttcttcatgttggtctgctggtcgatttagaaaggagagaaatgccagcgtgtttgaggggtaccgtcttgcacgcttgggcagtcatttggtgaaacggttttgctatgtccctttgtgttagatttttgggctcctgtcttagatgaaaaaaaaaatccttagcagttacacttatacacttagttatagcgcacttacactctgttacaatgtacttacattttttagctacagtgcatctaaattagattttttttttcaacagtgttttttctctaaatttatgattttttggcatatttgtcttttttgttattttatttaaaatgggttgtatagattggttgaaatttctgtaagatttgaagctccaaatctatcaaaaaatcaataggttttcaaatccttggtgaaatcaaagatgaagtattactttcaaagagagcaagagttttcaaatccttttctaagtagctccggtaatgtaagtgttaagtttctctagtgattcatcactagcctcaacagtgttatgtcgatgtcaagtacttcgtcgtaagaaaacccttcctaaccttaatcaaaatggttgcccttcttcagccaacccatctaaaaacatatgactagggctgctgctctttccaattcattttttatgttttggacaacgacacgtcctccaaaacacatctttaattatattttttattgtgataagaaatttgccacagaaattatatagggataaacaaactaaaaaaatgtgtctttacaaacacttttctttgttaaattttctataggagattgggaaaatcctcaagtactccatccgtatgagcttttggaaattcaataggcccaacctctcgagctactctatttatcctccaccttatctcttggcgctaataggtgtttagtagcctctctagtcatattcaaaccaagcctctctagtcatattcaaaccacctgtcgtcgatttgatagtgcattggatttactactagttgattattaagggtggacttctttttctcacaagtataaaattaagtttaaggcgatttcaatttcgaattatcatagtcgtttcataactggttaggaaggatatgacacaaaatagttatactttaataacgtaatatttaactgaaacaaataaattcacaaggtaaatatagcataaatataggcacatataagattatatattctatcctctcctgtcattaatatgcgttatttttaataataacgtcatatgttaaaagaccggagagagtatatatatacaaagttcaagtattgctagaacctgttttatctaccttatccccagtaccccactcctcccctctctctctatatatatatatacaaccgcatatgctatgcaaaagcatccagcaatcagattatcatttacatattaaatatccaaagagtacgtaagggtagtagtaaaatctagcatggtgaagtgcggtaatggacatgtctatgcagtactaatgctgctgcttcttgggtgctttgctatccatgcacaatgtaagtgtttcaatttgtttgtttttcaacaaaatttgaaatcctattttgcctatactgattttaccctttcatatactaatcctttttttaaaaaaaattcttttgacaaataggctgtgccatggatgacatgttcggggagaaaattaatttgccaccgtcgctgccgtgcacacaaggatcgaacacagagaaatgcagagactgctggtgttgtatgctcgttgaaaacgatatctgctatccgtctttggacctttgcaaagcaagctgcggaaagataataaattgataagtgctaatgtactgtgatgagacaatttagcaacaactaattcggaataatatggagatgtatgttgtgttggaattcttgcatgctggtaatagttgctaattagtttttgtggttgaaatgctgctaaactagctaatcgtgtagtatagggctgttcattttgatgctattttcaaccttattaaattttggtaaagttataaaaaaaagtggctacatttagtttgctgtcaaattttgatacctatataagaaatcctgccaaattttggcaactatgccaaaattttggcctttttttggcatcaaatgatttgatgtgaaaaaaaataagataaaggaacatgtgaagcatggaagtttagccgccttgttgggcccaccgattatgggctgaactgcatgacatggggccgaatataggcctacgttatcgtggcctttgggacccatgagatgagtcgatcataatagttttgataattgttttggaacgaatgaattgttaattggaatgcacatgtaaaataataagggattaaaaatcataagaaaatacagaaatagtcgttcgattaggccgtgaacaaaatgcaggaatcaaataaaagagatatactcaaagtaaatattccaagaggttgaaattcttgctaacttttcgctagaatttctatagtactgtccattctgtaagaaatttaaaacaaaggatgtaattgaatattttattttaaagacctttacatgatttcttttatatgattaaaattatccaaattcatcttttcctaaagggggcctaaatattgttgccgtcatctgaataggatcactacgatagaaaaagggatcggtgccggatttcctaatcggcacctagcatgcagcacctttgaggatgactctaagatattggtttaggaaccgacacctttgagattctaggaataaaaaaagcaaaaaaagaaggcaaaattggttatatagcatcgaaagttcacgtttttggttttataacaccgaaaattactagttcactttaatagcatctaaagttcaccctgttcccatttttagcacttccgtcaattttccgtccgtcttgatcgttattgatccagccacacacatgatatgacatttctacccctcattgacatgcattatacttgtacttgtgaggggtagaaacgtcatatcgtatgtgtggctggatcaagacggacagaaaacgatcgagaattgacgaaagtgttaaaaatgggaacatggtgaactttgagtgctattaaagtgaaccggtaacttttggtgctataaaaccaaaaacgtgaactttcgatgctatataaccaattttgccaaaaaagaaagttggctcgatgcatcagcttgaattgagccaatgaatcgaggagctctctatcatcaatgagatcaatatcatccccatcaaccaaacacaattaaaatcatcactgaaatcaacatcatcccatcaaccaaactcaatcacaaaatcaacaaaattgcaaacacaagcacacgccgccgccactgccgtcgatacggccttcccccattgtcgattctgccaccctcgtcatcgcattgtcgatcgatctgcccccccgccctcacgcgcggcagcagatccggtacctatgagctgtcacctattaaggtttttgtagtagtggatgactatattttagcaatgcaaatttaaccagcgatagcagtacatgtagcaataaaagtgatgcatctataataagggaacatattttgtgcacacaaccttctcgtgcacagtccgtacacaccaactaatatatgtcaccaaaaaatctaaaaaaaattgtgcatattactttcaataatattacacctatgtgtaaaataatcttaacctcaaattcattatattttagaaaaaaaaatatctgacagttgtaagactataaattataattttgtcttttgctctctatatatgatgaatttaaagatgaaattttatatgtagttataaaatattgaaaatacatgtataaaaatgtttctagaatttttttgacatttgttagttggtgtcagctgaaactaatgccatttgttctagtacatgtacatgtgtgaattttacagcaagtaacactagtacgctagaccttgtgacaccagtggattgctttgggcgttggccagtaaaaaagttaattagtgacaacaggagcgcagcagcaggtcctgcttcaagctctccttccgcaagacggccaactggagttgtagcgttgagcagcatttgtaagattttgtttgttgttatacctgccaaaaatggccaattattgatctgatttcaatttaattagttccgttctaacctactcaccaagctgacaagccaattaggccctgtttctttcagctttggattattataatctagtttattgagtcagattactataagctagattgttataatctgtagtagaataagcggttagttgtttctttcctagattattagagcctagattattgggtttgccagtctaaagagggagtggggtggcatggtgggtaatttttcacccaataatctggaaaaagctaaactaaatgagcttatcagattataataagctacttcaataaattgtctgtttctttcagcttacttccaataatccggattataataatcccaagctaaaagaaacaggcctgagtagttggattgaagttaatcaaggttagttaagagcaggtaatcagggttagttaagcaaatggggctatgttaattaagcaaatgaggaggttatataggggtgggtagggcactggccaggcctccctggcttcgcccctagtttcaagttatttttttatggatataacaggttgcattagataaaatataaatacagtgacatccaaaatccttgtaatgttttaacagctgcagatgctcattttctagacaagtttatttttttaccatttttatatatcacagttttaagttatattttgatggctataacaggttggattaaacaaaatataaatgtagtgacattcaaaaccacaagcatagtgtctaatttttaaataaaaataaaacatgcaaatgttgtgtttggtttaccgattgaaataccaagtctgataactgtttcacaagattcgccaccacctctcttttctccggccagcatcgcactcacccttattttcctccgtcctttatggagaaatcgccgagcgttacgtaagacatgtggcagggagctaaaaggtcggattaggtaatccgcgttgtgacgctttcttgaatgaattaggaatctcatcagtgtctttcaatctcacgcaagttgtttaaattcttagctggcgcagctaattggtgatgcttttaaggtggatactgttatttttttttaagtttgtttttagcatggccaatttcgttgcaatcggccgttatcgcaatgggcaaaacccattttcccttgtgactgtaaaccaatctcttttacatttgacttactaacaatcttattacttggtagagtgctggcgaagttgttaatataaatcttgacagtggtgagcaactggttgccggcgaggttcaacatggtgaggttggcgagcctagacatgtcagttggcagttcaccggagaactggttgttctccgccgtgaaactcttcagaccgacggcggccgacgggagggcaccggacaagcgattgttccccatctcaatccttaagatgttaaatgatatctcactaggtagagtgccggtgaagttgttgtaaatcatgacattggtgagcaactcgaatgaccatatcttcttgggaaagtccccaacaaagtggttgttgtatgccatgatgttgttgatggttttgcaatccccaaggttcgtcgggaacacgccggagaagctattgttgaacaccacaatgtcaaagagcttcttattgaagcaaagtgtatccggcagctcaccagagaggttgttgttggacacctcaaaattccccaattctgaatgttttccagctccgcgggtaggggcccagagagcttgttattgaagagacggatgtcggtgaggtccggcatcataccaacaccagccgggatgggtccagtgagattgttgtagtacaaatatagtaatctcaacttcttcaagtttgcaatgtcctctggtattgatccagagaacttgttcatggacaggtcaagctcctgcaggttgagagctgtgatgttaggaccaatctcgccactcaaattgcttgcatagagatatagattctcgagcttctggtgcttcaatacccactcggggatttgtccctgcatcttattttgtgacaagtccaacaatgtgagctccatcaatgacgacagatcatcagggatggtcccagtaaggttcatccatgacagccacagcattttcagctttgtcagcttgccaaactcctttgggactggacccggctcgaatgggttggatgccaacgtcagcgtctcaagctccacaaggcctccaatggcggcacccgggtaattcccattgaatctattagtgtcaaggaccaatgacttgagcttcgagaaccttgcaatagccgacggcacatcgccggtgaaagcattgctggacaggttgaggtgttgcatccccaacgatagcctgtcaatgcggtccggaagtttgccggataattgattgttggataggtcaaggaactccaaagctgagcaaccgtagagcaccgtggggaaatcaccggtgagattgttgaaagagaggtctatgtaggttaggttcttgagtctacaaacggagggtgggtttggtctggctatatggaaacttggcaaggagaggccagtgacctgacctgtgatattgttgtagataacaccagtccagttgccggtgctgctccatgaactgagtggagctgggttgtcccaatcttgcttgattgctaggagtagtgtttgctcgtcggcgctgggctgcgccgccgattgggagttggagatggagaagatcaatagtagtagaaagaggatgaggatgctgtagacaaccatttttgcgagtgtggtgtgttcttggatgttacatggcgtccacttaaataaggttggcggagagaacgacaaaaaagtggtcactacctcactggtcaagtcttcggcgtggtagcttcaatcctccagtgagcgaaagtcgaaagataacctggtagaaacatgtgagttgtcggttgagcactatgctatcctctttggtccaacttgaatgtatttaagattagaagaatgaaaaagatgatcaccttctggtgtggtacaagacaattacttggaaggagggacatgaattgccttttcctagtcgaaatgttcttattctgttctatcgaaagtctttttatgctttacataatatgtgttctgtcacgagaacggggcttgcgcacgtctgtgtcagcaggttgtggacaaagaggtgacttcgcccgcttatcctattgacagggcttgatgactgatgagtgaacggtacggtatgggcccttcagcgattagtttgccccctctcccccctatactcctccctcttttcccccttccccctccccttcttgtctttctactacagtacaccacacaattttttttaaaaaaaacaaaagttagaaaaatttatgtatagaaatactatatatagaaaatttgaattcaaattcaaatttgaatcgggtatgtaaacttttgacttctaaactttgggtctataaactttagatgtatagaaatactatatatagaaaatatttgaattcaaattcaaatttaaatcgggtatgtaaacttttgacttataaactttaggtctataaactttaggtgtataaactttagatatatagaaatactatatatagaaaatatttgaattcaaattcaaatttgaatcagatataattcaaattcaaatttgaaacgggtatataaactttaggtctataaactttagatgtatagaaatactatataaaaaaatatttgaattcaaattcaaatttgaattggatatataaacttttgacttataaagttttggtctctaaactatagatgtgtaaacttgaggtgtataaactttaggtgcataaatttactaaaatatgaaaataatgtggtgccaaaaaaggaaacaggtggagggagggagggggaggtggggagcgaatctgatcgctaccccatccctagggcgatcgatcgccgaacagcattttcggaacggcatcggttgaactcgcagaagaattctctaacgccgacgatccagtcatagtaacagtggaaacttgaagcattctgctattataaattgggccggagggagtatttcagagggtattactgcaagtaaagtgaaaccatttattggatttcacaaattccatacacctaaaatccaataattaataccctcttgagaattattacatcatgccatgcctgtaaccaaattattgcgatttttttattgttattgtaattctaaaaatcgaacataactatcgttggaattcatttttcattttctagaagtcccgtcaaccgtcggcggctttgcaactatactcttatacacccccgcatgctgggtctcctttctattgttggaattcattttttattttctagaagtcccgtcaaccgttgacggctctataactatactcttatacacccgcccgctgcttctcctttttatcgccattgagattttaaaaattgaatatgattatcaatggggtttgtttttttttttcactttctagaagtccctgcaaccgccttacatgtttgcttcacgggctgcctgacgttcctccttttaatcatcattagaattatatttggtgttttattaataatttttatatctcgtactcctttataggcatgttacttaatttatctcgtcatgggttttaaatggactttcaataatctttatttttatcacaaattttagttatttataaattgtattcctaattgaaatcttatttttctttttctaatttcagaatttttttaaaaaaattatttaatatcgtattgtgttattttaatgtttttattttttattttcaatttcatttgtttcaaaattttattcctacttgaactctcttttagtttttctaattttagatattattttatttttattctaaattttaattaatctcgtattgggttcttatatggattcttctttcaatattgcttatttttaattccgaattttagctgattttaaattgtattcctacttaaactcttattttattttcttttgctaattttgaatttatttatttttattccgaattttaattaatctcgtattgggttcttatatgtactcttcttttaatatttcttatttttaatttcgaatttcagttatttttaaattgtattcctacttggactctcatttccttttctaattttggattttattttatttttatttcatttttgattaatctcgtattgggtacttatatgaaaacttatttcaatattctttatttttatttccgaatttcagctatttttaaattgtatttctacttgtactctccttttctttttaaattttggattttattttatttttatttcgaattttaattaatcttgtattgggatcttatatggactcttcttttaatatttcttatttttaatttcgaatttcaattatttttaaattgtattcctacttggactctcatttccttttctaattttagattttattttatttttatttcatttttgattaatctcgtattgggtacttatatggaaacttatttcaatattctttatttttaattccgaattttagctatttttaaattgtatttctacttggactctccttttcttttttaattttggattttattttatttttatttcgaattttaattaatcttgtattgggttcttat

SEQ ID NO: 4896 - DNA, 12121 bp, Oryza sativa
tccgccgtgcctatggccgccgccggcgaccataggggcgcgggcgcgtcgcctcccgtcggctgtgccggcgaggccgccttcgggcgcgccccgcggctgccatgtggggcccggccgtcagccgcccgcgccctcgggtgcggctgacgcgtgggacccacggcgccggccggcgtaagccgcgtgcacccggtccaccgtggaccgagaggctgccgcgtgggccccactcccgtggaaccggtccgcgcgctcctttctcccggctgacgcaataaatatgtttttaaattaaaatttaaatgaagaaattcgtaaatatccatttaaagagcatataaacttcaaatggccataacttggccatttgaactcggaattggaccgatcaagtctctaatttttccttaagaagccaagaacccatttttgtgctttgtttctgcttgttatatggagtttagtagagtaaaagccgtttcttttccgttgtcgtgtagacgctgcagcttcggaagatccgctcttcgtggaggttgaagccgacgtttgggaaagcgagcaaggcaagtcacatcatctttgaacatattgaatcccagtttgtaaaattatgttgatttaaacttattgcattatcgctttatttaaattcccgcgtcatcactgttttacttagccatgcctatttacctttgttatgacctaataataattgttattgttattattccctggttaaccctagaataaacaaaaccccaactagtgaacaatctactcatggtaccactagtatgattttaggtagatgcttcgctggttaattatgcaacattaggtggttttacaactctagactttgggaatattcatatcacctggacactatggaatggttggattattgtggaattggattcacacctccccctctattcaaaaccctcaaaatggttttaggctgggctcggggtgcatggttttgacagtagcacctcggccatataaggaccggtcatcgggcctctgttgcaaagcactaccgtacttccacatgtctagtgggtaaggcttagtttgtgtgtcgcgtcccaaaacgactctaaaatacatcctcaaaattatgcatagaataagtaaaatccatgtgaaagcctccaacaattaaaatgtgcaaagttaaaagtcaaataaggtttggaggatttttgtatatttcctaaaagcctaaaatgcgtaaataaattttagtggaattttcagagcacaaataataattattaagaaataaacaaagttaaaaaggttttataaaaagaaaaaccctaaaaagtccttttcccccccttcccctcttgggccggctcggcccacctccctccctctctctcctcttccccccgcggcccaatcggcctcctccccgcgcgcgtgccgctgacgggcgggcccgcccgccaccctcgctgacgggtagggcccacccgtcatcccctacctcccgccgctcccgccgcctcgcccgtgccctagcgccgccgccgccgcggattccgccgcatcccgccgcccccgcgtgcaataaagtgaggggaatcattccccgtgattccctctccctttccccccatttttccctctctctctcgcattcaaacgggcggatttgcccccgcaaatctcgccggcgccattgatggagcccgagagcgccgcgccggtttccttctcccccggccgccctctctcactcccaacactatataaacgctccccgtgcctccctccaccgtttccgccactcgccgctctctctctccgccggaatcaagctcgcgccgtcgctctctctctccgccgtcaccgccgagctccggtccgccgccgtcgtcgcctcggaccttctcccgcctcggcgtcgcctccttcggctccgccgcgtcctcgccgacctcgtccacccctccgtttcgcccgccgaccgccggaacgccgccgtccccgtcgacccgtgccgcgccgccgccttcttccgctccggtcgccgttcccgtcgtcgtcgtcgacccggggtgagccgtggaccgcccatttcgtttcccccttccctcccctctctcggccgccgctccgccgtgcctatggccgccgccggcgaccataggggcgcgggcgcgtcgcctcccgtcggctgtgccggcgaggccgccttcgggcgcgccccgcggctgccatgtggggcccggccgtcagccgcccgcgccctcgggtgcggctgacgcgtgggacccacggcgccggccggcgtaagccgcgtgcacccggtccaccgtggaccgagaggctgccgcgtgggccccactcccgtggaaccggtccgcgcgctcctctctcccggctgacgcaataaatatgtttttaaattaaaatttaaatgaagaaattcgtaaatatccatttaaagagcatataaacttcaaatggccataacttggccatttgaactcggaattggaccgttcaagtctctaatttttccttaagaagccaagaacccatttttgtgctttgtttctgcttgttatatggagtttagtagagtaaaagccgtttcttttccgttgtcgtgtagacgctgcagcttcggaagatccgctcttcgtggaggttgaagccgacgtttgggaaagcgagcaaggcaagtcacatcatctttgaacatattgaatcccagtttgtaaaattatgttgatttaacttattgcattatcgctttatttaaattcccgcgtcatcactgttttacttagccatgcctatttacctttgttatgaccttattattattgttattgttattatttccttgttcaccctagaataaacaaaaccccaactagtggacactctactcatggtatcactagtatgattttaggtagatgcttcgcttttaattaggtaacattaggcggttttacaactctagactttgggaatattcatatcacctggacaccatggaatggtttggttattgtggaattggcttcacaccgctccttctattcaaaatccccaaaaatggttttaggctgggctcggggtgcatggttttgacagtagcacctcggccatataaggaccggtcttcgggcctctgttgcaaagcactaccgtacttccacatgtctagtgggtaaggcttagtttgtggctcagtctagtcataaacaaaagtacacggatggagatggaagaagtcgggggtcgatggacatctctaggacaaatgaaggctacacgagctgcggcccggtagtcgagatgtcatggcacagggccggtgtcctgctgctaggggctcagtcctgcctgcctgtcccgggggttccggccgtaggtgggattgggtcggtactcttgtctatggctaggatgggttggaaactatgtcacgtctttcgtctgtataccgtggtggtatgtggcacgtggttacacgtgaggaagatgtgtcttgtgggtaaagatgtacacctctgatcagagtataatctattcgaatagccgcgccctcggttatgggcaagccgagcaatgtacccaagttagtgttttaattcttaaaacctgcataacaactaaaatgtggaatggttggcctgggttggcttgggacgagctgggacccagggtcgggtttccagttcggtctgaatcatcgtaggccttgggttaaggcaggttcgtgtgggttcacggccttatttaataatattgtatagctctaggagcgtatttacaaaatagctttcagcaactacgtgtcttttaatgctgtttactgcaaaccctaaccctttatattatgactcccttgtactcccttgcatttattctgcacttgtgggtgtgtcttgttgagtatggtggttgtactcagtcttgctcaatttttcccaaacccagaagaggagcccctgtatgatgaaggctttggtgtctagctcgtgcctgccgtcaagcgcctgtggtcgtcgccctagtcttccgctgttttccgttcgtctttgtgtgtgctgggccttcgccgcccatataataaattatctatttactcttccgcttgttaaactctgaactgtatcaacttttggtgtaccttgccttctgggacaaggaataatgcacgcacgtaaggaacgcccgttgggttatttccggtcgtgacattagggcacccacaatggttatctataggctctctacaagagatccatgtcagcatattttcctacttggaagagattaaatgaagagaaagagagcaaagctatctactaacctggaaatagtctatagagaaaaacgaggtaatggattagagagctatagatacccatgtagacataccattgaagtggtttactattaatctagtctattgctgagatgtacatgttttatagatagcatcttactttaccattgcgggtgctctaatagtaggaagtgggctatattattatccttgctctgagaatgtttttcaatcaacgtttgaccattcattttattcaaaattttccgttagctgcgccagcatccagcgcagaccggagaagccgacggcgagtatgagccttgctggcggcgaggtatccggcgccgtcctcctcacacaattgtgtagcgcagctgccatctgcgtggcgggatggttggtgccattgccggcagccggccaggtggcgaggtcgggaacatggaagcaatgctgctccatcgatttattcctcagatcagcagcatcgtcgcagcaaatgcgtcgacagatgagctgcaggttgatcagtgatcagcaaaagcagcaggaggaggaggacgtggtggtcgtcgatcgacgacaatctttgttgtcgctgcggccgcgaagacgtgatatcggctgaactgctgatgatcaagaacctgcagtgccggttggaggagaccatgctcggcatcatccgtcacgacaacatcgtcgtcctccggggttccatccagagtgacgacgacgacggcacggtccagctcgtgtacgaggacatggagaacggctgctgcctccacgaatggctgcacggcaaccgccgatcccagctggaggccggcgagaggcagcggcggcggcggctgagatggcgggcgcggcggtccatcgccgtcgacgtggccagagcaatctgctacctgcaccacgattgcaaaagccccatcatccaccgcgacatcaagccgaccaacattttgctcgacggcaacctcaaagccaagatagctggtttcggtcttgcacggatcaatgttgctgggctcaaccaaccgttactcaacgtagaaattcctagcgaggcctttgggtatactgctccaggtgaggtgatctttaatgcacgatcaattccgatattttttaaaaaaaaacagaaatagattctactttatcataaacataattaaaggcaccatgattaaatcattatttaggtctggtacaactcaaaatccaaggtttcttatagctaaatattcatagctacataaatttgttgatttagtccatgcatgattacgttgataacattagataaatcgttttatttttattttagataaaatttgtaattttaaaccactataatttactatggatttgggatttgaagttgtgctaaacatgactttaccatttatttgtaattcactacatatatattgacatgtttttttccctacagagtatgcaaccgcgcaggtaaatgagaaggtggacgtgtacagctttggtgtggtgcttctgagctcgtcacgggaagattgggtaacgagccaggcgtaaataatgggcacttggctatgtgggcgcatagagggtacggtcgacatctcagcaaggacgtcgttgataaggagatcgtccctgatatggcacgatacttgaaggagatgaaggccatgttcaagctcggtgtggagtgcaccgctatggacccacgggagaggccgtccatgctgacggttcttcgtcgcctcaccaagcttggttccgtatatgtcagttgtttcaattcatgtgataattaactatagtggggatggcttgtatgtagtgcttccttcagtcattaatatataacattttttttctatttgtaagtactactcactttgcccaaaatataagaacctattatgatgagatattttctagtagatttatagtattagaaaatgtcttatatttattctatttttttatattataggatagagcgagtatatgactccgcacttcgtctaggttaattaaatagcgcgactcatagccctaccccgtttgccactgtgctagcgtaattatttcaccatcaagtacacaatgaagaacgatctcaaaatggccggcgtattaagttttcaagtctatctgtaatctgtcgatgaactttctcaatgcacgagtcatggaatgagtacggagcgccagtcggtcaatgaccgaattgttatacattctgtcattatgatattattatatttgtaagagctccaacggttagcctaataagtcaaagcaaaagttaaaatttaaaattttaaacttgattttgaagttggttttaaaatattttcaacgtaatttctttttagcgttaggtttttagtcgctacgaacaaatatacaaaagttttatctataaattaatttgtattctctaataagtcgttttagcttataagggagtatgtgccaccggtgaggctctaatattgtagtcttagtctttagacctatcttctatctttgtcggctctagctagtttctgcttgttctttacatttacgtttctttgggaagtttcattcatggatacaccaatatatgcttgggtattatcgatctacctaacgaacaaatcaaggtttgcaatctcgaagtttggtttttttcgcgtgggggtgggggggggaagaaatttcttagccgaaattatttgaaaatttgacgaatgttgaatgattttgaaggaactttaaccaaattcgaaaaaaaaatggataacaaccgaaaattttagacgagatttgtgcttgccgttgatcggtggagggcgaaatttcgtttcgaaattgcaaatcactggaacaaacacttggttcttgttcgtcggagtataaccctctggacgtgctttctagtctgttgtgtcagtatcagattgcaaatcgtaaaatgatatcattgaagagcatcagccagaagatcaatacaaactgatcaattatttaagtggaaatatctgtcaagctgtactgtccttgcgtagttgtgtattatcgaagaccttgaccaatatagcccctaaacacacggtaaagactagacaccaagcttcaagtctgcagtagcgtactgcatacgtacactgattaattagtgatcatcaactgagagattctcactcactctccaagtcacagcctcactgagtactcattaaacaagcaatcaccactcgtaaaggctaacgaaaaatgtccaataataatactagtaatattttattactactgctcctcttcttcttggggtccggtgctgagctcgatgacggcggcgagctccaaacacttctaaccatcaagagagattggggtagccctgctgcactcagctcatggaagtgagaaactccagttctttcagtcactgtaattgggcaggaattggttgtagaaatggccaggttacatccctctccttccacaacttccaaatagccaatctaatcccagcttctatttgtagcctcaagaacctgaagtacttagacctctctttcaacaatctcaccggtgagttccctacggcgctctacagttgctcagctttgcagttccttgacctgtccaacaatgagttcactggcaaacttccggaacatgttgacaagctgtccttggggatgcagcacctcaacctgtcaagaaattctttcatcggcgacctgccatcggctattggtcggttttccaagctcaagtcgctggtgcttgacagtaacaatttcaatgggacctatcagggtgctgccattggaggtctcgtggagcttgagatgctaacattggcatataatccgttcaaggctagtctaattccaaacgagtttggcaagctgactaagctgacatatctgtggctatcatggatgaacctgattggtaacatccctaatgttctgtcagcattgacagagctcgagctattggacatatcaataaataagttggaaggaaaaaatcccaaagtggatatggaagcttcagaagctcgagatgttgttcctctccggaaacaatttcattggtgagattggttctgacatctcagctctcaaattgcaggagcttgatttgtccatcaacaagctcaccggatcaataccagaagatattgtgaacttgaagaacttgaaaattctatacttgtactacaacaacctcgttggacaaatcccaagtggtgttggaatgctgccgaatcttaccgaccttcggctattcacgtgccatggagtgtttccggtgagcctcggggactgcgacaccatccacattatcaaggcatccaacaaccactttgttggggacttcccagagaaaatatggtcgtgtgcgatgcttaccatagttatgattggaggaaacaacttcaccggtactctgccaagttagatatcatccaacatctcgtagatttagataggaaacaataggttctctggtgcaattccaacatcttctgcaactggactccatagatttttagcgaaaaataatttgttctctggcatgctacctccagacatgtccaagctcgccaaccttgtcaggctggatctttctaggaaccaactatctggattgattccaacatattgttaaacacaaaaccacctgagtattttatatgttactctgtattttgcatgttagttcaaggccagagaggcagagatgcacacacacattcatatcaagctccatctactttattcgtcgtagccttgtaggagctatggtgtgtgggcaatggtattgagtggctaatgtgcatcgtggcctacgtctatgttttttttcttttaagaataaaggtaataaagacctagctttttattgaaagccatctagattttgctggggttacctgcttaacatgatcacatgtttaggggatgataatctgactactcgcttacaccctaaacaggtatgcaaaactcaaataacatgttccatatatgaaagcaaaattggctgtgtacaactgtacaaccgctctatggatgtagagtctggtttcaatccatctcatcataaaaaaaaatgaaagctaattaagaggtagaaacaacagagctagctataagcaggagtgcaggagcctcccctgtgaggtatgtactggagtacctagcaaaaagaacacctaccagaactactttgataaatgcaaacagtgatgctattgtcgtttgaacatgactgataagtgtctctaggacagggttttcaattttgatttcggctaaaatttcggccatttttatagaaccgaaatttaggttttattggctgaaattttctaaaattttgattaaattcacaaaaaaattgagaaaacccgaaaatatcgaccgagatattgacttgccgagagggttttcgaaagagagaatccattatatgccactgactttatcacaggtctatgatataccattgattttgttacgttttacaatatatcatcgacttttgcttaacttctacgatttaccatcgccatcgacttttgcttaacttttatgttcactgagttagtctccgttagtactgtacaaatttatcgaaatgaccaaaatacccctgggacagaaactttcaaaaattttgaaatatcggattttaagtttttgccaaattttggatatttacaatcttatgtttataatatgatattttagaatttttattcaaatttcggaagtttttttctaggagtattttggtcatttgggcaaaattgtacggtgctaatggaggataaccggacggcgatggtaaatcgtagaatttaagcaaaaatcggtggcatattgtagaatgtgataaagtcagtggcaactcatagatctgtaataaactcagtggcatataatagattctctctttccgaaattaccagaatttcggaaattttgaaactaaaattacaatccctgctccagggctgcattgttcataaggatgtagtacgtcgtagcatcttccactgcaagagtaaagacatgattcgaaagacaacaattagcgacgtgtccattttgcagctttatcggtctataaaattattaagggtgagtaatgctgtgaaaatcaaaattttatagtataaatgtatggacggattaactggtatgaacacgtcctcggccccaaggcccaacagcccaaggctaacattctgtcttggcccattacgcctactttccattgctgtcaagatattcttatggaacttgtcgagaaaacagaaagaaatcagtccagcaaacgcaacaggcagcattatatatcagccttgctaataataaacggcatcaattgtctctaattacagaaataccggctcgggttacaattatctatttatagccagcatcaattacgataattaacattatctaaaaaaattgcgataattaacactattcacgaggcctctatataaatagatcatctactcgtccagtacgagagcctgcagattatattcttctctaaaagatcatcgagccctgcaaaaatcagaccacaaataatggagatgaagaacgtcgattctcggttgctgtttctgctgctgctgatcatcggatgcgctgctgttcctgcagtgcaatgtaagggcaatcctaattagaaattatcgactctgggctacggcgggagccaaacgcctagtgcagatattgccttagtgtctattcgatctttgtaaatattaccttttctccttacatgtaaatattgctccctgctttattcaatgaatggcaagcattgccgtcgttcaaaaaaaaaactatatactcagcgggtgtggttggttcaacataaactctcatccaatcacctctcttatctctcctttttttttatctattgttttcattcttgatttatgtgtagaggtagtttcttactaatgatttcttcatcttttttcatctctcctcattaactttttagatacctcggtttttgttttacatgaaaatgcatttaacactataaaaattagatgagatggaacgttgagtgcccttagtttatctccacatatattgttaattgactttgtttcttttggtggaggtgaacttaatgattcgaaaaggatctcttagcatgaacacctaataaatcttatgcaaaatagggtagaacaaagggtggattattgaccagaattgttgatgccattaattgttcgtggttcaaaagcctctgttgatgtaggtgttagtgtagtgcagattcacctgcagcagaaaactcaacgccaaaatggattagcactggtgcatgtggaccttaattaagatcgatggcgtatgtatatggttttgggggtggcttaaatcaaagtccaaacatctttttaattagtctcgagaatactgatcaatatatatacagaaaattccttaggttcctcggagttttcaattaaatttttcccctaaattttgtttcgttccttacgtgtctgagttcttgattattttggattccaatttccaatccgtgcattctaaacccttgaagcccagacaccttaaagcaccatatgaccgtcctatatacatctagctagtcgactgcgagttaaccgttagactcttttagaaataataattagcatacttcctctgttttatattataagactttctagcattgtctacattcatatagatgtttgctataaaa

SEQ ID NO: 4897 - DNA, 6591 bp, Oryza sativa
cgtttcgcccgccgaccgccggaacgccgccgtccccgtcgacccgtgccgcgccgccgccttcttccgctccggtcgccgttcccgtcgtcgtcgtcgacccggggtgagccgtggaccgcccatttcgtttcccccttccctcccctctctcggccgccgctccgccgtgcctatggccgccgccggcgaccataggggcgcgggcgcgtcgcctcccgtcggctgtgccggcgaggccgccttcgggcgcgccccgcggctgccatgtggggcccggccgtcagccgcccgcgccctcgggtgcggctgacgcgtgggacccacggcgccggccggcgtaagccgcgtgcacccggtccaccgtggaccgagaggctgccgcgtgggccccactcccgtggaaccggtccgcgcgctcctctctcccggctgacgcaataaatatgtttttaaattaaaatttaaatgaagaaattcgtaaatatccatttaaagagcatataaacttcaaatggccataacttggccatttgaactcggaattggaccgatcaagtctctaatttttccttaagaagccaagaacccatttttgtgctttgtttctgcttgttatatggagtttagtagagtaaaagccgtttcttttccgttgtcgtgtagacgctgcagcttcggaagatccgctcttcgtggaggttgaagccgacgtttgggaaagcgagcaaggcaagtcacatcatctttgaacatattgaatcccagtttgtaaaattatgttgatttaacttattgcattatcgctttatttaaattcccgcgtcatcactgttttacttagccatgcctatttacctttgttatgaccttattattattgttattgttattatttccttgttcaccctagaataaacaaaaccccaactagtggacactctactcatggtatcactagtatgattttaggtagatgcttcgcttttaattaggtaacattaggcggttttacaactctagactttgggaatattcatatcacctggacaccatggaatggtttggttattgtggaattggcttcacaccgctccttctattcaaaatccccaaaaatggttttaggctgggctcggggtgcatggttttgacagtagcacctcggccatataaggaccggtcttcgggcctctgttgcaaagcactaccgtacttccacatgtctagtgggtaaggcttagtttgtggctcagtctagtcataaacaaaagtacacggatggagatggaagaagtcgggggtcgatggacatctctaggacaaatgaaggctacacgagctgcggcccggtagttgagatgtcatggcacagggccggtgtcctgctgctaggggctcagtcctgcctgcctgtcccgggggttccggccgtaggtgggattgggtcggtactcttgtctatggctaggatgggttggaaactatgtcacgtctttcgtctgtataccgtgctggtatgtggcacgtggttacacgtgaggaagatgtgtcttgtgggtaaagatgtacacctctgatcagagtataatctattcgaatagccgcgccctcggttatgggcaagccgagcaatgtacccaagttagtgttttaattcttaaaacctgcttaacaactaaaatgtggaatggttggcctgggttggcttgggacgagctgggacccagggtcgggttgccagttcggtctgaatcatcgtaggcgttgggttaaggcaggttcgtgtgggttcacggccttgataaaaaaatattgtatagtactagaatcgtgtttgcaaaatagccctaagcaactaatgtctttaaatgctgtctactgcaaccctaaccctttatagtataactcctttgtactcccttgcatttattctgcacttgtgggtgtgtcttgttgagtacggtggttgtactcagtcttgctcaatttttcccaaacccagaagaggagttcctggaggatgaaggctttggtgtctagctcgtgcctgccgtcaagtgcctgtggtcgtcgccctagtcttccgctgtttctcgtttgtctttgtgtgtgctgggccttcgctgcccatgtaataaattaactatttacgcttccgcttgttaaactctgaattgtatcaacttttggtgtaccttgcctcctgggacaaggattaatgcacgcacgtaaggtacgcccgttgggttatttccggtcgtgacattgtggctcagtctggttataaacaaaagtacacggatggagatggacgaagtcgggggtcgatggacatctctaggacaaatgaaggctacacgagctgcggcccggtagtcgagatgtcatggcacagggctggtgtcctgctgctaggggctcagtcctgcctacctgtcccggaggtcccggccgtaggtggggttgggtcggtactcttgtctgtggctaggatgggttggaaactatgtcacgtcttccgtccgtataccgtggtggtatgtggcacgtggttacacgtgaggaagatgtgtcttgtgggtaaagatgtacacctctgatcagagtataatctattcgaatagccgcgccctcggttatgggcaagccgagcaatgtacccaagttagtgttttaattcttaaaacctgcataacaactaaaatgtggaatggttggcctgggttggcttgggacgagctgggacccagggtcgggtttccagttcggtctgaatcatcgtaggccttgggttaaggcaggttcgtgtgggttcacggccttatttaataatattgtatagctctaggagcgtatttacaaaatagctttcagcaactacgtgtcttttaatgctgtttactgcaaaccctaaccctttatattatgactcccttgtactcccttgcatttattctgcacttgtgggtgtgtcttgttgagtatggtggttgtactcagtcttgctcaatttttcccaaacccagaagaggagcccctgtatgatgaaggctttggtgtctagctcgtgcctgccgtcaagcgcctgtggtcgtcgccctagtcttccgctgttttccgttcgtctttgtgtgtgctgggccttcgccgcccatataataaattatctatttactcttccgcttgttaaactctgaactgtatcaacttttggtgtaccttgccttctgggacaaggaataatgcacgcacgtaaggaacgcccgttgggttatttccggtcgtgacattagggcacccacaatggttatctataggctctctacaagagatccatgtcagcatattttcctacttggaagagattaaatgaagagaaagagagcaaagctatctactaacctggaaatagtctatagagaaaaacgaggtaatggattagagagctatagatacccatgtagacataccattgaagtggtttactattaatctagtctattgctgagatgtacatgttttatagatagcatcttactttaccattgcgggtgctctaatagtaggaagtgggctatattattatccttgctctgagaatgtttttcaatcaacgtttgaccattcattttattcaaaattttccgttagctgcgccagcatccagcgcagaccggagaagccgacggcgagtatgagccttgctggcggcgaggtatccggcgccgtcctcctcacacaattgtgtagcgcagctgccatctgcgtggcgggatggttggtgccattgccggcagccggccaggtggcgaggtcgggaacatggaagcaatgctgctccatcgatttattcctcagatcagcagcatcgtcgcagcaaatgcgtcgacagatgagctgcaggttgatcagtgatcagcaaaagcagcaggaggaggaggacgtggtggtcgtcgatcgacgacaatctttgttgtcgctgcggccgcgaagacgtgatatcggctgaactgctgatgatcaagaacctgcagtgccggatggaggagaccatgctcggcatcatccgtcacgacaacatcgtcgtcctccggggttccatccagagtgacgacgacgacggcacggtccagttcgtgtacgaggacatggagaacggctgctgcctccacgaatggttgcacggcatccgccgatcccagctggaggccggctagagtcagcggcgtcggcgactgagatggcgggcgcggcggtccatcgccgtcgacgtggccagagcaatctgctacctgcaccacgattgcaaaagccccatcatccaccgtgacatcaagccgaccaacattttgctcgacggcaacctcaaagccaagatagctggtttcggtcttgcacggatcaatgttgctgggctcaaccaaccgttactcaacgtagaaattcctagcgaggcctttgggtatactgctccaggtgaggtgatctttaatgcacgatcaattccgatattttttaaaaaaaaacagaaatagattctactttatcataaacataattaaaggcaccatgattaaatcattatttaggtctggtacaactcaaaatccaaggtttcttatagctaaatattcatagctacataaatttgttgatttagtccatgcatgattacgttgataacattagataaatcgttttatttttattttagataaaatttgtaattttaaaccactataatttactatggatttgggatttgaagttgtgctaaacatgactttaccatttatttgtaattcactacatatatattgacatgtttttttccctacagagtatgcaaccgcgcaggtaaatgagaaggtggacgtgtacagctttggtgtggtgcttctgagctcgtcacgggaagattgggtaacgagccaggcgtaaataatgggcacttggctatgtgggcgcagagagggtacggtcgacatctcagcaaggacgtcgttgataaggagatcgtccctgatatggcacgatacttgaaggagatgaaggccatgttcaagctcggtgtggagtgcaccgctatggacccacgggagaggccgtccatgctgacggttcttcgtcgcctcaccaagcttggttccgtatatgtcagttgtttcaattcatgtgataattaactatagtggggatggcttgtatgtagtgcttccttcagtcattaatatataacattttttttctatttgtaagtactactcactttgcccaaaatataagaacctattatgatgagatattttctagtagatttatagtattagaaaatgtcttatatttattctatttttttatattataggatagagcgagtatatgactccgcacttcgtctaggttaattaaatagcgcgactcatagccctaccccgtttgccactgtgctagcgtaattatttcaccatcaagtacacaatgaagaacgatctcaaaatggccggcgtattaagttttcaagtctatctgtaatctgtcgatgaactttctcaatgcacgagtcatggaatgagtacggagcgccagtcggtcaatgaccgaattgttatacattctgtcattatgatattattatatttgtaagagctccaacggttagcctaataagtcaaagcaaaagttaaaatttaaaattttaaacttgattttgaagttggttttaaaatattttcaacgtaatttctttttagcgttaggtttttagtcgctacgaacaaatatacaaaagttttatctataaattaatttgtattctctaataagtcgttttagcttataagggagtatgtgccaccggtgaggctctaatattgtagtcttagtctttagacctatcttctatctttgtcggctctagctagtttctgcttgttctttacatttacgtttctttgggaagtttcattcatggatacaccaatatatgcttgggtattatcgatctacctaacgaacaaatcaaggtttgcaatctcgaagtttggtttttttcgcgtgggggtgggggggggaagaaatttcttagccgaaattatttgaaaatttgacgaatgttgaatgattttgaaggaactttaaccaaattcgaaaaaaaaatggataacaaccgaaaattttagacgagatttgtgcttgccgttgatcggtggagggcgaaatttcgtttcgaaattgcaaatcactggaacaaacacttggttcttgttcgtcggagtataaccctctggacgtgctttctagtctgttgtgtcagtatcagattgcaaatcgtaaaatgatatcattgaagagcatcagccagaagatcaatacaaactgatcaattatttaagtggaaatatctgtcaagctgtactgtccttgcgtagttgtgtattatcgaagaccttgaccaatatagcccctaaacacacggtaaagactagacaccaagcttcaagtctgcagtagcgtactgcatacgtacactgattaattagtgatcatcaactgagagattctcactcactctccaagtcacagcct

SEQ ID NO: 4898 - DNA, 6686 bp, Oryza sativa
gtcatgttgatgtgtcttttcctccatttgcaggcatttttgtactccttgaagtatagtatacctcttgttgcataccatgaggaacaatgtttgaccctctttgaacatcctttggttgatttgttgcacacaatccactatgagaccaaggtctgatctaaagatatttgctacgcaaacttatcttttcttcctttttaacaatggtcggcagctgagtaaatgttaaattctcttcataggtaaaagtggtgccttcagttgaggacctcttggggtattcatcttttcaggtttgtctatccgtaactttggcatgcaaaagtttacatatcatatctgttaaggatagtatgcctttctaccttactgtgaaatgcattagtatatattagttgaacaatttttgaagtaacactgcgatgtggtaaaagagcagctgttgctgggaacttgtgatatagcatgaggacccttccaaaatagacagaattgtagttgaattatccacattatcgtcacgactcgagtccatgactggataaccactgccggaactagcaatagcggtagagctgctattttctgaaagcctttctctattagcattctggaatacagacaaaaatcttccattctaatcactgcagccactcaaccagtagtgttaaatgtagtaattcctgatgtatgctcccttcttggctgtccaacataaaaataaatccataaaaagttaagctaacccataggagggcttacacaaatctcttgaagatggggtttctagaatatggctagaaaactactccctccgtttcacaatataagtcattctagtattttccacattcatattgatgctaatgaatttagataaatatatgtctagattcattaacatcaatattaatgtgggaaatactagaatgacttacattgtgaaacggaggaagtactatttaacaatcctcggtgaatcttcagtaagtcaaccagatagatatttagaccagttttatttggattggagttacacaatttatttgcacgtgcagaagttgcttttccttgacaaagtggatggggattcatctgtactgagacagcattggtcagaactaacacaaggaagagcacgtgttatcaaagcgcattcaagtatgattgagattgttccacttaatgcttcaaagggtggtggtataaggattttacttgatcatcttggaataactgaagatgtatgtatctgtttccatcaaagaaagcatttacctttttcattttgtgcgtaattttgctctctagattgtgctctcttagaagggaacatcgccgctaacaatatttttttttcttttacaaaattgtttctcctatgcagtctgatcttgatgctgtgggagactacacaagatggctaagcaacatatttacttaaccattcttaagcaaaagcttggtgataagcttgagataagaagaaatgacatgcatatgtgatgcacaaaaaggaaaacaaacaaggattccacattggacatgtctattttgaagcatgtaagaaaacaaacttcataccaccgtccttttgggctggaagagaaattactgtacccttaaacttttgaaagggatatgggtgtggatggaaagtttgctacttccttcaggtaatgtatttttttaaatttagattacgttactctatttacattggattgtgtgagaaccatttgtccttttgtttaaatttaaatagcatgaaactcatccttttgttgttcacacttcacagatctcatttatggaggtgtgttggaaataaaatcagaccagcccatctgtgatgtcaagaaaacaaacatcaagaaagtgcaatttgcaactagtgaaaattttatgtgagactattagtgttcctttgctctgagcaaacgtgtcaaattcatgccaattttgtttttctgtagaatacctgtatagctgcgctgcacaaagcattgctagttgttgctcgatcatgtaatgcaagagtactctagttcccagctgataggattttgcttattagctagctgtatttcattccacccgtttttagtagttgaatttcaaatggatggacttaaggaaatgtaagaagccaggttgatcccagaagaaaaaaaatagttgagtttccttgtgaaaaggagcagtacaagcgcagcacaacatgttagctgaaactggatacctgaaaccctagtacttgtttgtttccactttccagggtcatattttttgttacgagttaatatgcatttgtacatctttcttgctctggtgtgtaggtggtttagcactgctgcacaggaggctggtgctgcttggtcttgacagcagacaggtaaatgatcctttcgagggcctcttcgctatcatcttgttgcatggctttggcaagtgatttgatcgttgattcatgtctagtcctgctgcatagcttttgcacgccttcatcctcttattgtaggtaattttctttgcaaggtcctgaacacatgtagcatcagatatcgatgtgaatgattgggattttccttggtaatagttggacagccctctcctgcagaaaacaaatttacttgttagaaaacatatgatttagtgtcaattttgcaattgaagtagattttatggaagtggtctggaacgtttgatcttttaatatcgacattattttctccagtcatttcgtcttttgaacaaaatgttcaaataagacctgatgctgcatacatacatagatcaagcccaatttgaacattttgcttgtcataaatgttatgcaaaatagaatctctacaatttagcaggtaggcaatatcattaaaattcaaccaacaaatctgaaaagctgttcggagaaaatcattgtctagttgaaaaaatgaactagctagtagctactatatcatttgcaaatgtgttcattcaactaatatagtttacagtagtcaggtgataaatccttgtttgctggcacaaattgggaacacaagcaacaaatttcacaccgttaaagcatctaccgaaacttgaaattcatataagcatggtgcaattttctctaactacgagtacttctgcaggggaggagcaaagcacctgataggaagctgggctatcagtgaggacaagtcacagagcggcccttcagaatccagctgcaatgtgctcgaagatgctgatgacgacgacgatgacggctcaagataatcaccaggacggtaagaactcccatcatcactcagatccgatgccgatgagcacgacgacccgatggacgaacccgagaaggaaccatcttcagatcgatcatcactttgctctatgcaggcctcctcatgagccccaggaggcaccggcgcgcaagcttctctcattcttccaggagcaaatggctgcttatctcctgtgtatttttggactccagattttggaaggcaaaggcaagtatccaagttaagttcccctctcttccccatgtgcatatatgtagtagacgcaaggaagagatagggtgaaataaaaaaaataaaactaaaaaagaaacagccgttccggtgggctgatggggtcatggatagatacataggtttcctgtatattcagatagggttcatggactctggcgccgaaaagtaagccgaagctatcctcaagttccttgctccatcaggtcttctagacaggctggtgataaacacgccatatattattacatagttattacttattaatgtagatagataaagtaaaaacatatttatcatgcaatcacatattgagagaattttgctttataagttagatgcatctacatgtggtagtagtgtgtgagttataggggagcatgtgaaaacgatgaggataaacttacttatgggggttgagatgagcatcttatctgatctgtttatccttgaggattaggatagataaggtaaattacggtggcgagaaggtggtgtcggctaaggcatgcagctggagattggtatgcctgcttgtctacggagttgattatgctaatttgagtgtcggattaggttgtttattattgtggtctctggtaaggtggttacatggttgcagccagtcagcttcgatatcggtcaagtcgtgttgtttattttcttttttgttaatggaactgtgaaagcaaccccttgttgctccctttcatccctacacgttcccatgaatgcttccttcctgttcctgttcctggaggtttggcctgatcatgttacttgcaagtctcctccattacgtttttttcttcttcttttggtgaagctactgtttcataaggtgaaaattgttctccagtctccagtgagataaacgcactgttcttctgatcttctctggagaaaaatatttctccctttttaagacttaattaactcgattttttgaccgacacgtcacttcacttgaattccgcaggttccactacgatttgtattgagatccacgaagaaaattaccagaataagattctaatttggttagctcacggtaagaacagttgtgttgcgtgctttaccttctcatgatgtgccgtatgatcgcaaaaatgaacgggttacatttgcacacatctcatgagagtgattctcacgtcaaaggttaaccacgtgaaattcttaaatccattaccattagttatacgatgcttgtcttgtcagcagcaaagctacaaaaaaaaagaatgcattttatatgccgtttccctgataaacccatgtattaccaaacaagaattccacttgtaatgcccgaaagacttgctaccctttcaactttttcttgcaagcttagaacggaggagtcggatagggatggataaagagggaagaacacttcactacacctcgctctcttcattcagtagcctaaaaatcaagcaagcagggaagaaaaaaggcatcactgtgcttttgtatgcagcacaagtgaactggatatgttctaaatttttagtggtacgtaccacgtacgtcgtctgttcttgcgttacaaagatcagaacctgttttgtgttgtttcaacctgcagaaacaaagaaacagaacagatgcgaccactcctcttgacaccgaagccgtgatctatcataccttgcccaagcttcagttatttatatatctttatcactagagctgatctaaccctccaaactgataataacttcacagtatcaccacttgtcacaaggaagaacacaaaatgatgaaccgggggcacagcatagctgttcacatgggcttaaaagagcattacatttccatcttttattcaacttcaaattggaaccaaactggattcactggtctaaaaggcaacagccctagtctttacaatgcgaggttaggttttcatataaggaattaagattaaaacataaaaattgctgattcattgcagtacacgtccaatcatccatggatgaacggaataatagagatggattcctattgctcccatcaacctcgcctgctatcgaagaaatggataatcagtacaacgttctcatatgtacagttgcgcatcaggttgacctgtcaatcttcccaatggtgttctgtcttgcgttccgtagaatggccttatcagcagtgatgaagaagccagcgatgcatgctgtaaaataaacaggaagacatgtaaggtttccagtgtggtcttcaattcaattttgttctgcacatgaatgccaatataagaaaatggggtcataaagtctgtattgaaaagaaactacagaaacagaatctagtagtgaaagctagattgttatatgcctaaacttaaaataatggtcagaatcataacaacatgttaacttccacggttccatactgcgtatatcctcgtagctagttcctactgtgcatatccttgtgaggcaaatgctaccaaagctcattggaacaagctgaaatcattcaatgtcattaacagggataaatccaccaaaacaactgctaaagttagtgattatcatatgcgactcatgaattaggacatattgaacagaagaatgtaaaaagatgcaagtggtcgctaatcagtaattgctcaggtacttcacttcaacagacagaaatactggcaagcttcatttactgtcagtagtcagtagtcaatactaagcagaatatctctgcagcatcttgttcagtactaaaatttaatgggaatcctatcctagaatctgatgagggcatgagggatgaggctattgaaagataaaaattccaaattaaaataaaatagagaaggccaggctgtgagctggtgacaccagttaaacttgagccagcaccatttttcattttccctagaacctgataatgaaatgcttgaagtgcaatacagtaacacaatcaaccttagacttgactttacattttataaaggtctaatttcttgcatgtcccaagaaacaagccaaatcatgcatgagaaacaagccaaatcatgcatgtcctaaatcctaagaaatacgccaaatctgtattgtactccctccgtttcgaaatgtttgacaccgttgactttttagcacatgtttgaccatttgtcttattcaaaaacttttgtgagatatgtaaaattatatg

SEQ ID NO: 4899 - DNA, 5199 bp, Oryza sativa
ccaaccgggactaaagatcccgggggggcctgacaggtcctgacagcattcgaaccgggactaaagatgatctttagtcccggttggtaacacaaaccgggactaaagatcaaatatgcccgttacccttttgaaccgggactaaagatcatctttagccccggtttttattgcatccgggactattgtggaaatcggccgaccgacgaaagatggtttctacttaaacaaattatagctagccattaaatccttcacatatttagcacatatatataacaccttatgtattatgtataatcgcaattccacatcacctactgtcaaacttaaaatttgccactcacaatttatgacacgtgagttttcatctatatataacatgtgagtccagtgatgaattcttaattgtcacttgtaagagtagcaaatagttaaatatctcctgtaaaaagcattgcaagtttactgcctaccaaaatttggtaacaccaaaaattaatagtgctacaagtggtagtaaagtgaacaaagccctgagtcttattagcacattctgagctcattcgagctcgtctcgttgacagccctaccgttagcccacatctttgttttttttttcattttaataataaaggttataaagacatagctttaaattgaagggtcaatttgatctatgctactgtaaatttggctattcagaaaaatactattataattcgcctattcataaccatgccactggaattttacaaaattaaaaccgtgccactgccgtcacattttccatccattctcttccttttccgtcttcttccttccttctcccatcatcttcccggagtcaagccggagagggagcttgctggcaaggtgaacgaacccaacctagagcgtggcgcggatcctggcgttggtctcctgcagggtgcggtcaagcagctcgacacgctcccgcagctcttcatgggactccctcagccgagccacctcccatagctcgctctatcaggcgcgactggcaaatccagcggtgggcacgaccgacgaatccggtggtggcggtgtcggacgatagtggcgtcgggcggaaccggcggaagcctaggctgcgcgtcgagagtgaccggcggcgtgaccctcttcttccccatcgctgctcgacctcggctcccgctttggcctccaggtcggtgagcacctcacgccggccgctgtccctcacggcggtgttctccctgctctcctcgtccgcaggcctctccaaatgcctcctcgccgcctgccgcgagcgccgcaagcggcaggacacctctccaccgtctttaagtcttcgtcgccaccgtcaggcctgctcgcgccatgccgtgccagatccaccgacgcttgctccaccaccgaagctgtcgaagctcgcggcggccatggatggatggacgaccgccggtggcatcgccgctaccgctcccgcgcgagatctcgcgtgcttgggtctcgctgctgactactctgagcttgccagcttggctctcggaagaaatgcgagaaagaaggagccgccactgccgtgacgcggttctatttttgtaaaattccagtggcacagttacgaatagacgaattgtaatgatatttttctgaatagccaaatttgcaatggcatggatcaaagtaaccctaaattgaaagccatccagattttgcattttgctgcgtttaccagctgaacatgatagcaccatatatttaggggatgataatctagctacacggttacaccctagctaggtaggtaaaattcaactaacatgtccgatatatgaaagctaaattggctatgcacatgagcacatccactctgtggatgtagaggatgggctattatagtttcatgaatagtgatgctattgtcatttgaagatcagtaatgctattgtcgtagggatgagcatccgtaattagtgccctaaagatataggctaactctcttataaaatattatgccttaatatcgtatcaagtttggatattctatggcattctttcgtgtttagctaccactatattgattttgtaacccgttttatttttttagataatggattaaataaaacctggcctctatatcctgaaggatgtacacaaccatagtattacatcatcaagcacttaggcttacaaacaggttcaaaagcaaacgatgccgtaggaggcgaatggacgacaaagacatccagaacaagtctcacaacaaaagattttatctaacacaattcaatcttcctcttcaattccacctagattttgagtagaattccataatgataactttcaattttaggcacccaatctttaaagctttctcatcaccttctttaagaagcaaagaccactggcgagcccgatgcgttaccctgaaaataacctgcaagagagagttaatacttgagccatttaagactacatcattactagcaagccaaagtgaccaatagatattgaatatcggtttaccgccctattgtttttttatactttctgtgcgccaggaccacacaaaaagatagtaatactcacagcatctatactacgttctttatatatgcagcacaccttgaaccacttaattcctactccggtatatacggagtacatataaataattggtgtcaatgtgtcatgcaccagcgcctgaaatcacggagaatagacatcgatgcttcctgacaaaacttcactccatttgttcactgaaccatacacatatagacacctagttgtataaaaatatatctcacgcgttactaatttatgtgtataaatacaaggcatatatacagccctgacgatcgaagcacgtacactactcgatccagcacatcatcatcatatcgatgaattttctgccaattgatcaaagcggagccgataatcaggggcggaaatggcacccccttattgccgtcgtcctcgtcgtcttggcctccgcggccgcttcactacctctgtaagcacctctgagacacttggcagatatatcttgagattgtcaaagtcgtcagggacgtcttgttgtcacccgtatatactgtctataaccgaaagaataattagccatgagaaaaattaaaatccaatcccatcatactaggaattaatagcatatgcacgcgaggatgagagcaagtataatagtgatctataagcttactataagcttatgtggaggaaagagataaacaaaagagaatggtgttggctctcatgcaagagctaacttaacacaagctccaagacaaatagattaaatgtatgagtgagagatagagatagaagaagaaaattataggtaaccttatagctaatctattatatgtgttgactttagtataggttaggggcgcgggcgccgcctcccgccggctgcgccggcttggctgccctcgggcgtgccgagtggctgctgcgtggggcccggccgtcagccgcccacgcccttaggtgcggctgacgcgtgggacccacggcgctggccggtgcgagcccgggtgcgcccggtccaccgtggaccgtgaggctgccgcgtgggccccactcccgtggacccggtccgcgcgccccctcccctcggctcacgcaataaaccctttttaaattaaaatttaaatgaagaaattcgcaaatattcatttaaagagcatataaacttcaaatagccataacttggccatttgaactcggaattggaccgttcaagtctctaatttttccttaagaagtcaagaacccatttttgtgctttgtttctgcttgttatatggagtttattagagtaaaagccttttcttttccgttggtcgtgtagacgctgcagcttcggaagatccgctcttcgtggaagttgaagccgacgtttgggaaagcgagcaaggcaagtcacatcatccttgaacatattgaatcccagtttataaaattattttgatttaaattattgcattaccgctttgtttaaattcccgcgttatcactgttttatttagccatgcctatttacctttgttatgaccttattattattgttattgttattattaccttgttcaccctagaataaacaaaacaccaactagtggacactctactcatggtaccactagtatgattttaggtagatgcttcgctggttaattatgcaacattaggtggttttacaactctagactttgggaatattcatatcacctggacactatggaatggttggattattgtggaattggattcacacctccccctctattcaaaaccctcaaaatggttttaggctgggctcggggtgcatggttttgacagtagcacctcggccatataaggaccggtcatcgggcctctgttgcaaagcactaccgtacttccacatgtctagtgggtaaggcttagtttgtgtgtcgcgtcccaaaacgactctaaaatacatcctcaaaattatgcatagaataagtaaaatccatgtgaaagcctccaacaattaaaatgtgcaaagttaaaagtcaaataaggtttggaggatttttgtatatttcctaaaagcctaaaatgcgtaaataaattttagtggaattttcagagcacaaataataattattaagaaataaacaaagttaaaaaggttttataaaaagaaaaaccctaaaaagtcctttttccccccttcccctcttgggccggctcggcccacctccctccctctctctcctcttccccccgcggcccaatcggcctcctccccgcgcgcgtgccgctgacgggcgggcccgcccgccaccctcgctgacgggtggggcccacccgtcatcccctacctcccgccgctcccgccgcctcgcccgtgccctagcgccgccgccgccgcggattccgccgcatcccgccgcccccgcgtgcaataaagtgaggggaatcattccccgtgattccctctccctttccccccatttttccctctctctctcgcgttcaaacgggcggatttgcccccgcaaatctcgccggcgccattgatggagcccgagagcgccgcgccggtttccttctcccccggccgccctctctcactcccaacactatataaacgctccccgtgcctccctccaccgttcccgccactcgccgctctctctgtccgccggaatc

SEQ ID NO: 4900 - DNA, 12664 bp, Oryza sativa
tcagacccatccattacctatacttcatgaaacgaatttttttgagaattaatattatttttatggaaaattgcaaaagtagtggccaatcggggaaaatcgcgaatttaggtccatgtcgaacggctgtagttcgatagggtagatatcgaacgttggggattcgactgggacctgtcgaaccgctggcgttcgacaagccgacctgtcgaacggagggagttcgacagggcccaccacccagcgccgcgcggcctgtcgaacagcgggcgatcgataggccccgcaaccgaccctgttgaacaatggacgtttgacaggccggtttaaaaccctgtgcgcccagcccgcgatgctgcttcgatttttctgaggaccacatcgccagccgccgccgagtcgccacttcatcgccgtgggcgccggagggagtgaggggaggagctagcaggccggagtggaggccgaggaggcgccggctgggaggagagggttggcaacccctccaccagtgaagttaaggtatacattagtaatccctaagtatgaggcataagaaagtttaataaaaaattggtttgtgatttgttaattgtttcgcattgttcaatgctagtatttattgtttgcacgtatttgtcattgttaaatgttagtagaggtatgtaagtatttgtatggttaaattagttcttagttagtacatgttattaatatgttctgtgttaaaaaatgtacaaagatattatattttatttcgattattaaactagtcatttgttactaatagttgtaagttagtacacggcaatgtagtataagttgtaatagggtaattatcgaaggattaaatgattaacgtcagacaatttgtcatgttttatcaggatgtcaggtgatatgcccattcgtctgtattatggcgatgctcctatacaaatatgcgatagtggggtggatttgactgtatatgccttccatgatactagtctgaatgcaccggagtatatgggtttgaacgacgtgttagggtggttgtataatatgtttggggtagatccagtgcatgataaatttgtcataaatgccgtgtggccagtgaggggtcaacatggatggcagtggagagtagtggaggttgcgtcaaccgggagttggaggaagtttgttagtaaagtaagggagaaaggctatagcctggcaatagtggtgtagaagaaaacatgtgttgatcgatcgggggagtcaagtcataccgtggtggaagaaactccgttggaaggtggacaagttgaaaatgtttggcggactgagcaaggtcgaggggaagaagtaatagagggtaatacacaaggagaggtcattgttcgtggtactaatcgtgaggccaatgactcagacgatgaagaaccggattcgcctatgcgtgttgattcagcggaggagaatgaggcggtagtggattagatggaagtggaaaacgaggaatacattgcgcttgtagtggaaggagaagatacaacactgtgggacaacgaaactaacatacccgatgattggacgaccatatcaatgagtcatatgaaggtaaacgatgatttagatgcccactggtgttatgatagtaagcaggtgaaagttggacagatgtttcatgacaaaggtcacttacaagatgcggtgaagaggtgggcatttgaccagaagcgtgaattcaaggtgaaggtttcaaataggacgacgtatgacgtgaagtgcacacagggtggatgtccttggagagtgcatggttacaagccacaacatgacactttatgggtagcttcgagggttgagcaacatacatgtttgttggagaatacccgtctggtgcacaggaacatgacagcggcatttgtggcacaaatggtatattcaaaggtggttagaaaaacatctttgtcccctttcacaataatgcatgacgtaaataaagagtacggatatgagatatcgtacgacaaggcttggagggcaaaacaaaaattttcagtcttaccgtagtttgtgcgacttcgttgagtgggttgatacgactaatccacaacgtgacagggcacgcctatatccatgcagcgaaccattatcggactacctaaggaggaaggatgaatacgaacgacgaaaaactgccgaatccttaccatggcaagtgaatccactgggactccccaattggcgggagcatccagagtgtaggtgtggagaccgttgccaggtcataaggtccgttcgacaacgaactctaggacagagatgcttcgtgtgtcctaacattgtcgacgatgatttcatcgtaagttgcactaatttttactcactatgattacttctgtcatatacctacatacatccatgtacggtcattaatttctgggcacaggaagaagaccgcaaatgtagttacgtaaactggatcgatacggtgcgaagaacttccatcggatcgatgataactcaacctgagacgaccacacaattcattcaagcatggatggagtacgagcgccatgttcagtccgctagcttaaactggagatcaaatccattaggtatacctaaatggtctgatcgtcccaaatgcggttgtagagaacgctgccaggttgcaacgtccttctcacaagatacatatggcaggtggtacttcgtctgtcccaacatagatgacaacttcgttgtatgtcacatgcttaattactaatttacattttgcttcgcgctcccacaacaattatttcccattatctaatttgattgattgttcaggggaatccaaggatgtgtgcttttacttcatggatcgacatggtcaacccgacgtatgaaagcggaagagtaactgaagctgaaacgcaaacagagtataagagattgaaggatcatgaagttgcattacgtacacaatgacgtagaaggggtcaacagagaagcttaaccctgaatcgctctatttcggcattttgttatgttatgttgttgtatgggtcatgaatggattaggtttatctatttgttagctaatgtttcattctcttttccatctattaagctcattactgcatccgctgcaatgtattcaatacccttctcttctttatccgtccttacttactaaattgcgacaaagccattaaccaaaaaattatacaatcaatgaaactaagtaatccaagtattttacccaacaaataaatagtacaatttccccaccaaacattataaaaaccgtaaaccatatacataaaacattacaaaaatattatcctttcttacatattattaaataaataacttattattaaaaataatttgcgaaattacatattattaaaataaataacttattattattttaataatatgtcgaactgcgggagttcgacaccccagcctatcgaacaggggctattcgacaggccctgtcgaactgcagccgttcgatctcctttccagtcgcgctccggctcttcgatatctaccctatcgaactacagccgttcgacatggtcccaaattcgcgattttccccggttggccactacttttgcgattttccataaaaataatattaattctcaaaaaaattcacatgaaaccccatgccttgctgttagagttttatataatattaggagtaaagtccatcatcggtccctaaacttgtaccactgtgtcatcccggtccctaaactcacaaatcgaccgtccaggtcctcaaacttgttcgactgtgtcatcccggtccctaaacttgctgatcactcgtttaggtcctccaacttgttcagttgtgtcacctcggtccctaaacttggatttgaatatcatctgggtcaaataggacagtgtaaagactttatatttaaaaataattcataacttttttgtgtgaactctaatgaagacaaactttatatcaaatttgtagccctcgacgcgatctataactttgtagttgattttttttattttaagtcatttttgtcccaaaatgtaattttaaaattaaaatttcaaaatctataaacatgcaccaatattttgggaccctaaacagttttaattcaaaagcttttcaactacaaagttgtagttgcgtcgagggctacaattttgatataaagtttgtcttcattagagttgatatgaaaaagttattaattattttttgatataaagtttttagaccgtcctgtttagggaccggggttacacaaccgaacaagttggaggacctaaacgagtgatctgcaagtttagggaccgggatgacacagtcgaaccagtttgaggacctgaacggtcgatttgtgagtttagggaccgggatgatacagcggtacaagtttagggaccggtgatggactttatctaattttcatctctggtcgactattgaaaaaaaaggctaattataaaccatttgatgatgtggtttataacaatttaaatagcgtgaatagccaaagtgtcatcggaggctcaaattagtccttgatgtttcaatatatacatattagtccttcaagtttttattttagttcaaatttatccttgaacccacttagaagccacatggccaaacataactaacaactctcttgataaatgacactttaaccccctcattcacatatataagagaaaaaaaatcgaatgcaatgaatttttttatagataatgcatcgtaatttatgtagaacgaaaataattatgtacttgcaagtgtatacgatagacattgcttaagtttgatgtgcacatgttaaaataatgggaagtatttctgcaatgttatttattcatcttggttttctcttttctagtgtatagttatatacaaattattggcaaaaaggatattttctaacagaaatattgactagaaatagccatatggcatattaagtgggcctaagaatgattttaagccaaaacaaatacttataggacctacgtggacaaaatgaaacctgaaggacctaattgaccttcggtgaaacttgagggattaaattagctattcacccatttaaatatatatggattaattgtttagaagaaaagactaagatgatgagactcaatgagagaaagagaaaaaggtatataaatcaattatccaaaaacaaaactaagttgatatgattttataagataaaaaaaggaaatgatataatttggacgatatatcaaacatccaagagttagaaataattgagatgatatggcttaatgagagaatagagaaataatattacctatacttaataagatgaattttatagatatataagaggcctgtgtgtctaattgtctatttcttccaatctgaaaataagttcaatataggctgtgtttacttcagcgcaaagtttgaattttagttaaaattaaaggtgacgtgactgaaaagttgcgtgtatatgatagattgatgtgatgaaaaagaactgaagtttggatgtaaactttgatctaaacacagccatattcacgagtaatatcaaagcgcatcaacgatcactttttacgagataaattacaacagctcgatgtgtggtgctctgctatgacatgacgttgacgtactcgttagcgctgtactccctttgtataaaaaaaacttaattcttaagtgtgtgtacaatgtttgaccgtctgttctatatgaaatttttttatgattagtatttttattattgttagatagtaaaatatgaataatactttatacataacttatctttttaaatttttttaaataagacggacggtcaaacaataaaaacagaaacccagaaattaagtgtttttgagacggagggagtagaggtgtaggttgtccgggcaacgcttgattggtgctcggcgatggcggctggctggattggttatgtcccttccttccccttctagcagaacagaggagcttatgtggtggctgcaaggagtgagaaggcgtggcactgtggcagtggttaggagcgcttagctccgttttatcttaagttttgaagcaagcaagaaaagctttaatcccagccttttaagtatttccttttcgcttgtttgttatttatgtcagttatgagattaggaaagtatgtactcgtgtaatctttggttatgtatatccacttgtgaatgttgtatatgctaaattcctatctattatttaaaaatacagtaatatcagagcattttccacataaaaacagtccagccgttgtactctttggaactgaggatccaccggaaaaaagattccatttgatttcttaagaaccaaaagacatgtggccctagtctcaattaaagattagctttcgttgtcgaagaccttgaccacttactttgcagtctcgagtgtttggctctttcctacaaagatgtgcacatgttaagaccattagcccaagtcttcggtcatctatgagctctgagggcatatccaatctcttctttctataaagctaatacctattaaacacataaaacttaacatacaagtataatatttattagcactcctaaaacttacatgcaagcatgtcacatcaacccattaattaatcacacaaaacccaatatgtaagtatatattagttatatttacattttagtctgcttcagtcacttcctctcaaccaatcggaaactcttcctcctctcgcgtcacctttccccgggtgacttgggaggcgacgccgccggcgccttcctccttctcccttctcctcccccgcctcgccaccggctgagcgggcactggcaaagccgtgcggccgcaaggacagcggcgggggggccttctctcaccctccacgcgctgggcggccaggggcgctcctcggagcggcggcggcggcggtgtccatatccgggccgggcgcggtcggatcttgcggaggggtctctggcggcggggagtgaacgtggcgacggcggcacctggtagtggacgtggcggtgcggggtttggcggccacggcggcggaggcccccagatccgccccaactcggcctgatctggatggcgattgccgaatggcggtcagcagcagctggcggcggcggtgttgactgctgtggtggcggatggcgacgaagcagtggctgtgatggcggcggcagcggctagcgacggcggctagtgacggcggtagtggcagacaacggtcaacttgtggcgtccgcggctatggaggccgggggtagcggaggccggcacggcgcgaggtggcgcgaccagtggcggtggaggtcggcttagcacggtgaggcgtggccggcggtgccgtaggcctgttacgacacggcgaggtgctgctggtggtggaggaggcgggcacggtgcgacaaggaggagctgccggtgggtgcggtgcggtctacgacgcacgaaggctggccggcagggggcgctgatgcagtggttccacgtgccagcagaagtttgatggtggtggagcatcggagcgccagctgtggactcgcaggtggtgattggcgggtgaaaacccagcccagtctcgaccaggccggcaacgatgacgttcgacgcgtcattcccctcctgaggacgttatcgtgacgtctcatccctcaagtgtggatgccgagcgaaagccctgtctcggttctctttgagaccttgacggatgggggcggcggtgttttccatcgcttctcttcttgaaaacgtcgtttagacatcccctagcggaaacccccaagcaattgatgcaagctcgctctagatttcatcctcttatggcggcgtcctagacactataagttggtcacatcagagggcctaaggggagaagtgtttcattcttctctctcaccctctctctctaacttctgaagacttggatagagcggggtttgtgttgattgtaagggttgggttttgggcgatctcggctgtgttttgttgttggcctagcggcggtcggtcatgcttagcggcggccggttcggtgctagccttctcctggacctgtgtgttggcgttgccggtgtgtgggtggtggtatactttttttcttttcctggttacgactttccagggttgtaatcttgtaattttttttctgctctatcaataaactttgcaccgtcttttgcgagttgttcaaaaaaaatttacattttatgtcattctaaaactaaacatacatatgctaaattatcaatctcaaatcattttcataatatttcaatccaaatcatttcatcatttttgcaatatctaacatatattctgcagcaaagcgtagagcatcatctagtttatctatatctacatatcctatatagttgtatccaatagctcaatatgtattgagccgcatcatttagaaagaaaagtcatttgatcattttcatacttaatcacaaattcacaatcattcatttagtagttactattcctcgttaattagtatataagtcaacattagtgattcaattagtgtagaatattatcgctataaagaagttaggccatcaccatatttaacaccattgcatacactggtggagaaaccctttgtagtcccggttcgtaacccccctttagtcccggtttccaaaccgggagtaccaatccgggactaaagatagagctgaccttttttttttttgcatgcccctgttgctgcatggtttatatatatatatatataaaccatgcatatatatgttatgcaaatgcatttgtatatagatatatatatgaacaaaatatatttacattatagaaaatgtgtacacatgcatatagaaacatatgtagtcatgtattaattacaatccattatatgtcctagctagctacgatttcgacgtagtagtactcgctgctagctcagaagctaaggaccggtgaattgtgtttccgtcgtagtagaattcacccttgggatcaaggatttcttcgttgatgaatcccatgagttgttcttgaaccgccgcgataaattccttgtgtgtggtcaggttatccctcatgcgaataaactatatgaatgtatgaaattgattagtaattaaacaagaaatcgctacgtaatgaaattttgaatttatttgtacgtacatcgagctctcttgtggtgatgatttggtctgtaaggcagtggcaatactcgcacacgtaatagccgcacaagttagttccctgcttttgctttgcgccctacaaataaatgacaaacaacgagagatctaattaatatacacttgtatgtatttgaatcggagaaatataaatgtagagcatgtgtactcacaggaaatttgaacttccgcctaagtctttctctccatttgccgcggaccaaatgacggaaccgataccaagccctacatggagtttaaagctatgattcgtagtagcaattaacataacaagattttcttaattaacaaaggaacttatgacggtacctgtctacaagttcgaaaaccttgtcaaacgtagactcttttttatccattgagtcatatacgttgacggtgcaggcctccaggtcgatgagtaaaagcacccagtggaatctgcaatgtgcgtgggatgcattacatatgaaacacttagcaagttcgtacgggaatgaaatttggtatgtaggaagacagtaaaattaaactaactctgtgttgtatggcaacagtatgaacgtcttgtaatgctgcgccttcaggagatggacgagattgtcctctgtttcttgtggatattggtcgagcattgcgacgtttactttccgagggtcgatgaatccagtatcgacattgtctggaaggataccccttattacaactggtagcagttgtgtcatcaacacgtgacagtcatgagactttaggtttatgaacttcttctccttcgtgcttattattcgcttgatattcgtggagtatccagacggtacctttatgctctccaagcattcaaacatactttccttctctgccttgctaagagtgtagctggctggactcaagtaatggcttcctttctcctttggttccgggtgaaggtcgccgcgttgttccatatgcttcagatcattacgtgcttccagtgtatctttcgactttccgtatacacctaggaagccaagaaggtttacgcaaaggttcttagtgaggtgcatcacgtcgattgcgtggcgtacgtccaagaattcccaatatggtaactcccaaaatatagagttctttttccacatcgccgcgtgaccatcttcgctctctatatgctggcttccaggcccctttccgaacactactttaagatctttaaccatagcaaacactgttttcccgctgcgatgtttaggattcgtacggtggtcggccttatgttcgaagtgcttgcctttcttccgtaccgggtggtttgctgcaaggaatcgacgatgacccatgtatacaaccttcctacaatgcttaagatacgtactttttgtttcatccatacagtgagtgcaagccttgtaccccttgttggactgtccggataggttgctaagtgcaggccaatcgttgatggttacgaacagcagcgctcgtaggttaaactcctcctgtttgtcctcgtcccacacggggacaccttccttcttccacaactgtttaagatcttcgaccagtggtcttaggtacacgtcgatgtcgttacaaggttgcttggggccttgaataataatcggcatcattatgtacttcctcttcatgcatagccagggggggaggttgtagatacacatcataacgggccaagtgctatggccgctgctcatctctccaaaaggattcatgccatccgtactcaaaccaaaccgtatgtttcgtgcgtcctttccaaattctttaaattttctgtcgatgtttcgccactgcgaaccatcggcggggtgtctcagcatcccgtcctgttgacgctcttcagcgtgccatcgcaacattctagcattccccttgttcctgaacaaacgccttagccgtggtattataggaaaataccacatcaccttagcaggaattctcttctttgttagctgcccgtcaacttctcctggatcgtcccgtctaatcttgtatcgtagtgctttgcaaacagggcatgcttctaggttctcatactcctcaccgcgatataggatacaatcgttcggacatgcgtgaatcttatgaacttccagtcctaacgggcagactatcttcttagcctcgtacgttgtctcgggcaatttgtttccccccggaagaatgttcttgacgagtttcaataaatcgccaaatgccttgtcactaaccccattttttgccttccattgcaacaactccagagtggtatccaactttttgtgcccctgctcgcaacctgggtacaacgaagttctgtggtcctccaacatcttgtccaatttatgggcctccttttcactttcgcagtcttccctggcatcctgcaacatctgaccaagatcatccgcaacgtcgttaccatcagcagctatttcctcctcgcccgtttgatttccttcaaatccaacatactgagcaaagtccggaatattgtcgtcttccacttcatcttcttccatttcaacaccttgctctccgtgggatgtccaacaattatagcttggcatgaaccccgactcaaacaagtggaaatgaatagtcctggatgcagaatactccttctgattcttacacttattgcatggacaacaaataaaacccctttgcctgttagcttcggccactctcaaaaaatagtgcacgccgtcaataaactctttggaccgccgatcagcgtacatccattgccgatccatctacatgagtcaaaaaaaccgcacacaaataattattcttacaataatgacagtcatacaataattataagatatctttattcatacaaaaatcataaaatattacaccaaataattcttaaaaactatttgtaaagttttaaactaattttaatgtgttttacttcttttaatttttattttagtttgttttctattatttaatattaactttcactagagttttccttctcaactattttataaaaccttgtttagcaaatgaactaaatttctatatattctttcttccccacacacattttctctctcatcaacttacaactaaattttggagacaaaaaaagtgtgcaaaacataggtgcaaatgtagtatgacaaaaaaaaacattggaggatgaagttgcaaaccttttaggcacctccgatttgtatgtaatcaccaaaataaattcaatagaaattttggcatgacctcccctcttttttgaagaaattttgaagcttgctcgggcagctggaggaggaagaagacatatatataggggtgggactttagtcccggttggtagcaccaaccggggctaaagatcaccgggatcattagtcccggttggtattaccaaccgggactaaagttaagatctttagtctcggttggtagcaccaaccggggctaaagatcaccgggatctttagtcccggttggtattaccaaccgggacacccggatctttactcccggctggtagttaaga

SEQ ID NO: 4901 - DNA, 33884 bp, Oryza sativa
ctacttttgcaattttccataaaaataatattaattctcaaaaaaattcgtttcatgaagtataggtaatggatgggtctgaactctgatttcccttaagcaaacaattgtgcctggtcatgttccaagaaatgcaacgacgaaaaagacaacaattattaggatttttacaaagtacaaaattgcagaaaatttatgaaaacggtatgataaattgtttgcttatacagtagtgggacctgccctggcacagttgatctagattaactaatatatattgtgtgggagaaaacatcatagtttcattgctattccacagtttaatcaagggactatctaaatctttttcgacagaaaaaagcttccaaaattatgcagttggatcgctttgagattcatgccacatgctcaaaccgtttttttttctcccttctcttcctcatcccgcctaccgccgttgctttcacgtgctcgcgtacgcgaccgcgcactcctgcaccgcctccgccccaccacagtatagctcgatcggccatctaggatggggctgcagaggaggacttctgcataagctctggtttgagaccaaatttaggttgtgtttggttccacgttaaaattaaaagtttgaagaaattaaaatgatatgacagaaaagttaaaaatttatgagtgtaaaaaagttcgatgtgacggaaaagttgaaagttgaaagtaaaaagttgaatctaaacagggcttatatgtcctttctataccttcggcaattggacatcactagtgaacacgtcacacttactctcgcacaaatcatttttccagtacaatctaccgtgaaagtagaaaacgtcgcatcgaaccacacgtaatttacagcgactcgtgtaggtgccacgtcagttttaaaccggatgcgccacgaagctgccgctttcctcgtcgctggcgccggcgccccacattttcccggccatcattcccgccgacgagctcttccacttcccgtctttcttccccttcgagaacgacggcgcgccgccggagtcgtcgcggcaggcggcggccacgctgaacgtgcggtcgtactggaccaactgctcgagcacctccttcatcgtcggccgcgacgccgggtcttcgccggtgcagatcatgccgagcaggaacaccgccacggcgtcctccaggaacgccgccctgtcctggatgctctcgtcgacaacatcgtgcagctcgccgccgaccttttacctccgccacgcccactccgccaggcaccagtctgcgccgccgtcgttcgccaccctcccgtcgtcagctccagcagcacgacactaaatttgtgatactggccttatcatgtgtagtactttattttgttttagattataagacgttttaggtttttgaatagattagtgcatagaatttatgtatagacttaatacatgtgtttaaaagttatataaatatcaatagatctagacgagaactggaaaagccaaaacattttagatggaacggagggaccgagggagtaggaaagagccaaggactcaagactgcaataggtcaaggtcttcgacaactaaggcgaatcttcttgggcctcttatttcaaatgaaatttgggactatttaggcccacatgtcttttggttcttaaaaataaatggactcttctgctagtggatcctcaggtcgatgccaaagaatactcaggctggacagtttatatatggaaaatggtctgatgttactcctgaatatactgaggctgtgtttagaggtccagggataaaaatttttgctgtgtcacatcggatatacagacatatttaaagtattaaacgtagtctaataacaaaacaaattacagaatccacccgtaaactgcgagacaaatttattaagcctaattaggcttaaaagatttatctcgtaatttacacgcaatctgtgcaattagaatttttttatctatatttaatactttatgtatgtgtccaaatattcgatgtgataggatgaaaaaacttgccaagggatcaccctgaactcattttcattttggaagaactacaacacaaaggtatatatgtaagggtctgaactctgatttccccgaagcaaacaattgtgtccgggccctcatgttccaagaaacgcaaggaaatagactacaattactaagattttacaaaagtacaatgttgcagaaaaattgtgagaaacatcaatcatatgatttttcctttgtttcaaatgggttctaaaatctatatttttgaacatgttaatttattcgaaattttcaagcactcatctctacaagtaaacataacttaaaacaatcacgttctgaaacaaaatttatttttacttctatgccttcggcaattggacacaaatatggtggacacacttttacccttacacaacccgtttgttccctgcacactctacagtagaagtacataatttacagcgaggtgtcacatcggttttaaaccggatgcgctatggcagcagcgacttgtgttggttccccttgccctaccccttctcttccctaaggccttatttggtttggagggaattaaagaggattgaaagagattgagggagaataatttcacaccacaataggtgtgaaataaatcccctctaattcctcccttatggagattatccgaacaaagcctaaagcagcggcggcaagtacccccgtcttgccgtctattccatctccagcggctctccaccaccaggtccacaaccgatcacggtgtcctaatcataagctctaatcatggccatgactccaaactcattgatcttcctttttccccttcccctcaacctcctcccataaccccctttttcactacgctgtacagtagaagtagaaaacgttacatccaactacataatttacagcgactcgtgtagttgccacgtcagcttaaactggatgcgccacgaaactgccgctttcctcgtcgccggtgccggcgccccacattttcccggccgtcgttcccgccgacgagctcttccccttcccgtctttcttccccttcgataacgacggtgcgccgccggagtcatcgcggcaggcggccgccacgctggacgtacggtcgtactggaccagctgctcgagcacctccttcatcgtcggccgcgacgccgggtcgtcgccggtgcagatcatgccgagcaggaacaccgccacggcgtcctccaggaacgccgccctgtcctggatggcctcgtcgacgacgtcgtgcagctcgccgccggccttgtaccgccgccacgcccactccgccaggcaccagtccgcgccgccgtcgttcgccacccgccccgtcgtcagctccagcagcacgacgccgaacgcgtacacgtccaccttctcgttcaccttcgctctgcacccgtactctgcgaccgcgagacagacatatcgtcgaacacttgactctcatgagctagctcgatcgatggcgagcaaatcaaatcaaattaacgaacaacaatcttgtgatgaacctcacctggagccatgtagccgaaggtgccaccgatggcggagatggaattcggctcgccggacttggcgaggatcctggcgaggccgaagtcggcgatcttggcgcggaaggccgggtcgagcaggatgttgctggacttgacgtcgcggtgcatgatcggctgcgcgcactcgtggtgcatgtagctgagccccctcgccgcgtcgatggcgatgcagagccgcgtcggccactggagcggcgccgtcggcgcgccgccgtcgtcgcggcggtgcagccaccggtcgaggctgccgttctccatgtactcgtagacgagcagcttggtgtcgtcgccggagatgcagcagaggaggtcgatgatgttgatgtggcttacctccccgaggatcctcacctcggcgtcgaactccttgtcgctcttcgcgtccgacttggccgccgtccgccatagccgcttcaccgccaccaccatgccgtcgctgcccttgccgccgatgttgatgcggtacaccttgccggagccgccgctaccgatcacgttctcctcgtggagattgccgagcacgtcgcattcggagaagtgcagggtacggaacggcgtcatcttccacccggcgaggtcttgctgacgcttctggtgtcggatgatcagcaaccagatggcgacggcgccgatgaacacgacgccggtgagcaccgagaagacgatgatcaggttcgtcgacgatttgttgtggctttggtgggggcaagccggaaggttcatgttcgtgttcaccgtggcacagaggccatggttgccgaggaagctacgatcgtaggcgccgttttgcagcgtctccgggacctcgccggagagctggttagaagaaaggttgagaaagttgagatggagattgctgaaatcttgaggtatgtcgccggtgagcccgttgtcggagaggtcaagaatgtagaggcccatccacccgactgcggcagggatctcaccggaaatctggtttctgctaaggttgagggaggtcagacttgtcaatgatttgatagacggcggaatcgagccggataactggttgccggcgaggttcaactcggtgaggttggcaagcctagacatgtcagctggcagttcaccggagaactggttgttctccgccgtgaaactcttcagaccgacggcggtcgacgggagggcaccggagaagcgattgttctccatctcaatcctcgagatgttaaatgatatctcactgggtagagtgccggtgaagttgttgttgtaaatcatgacattggtgagcaactcgaatgaccatatcttcttgggaaagtccccaacaaagtggttgttgtatgccatgatgttgttgatggttttgcaatccccaaggttcgtcgggaacacgccggagaagctattgttgaacaccacaatgtcaaagagcttcttattgaagcaaagtgtatccggtagctcaccagagaggttgttgttggacacctcaaaattccccaattccgaatgctttccaagctccgcgggtaggggcccagagagcttgttattgaagagacggatgtcagtgaggttcggcatcataccaacaccagccgggatgggtccagtgagattgttgtagtacaaaaatagtaatctcaacttcttcaggtttgcaatgtcctctggtattgatccagagaacttgttcatggacagatcaagctcctgcaggttgagagctgtgatgttaggaccaatctcgccactcaaattgcttgcatagagatatagattctcgagtttctggtgcttcaatacccactcgggaatttgtccctgcatcttattttgtgacaagtccagcagtgtgagctctgtcagtgacgatagatcatcagggatggtcccagtcatgttcatacatgataaccacaacaacttcagctttgtgagattgccaaactcttttgggactggacccggctcaaacgggtttttcgccagcgtcagcgtctcaagctccaaaaggcctccaatggcggcacccgggtagttcccattgaagctgttagtgtcaagtaccaatgacttgagcttcgagaaccttccaatagccaacggcacatcgccggtgaaagcattgctggacaggttgaggtgttgcatccccaacgatagcctgtcaatgcggtccggaagtttgccggataattgattgttggataggtcaaggaactccaaagctgagcaaccgtagagcaccgtggggaaatcaccggtgagattgttgaaagagaggtctatgtaggttaggttcttgagtctacaaacggaggctgggattggtctggctatatggagacttggcaaggagaggccagtgacctgacctgtgctgctactgataacaccagtccagttgccggtgctgctccatgaactgagtggagctgggttgtcccaatcttgcttgattgctaggagtagtttttgctcgtcggcgctgggctgcgcagtcgatagagagaagagcaatagtagtagaaagaggatgaggatgttgtagacagccattttttgcgagtgtggtgtgttcttggatgttcagacatggcgtcggagtgatcttaagtagaaattaaggcagagagagaaccaccatcgaagtgcgtcactacctcaggtcaagtcttcggtatagcttccttagcaccaatcctctagtgattgaaagatgctctgatagagacatgtgagttgtcagttgagcactatgctatcctctttcatccaacttgaatgtatttaagattagaagcatgaaaaggatgatcaccttctggtgtagtacaagacaattacttggaatatgttccgtttgatatatatgcgattatatatcactatgatacggcactcgaaagcaaggacatgcagtgagaatggaattgccgtttcctagtcgaaatgttcttattctgttctgtcgaaagtttttttatgctttacatacatatgttgttctgtcttttcggcagaaatgggggggggggggggcgagattgtatctactaccgtctcttgtagctgaagaaactcgtgtgattctcgatcgcccatatctgaaactctgaataattggtgcaggttcagagagttcaggacttcaggtatattcgccgcactctgtttctgaattcagtttcgtttcgttgtgcactgtttcttttgccacgtacgtgtgtaaatcatggaattctcacaagatgttattaatcgggacaaaaactaagctctctccaatggagtggtgtcatcgatttttattgatattacgtatggagaagggaaggtatctcacgctcatgatggattttatgttctaacatcaataatttgccacagtagcatactactataaatccggtttttccaaatgtccaattgtggagattatgagtatcccatacccacacgatatggttttccgactgattataggggataacttatatctatggaatatgtaacggatcatgacttgggtattacgtttccctgtttattatggaatagcctaaagtcctggtttgataaaattataaagtagatttaggaaaccgataccgtattggttaaggtttctatcttgtaatcctggcccccatcctatataaggtgggcaggaggccctctagggggcatgagcacatatgatggtcagatctatactacacccggcggattcaaatccccaaacatgattagggtattacctctctaaatccttgtctcggcatccatccacttttaggtctcgtgcgctaccccttttattattgccgaattcatgtttcgacaccaatcctagttttggcaggcggcaaagcgatcatcacgtaccaaatggtctgtaaaaattgatatcgccgccggagcccgccgcctagagagagaagaggggagagaaggagtagaagaggtcagaggagatagccgggcatagagagtgtgggtgatggaagagagagaggagtggagaataaataaaatagagtgagctatttttgcgtgcgggtgagttaagagccctgcatgtaaacataccttatttttgtgtgcggatattttaagtggtccgtctgaaaaatttgaattttgcgtatagatctcttaaagagccgtatgagaaaataagggtcgatttttgcagacacggacactaatggtccatctataacctattggggtgttcgtctagaaaaatcattttttaagaagtggcaagcataacccccaatgcaaaaacttttaccagatttgtagataacacctatacgacaatctatcatttcgaaaaattccaacacaaaacagtaacaaacctttgtcttctctaaagaaaaacaaacacaaccctcttatgtgtttcaaaaattacggaacaaatcacacgacaatatctcctaaactctcaagatgacattctctcgttgtttagaagtcaactaaatagttatgaaaatttttttaaaaaaaattaacaagactgattattatgataaatcactctacaaatatacaagttaaaatttaacttctacaagttccaacagaaaaaacaaattaaactatgactagttaacgtatattcgtaattaatttttttattgcagaagttaaatttgaccatgtttatgaagtggtttatcatatattaatctatcttgttgaatttttttaaaaaaaatcataactaattgggtaacatgcaaacaccgagagaaaatcctgtcaagagtttaaaatagttttgcaatctctatcctttctatacgcaagctatctttgcgacgaatattagccatttagcattatcaaattttagtagggcagagaaccggaagttcgagatattcgcacgtctgcttcagctggttgtggacaaagaggtgactccgtgactccccgtcgtccgcttgtcctattgaagtattgatgatagagcttgatgactgatgagtgaacgacatcggctgaactcgcagaagaattctctaacgccgacgatccagtcataatcagtgcggaaacttgaagctttctgctcttataacccactgtcgatctggccatttgtacaaacgaagggacgggtgtgtaaagttttggcattgtcacatcaggtattatgtaggatgtcgcatgagatgtttgggcactaataaaaaaactactccctccgtattttaatgtatgacaccgttgactttataaccaagatttgaccactcgtcttattcataatttttatgcaaatataaaaatacttatgtcatgcttaaagaacatttaatgataaatcaagtcacaataaaataaattataattacataaatttttttaataagacgaaagatcaaacgtttgtcaaaaagtcaacggcgtcatacatataatatggagggagtaattacagaatccgccagtaaaccacgagacgaatttattaaggctaattaatctattattagtaaatgtttattgtagcactacattgtcaaatctagagcaattaggcttaaaagattcgtctcgcaaattagtcgcaatctgtgcaattaattattttttagcctatactacctctatcccatattacttgttgctttgacttttttcttacaacatttgaccattcattttatttgaaaaattagtgcaagtacaaaaataataagtcaaacttaaagtacttttgataataaaacaagtcacaaacaaaataaataataattccaaaatttttttgaataagacgaatgatcaaacactacaaacaaaaactcaaagcagcaaataatatgggacggaggtagtatttaatacttcatgcaggtattcaaacattcaatgtgacagggtaaaaaacgttcgatgcgatggggtgaaaatttttgggatgggatctaaggtgtgtttaggctgtgtttagttcctgaaattggagaaaagtttggggaaagttgagagtttatgtgtgtagaaaagttttggatgtgatgtgatgtgatgaaaaattgagagttgggggaagtttggtgtgaactaaacagggccttagtttacgccaaaattaaaagtttgattgaattagaacaatgtgacggagaagttggaagtttgtgcgtagtaaaattttaatataatagaaaagttgaaaagtttaaaaaaaaaagttgggactaaacgaggccctaagcagccccgaaaaagagagaacatctctctttatgtcagaaccatggtgcattcagcagcaatcttcctgagggcatgtgcatcactgattcactgtcaccggctggcatgcgtggtggctgtttcgcttgtgaggctgttcgtgtgccaaactttttttaaatatacgaatacaagtaataaatatagactaataataaaataaattacagattccgcctgtaaactgcgagatgaatttattaagtttaattaatttatcattagcaaatgtttattgtaacatcacattattaaattatggcgtaattaggctcaaacgattcgtctcgtaatttacagttaaactgttcaattgatttttttgtctacatttaatacttaatacatgtgttcaaacattcggggctactttggtttgtgacctaaattggccttaccaatttttggcaatgccaaattttggcaagttttgatacgaaaaattttgagaaggcaaagttgtgtttggattgaagccaaaatagcctaagttaactattgaaatagcctattttcttaggcatgccaaaatttagcttcaaatcaaatagacactaaatactattaaaattgtcaaatattggtaagccaaatttaggccttagaccaaaccagtccttgattttacggaaaagttgtgtgtagctgcctgcagtgcaagtgattggtttgtcagaagtcatcaagtcaaagtcttctccaccaataatgtaattgtcattgtcactgtaactgtagttgcagtggcccacctagactattccacttctagaaggatttattttagtgcttaatacttttatcgtaaataaacaaattaaacacgaaaagtaacacatcatgctactgtaagtttggataggctaatatgtgttacagtacatctgtattacatctgtgtttagttccacgctaaaattaaaagtttaaaaaaattagaatgatgtgacagaaaagttgaaagtttatgtgtgtagaaaagttcgatttaacggaaaaattagaagtttgaagaaaaaaaagttaaaatctgaacagagcctatgtttgttcattttaaagagagggagtattaattattgtttgttcattttaaaacagagagagtattgattattgtagggtctacttggaatacatacagcattacttctacttctatgtacagcatgggcaactggcattggtcaccattgacctatttttatattaataaagcactaaaataactagaaaaaaggtgatgctgcaaaaagtattgcccaatggtacataacggtccatatagattattacgaagtactagtggcccggcgaaaaacgaagtaccacaagtgtaaagaatgtgggtgcagaagaactatccatcgtccccaaacgactcgaacatcaaggttgtcgacaaagcatcaatcaaatctatgataccgttatttcataataaaacaatctcaatcacgtatattttgtaaaagaaaaaagtgaacttcttcttgtagagacagatatagtattaaatattattgcatagaggaggaacttgacgcgcgttcaagtcgatcttatacttaaaattgatacctgtattttacaagaatttaatttagaggataattcatgtatctgtatgtatgcacgcgcgccacgtgaacagctgccctcctctagtcctctctcctgtatagtttatgtatatatgtatgtatatgctatatactcatatatattatatgtatgtatatgtatgtatatgtatgtatatatatatatatatatatatatatatatatatatatatgtatatatatgtatgtatgtatatgtatgtatatatatatatatatatatatatatatatatatgtatgtatgtatatatatatatgtataatttttaatgtataaaaatatatatatatgtatatatatatatatataatataaacaaatatttatgtatatatagaaagtttatatacgtacggataaaaagtataaaaatatatgtatacaaagttctatacttatacgtattaaaaaaccgaaaaacaaacaagaaagaaactgaaaaacacaaaaaaaaaactcgcttgctctctcccatgagcagcgcgctgtccgccaccctttcttcgtgcgcgccatatgtctagtcacgtggggagggacacgcgcaactgcccaccaattagcaaatccacacgcagtgtgtattgggttgtgaaacacgtactcaagcttaggggatagcatatgtatgtaccaatctcattgaaatgtgtaatctgatgcacccatgtggtgtgtgcgtgagcgtatgggtgagtttaacttcttgtatttaaaagaaaacgacacacgcttccaatggtagatcccaggcggttgatatttttgccatgtatttgtgaagtgagcaaaaaccatttgaaagaaaaaggttttttaatatggagtacaatacatggccgatttatattttagtctataatcttggtttaatgtatcaccttaggtccaaagtgcaaaagacttaacttgagtgttaacgtggtcatccatagtaatgagaattttgtatttaaactcccaccattacaatattccccaaaatatattaactccccatgctcccaaacctacttcccactgtgtgtgtgtgtgtgggagaggaggtcaagaggtggttattagggtggctgcaatccaaggtagacggtgcaaggcccatcgcttgtcttcacaacgacaatcgtgccacactgagttcgtcggattactctcttcctatcacatcatctatctcgactccgaggacctcctattactgacaatcaatgacaccctaatcaccatctctgcatctccacttccatgatcgtatggtggggggtcaatttaaagtacgtcctatttggggaagcttctatctactgcacttccagaagttccaaaatttgaaagcataatgtaacacagaagtttgaatgcaaatttcccatcaccgtggatggccacatcaacgcatgagttgcgtcatctgcactttaaacctcaggtgatacattaaacgaagattaaaaacccaaatgtgtatttctacaagctcacatatctagatgacacttagtccatatttaaggaacggttgtgtagtttttactcttttatatattacagtagtatgaggatcatactttatgttgggagaagtcacaagttgataaatccaagctgtagtagtatctattaagcacaggaatacaaagaaaacttttcaaaaaaatcgttgatggcacctaaaaaatgaaagaggatgaatacacactactacagaacatcaaatagatgctggcactacaggtgccggaagtgctaaaaccggcacctataggcctttttcggcctctacgggctgaaaatacaaaaaaaaacgggcatctttatataactatatgtatcgattctaaagaaaaaccgacacctatactatagatgccggtttttgataaaacccaaaacctttaatttattaaaggtgtcggtttataaccgagccaagccgggtggagacaagccagccgagtgggcatctttttatctctctcgatactgtgtccccaccttatctcttctcctcctcccaccggctctctcccactgtctatctcccttatctcttcttctcctcccaccgactctgcggcgggctcgcggaggggacacggcggtgcgcttgctgaggtgaggcggcggtctagccgcggggaggaggcggcgacggcaggtggaggagccctcccctccaccagatccggcgggaggggaggcggcaacggacacgacggagctcacagatggaggcggcggtggtctcgccgagggaaggcagcggcggcaggtggaggagccctcccctccaccagatccggagggagggaagacggcggcaggggcggcggggctcgcggatggagatggcggcggtctcgccaggggtaggcggcaacaggcgacgggctcaccaaggggaggcgacacgacaggaggtggcgcacacgcaacggctcgaagacgacgactatggcagcggctacacgaccgtgcgacgatgacgatggcgggacaacgacagagaggtgtggaagaggtgtggattcttttttattattattgccaagatctgggatgaatttgagtgtcaaaatttgtgttgtggatgaatccatctatggattttttattaccaagatctaggatgaatttgagtttcaaaatttgtattgtggataaatggattgatatgtggatgaatccatctgtggattggatatgtgatggattagatgatatgctcgtggtcgtggaacctcaaaggcagcacctatttcttttcatatcagtgccgtctccatagtgctggttgggaaaaccagtagctaagggggtttctcaaccggcacatatttgtgttttgacactatggatgcatgttggtagctttccaatatatacacatcatgatgcgcacagcaccaattttatcatgaaattattgcctagtgacgattattttgactggacataagaggattagtggttcacggacaagaagtaaatattagggcccactcataaaaatctactgtctccggtcaaaaatataataactgttggctaagtatttgacatacagtgatatatcaagttatcaacttctaactatatatcagaacatattcaaatgtgtccaaatacatagagcacaaaattattatattttaagataaagggagtacatagaaattactgggttgcaaatgctagcactcaataccacgcacgcgcaatttcatcaataaccattagagtttagttgttgacaaaaactagctagtttttttcagattatttactattaaatgaattatttgctaaaagaaatacattttctcagaaagctttcttctattaaattgtttggaccacttgttttaagttgtttgttaaatttatttactaaaaaaatatttatctccataatccactagataatccatagcaataatccgcttaataatctatttcaaaccaagccttgaacaaattttactttttatttttgaaaaaatgctcagtaatttgtaaaatatgcaatggaagtagtaggtgggatgggggcaaccaccaccttatttttagtatagtacaatattatatattaaaaatatatgcacacaacatgtcgataacatcaaccgggactaaagatcttcctcttataaactgggactaaaaattatttttagtcccagtttttaatggaaccaggactattgtgaatttgggtcgaccgaccaaagatggtttctctgccagtgacagcaggttaataaatatgaaggacaaatttgtatgccacacaaatttctgctgaaaatatgatgatttaaataatgataaatgaagtcaagcaaccccacaattataccgtgctccaattcgtagggtgtgtttttattgttcttttcaagtaggatatgatatacatccatccatttcaacaactcgtacacacattgtgagggtgcctcttgtgcaaacggagtttaataagtagctcaaattgatgaaatatagatcgagacaaataattaagcatggaaaaattggccagtataatcgggtgtatcccttgatgattactcctatgttttaaaatattcgaattattctataataaagcagatttacgataataatccaatcaataatctatctctaatacgacctaattcatttttatgcatcgagaaggcgtggcttggcatcgaggcatataatcatcgatctggattatgaacaacccacatagcacgccgaaacgagcgaatatgacatccacgaacaagtggcctgaatgcctgatcgatcctaggctagctcagctcctacacacacatcactatataaaagttactttaaaatgtcatattactctatttttcaggtttaaaataatcaatactcaatttaccatgtagttaatggatcatcatctcgtcttgtttacgtatattctcaatcttctcttttcttctcctctcaaacacatccagcaaagtgtacatcaaccatgagttagttgcacatcttctttaatttcacaagtgacccactactgtagctttgcgagttcttatctgcgagtagaagatattactgtgcctaaccctgtaaacagtgcgcccacagggcctacacttgcatgaatcagcaatccacaaacttttagaacaagttcggcagtgatgtttggttactgcggaactccggatgaattaaccattaaaaattaaaaaaagatttatttgatttaaagaaacttatatgtagaaaatgttttcacaaaacgcaccactatactcacggaaaactaggaaattaaagttgcttaagagcaagtttaatagtatagcccactactatctccaaatcatctatagccaatatcatagccaattcatgcaataattgcttactatactattaatacctggtcctacctgtcatccacacattacgtcttggtgtccgtgttacagctggctataaatctgtagcccgctagtcttctctctattctcttatctctttaaaatatatttatatctggcttatagcctgctattgtacatgctctaaataaactcagccagtgtctgattcctggctcactagacatattatcccttcaagtgcttcaagatttgtgcatggcatagatcaggcctgttgaagaatccaacggcccgtactacttcgccatcctaaacacatcgacgcctatagctgcagtgatccaatacagctagttccgtactaggtcctgtttagagaagaatatatcctacataattaagctagtttatttgtagccctgtcgacaggttaactggggttgtaagatttgttcgcaccaatggaggcaacagcatggtttcagctgtggcttcaagcatggtcaggcttgcatttctaattgcatggatggtacacaatggaattttgtccccaaaagattttggaatttcaaaggagaatatgtgcctcagtggactgcaactgcaagcataatttgaccatggctattcgatcctccgctgttttttcttttcagaaaaaaaaggtatcatatatagggtggtctagttaaactataagcggaatccattgtatgccatccacaaaaatcattatatgcgatgaagcttggataaatgagtccacccaactgagttttcttcctttatatgttgccaccacaaatccactagcacccaacaactttagatagaatggaaagaaatgtttgttcctagctaggttatcatgcattattattctcacatgaaatagtttttggataacacaaattttgacagatatgcacatggaagtgaggcctttatttgtcagtgctgggagcaacaaccctatttcagtcctctagatcaaaatcttttcctaagcttaatggagaattgcttgcggatttgtaatgccgattgcatgaggaaataaaacgatttaccccatggcagataatggatttgggccttttctttattggtgtaatgtgcaaggaaattttctcttagactatgcatagaataattattctccaaacttaattggctactcttcatagccccatttactttagttagttactccggtcaaaaattacttgatgctgccggtggagggagtacttcatgcgcctaatgcacctaacatgagtggatcattatgaatataacaagtattgtatgcttgaatataagtgtaagtccgacaaagtcttttttatcataagcaataccaaacaaaggaggaccaagtgcatgccacatcaagaagaatcaaaagatcaaaacaaagtcttgggtgaactttaaaaaatatgcatataatctgccataaactaaaaagagaaatccaagatttgggctgaacttgatgagccatttcagcaggaaagaactcagtcaacagagtatatagattaacagtataacagagccccgtcaatgtattttttttttaaaaaaagaaaccgtttaatgtttaatgtgtaagtagttagactgcgtcaaaagctaatactgtatgtcttatttttaatcaacaaaacagagtaaatatagccgcaaattgtgcatccttctgtaagctagaaattgtgcgaatcatgcatcctgacaagctagaaattccaaatgagaactctacgaacgaccggccaggccggcactggaaagtggcatatcttagtacgtatgcatatgcctccattcgttttcataaaccggctgcacgcgtgcgcagaagctggggactattcaggcaaatggctaccaaacagatggatgagtgtatatacaggttgtcccttttggtaccaaccgaactgagtgatcaaatctatgctatatatctcaggatggtggcaatcaatttgtttatccacaaagataaggcagtgatgtaacttacaatggattacagcttttttatctgcttttgtccatcagtggacgagtccaagaacacgacctgcctttgaacgttgaatagtgctcaattagttagctaatatacgtaggatcgatgtagccatttcaattaatcaagtggcgaaaggtgaggagctttggcctttattaggaggtaagaaatggagaatctaggaggcaatgatgcggcaagaatcatcattatatataatggagagtaaagtggtgggtgaaaatccaccgtagatatgatatgatttatcctcgtccaggggccaagacatgcctagggctggtagtgcttaaattctaggccaaactctgcaatccaattcaggccctataaaaatacaatagaaattctgaaaatatataatgggtagttaagggcatatttgctcagccctagccgccttggcttttcctatggctcaatccttgtcctcatcaatcttgttgagctttcaccgaagcttcggtagatacttattatcctgcttgcaaggaaatggcacgatgctctcttctaatgttgcataaaagcaagatatttcattcaaaatgaagggaagtgttgtgatcaacaatcaagcttaaagatgagtgcaggacattcttaataacctaactagtaaatactacttgactgcaacttcaaatctatttgctttgtaaaaaaatgcatgtacggttttgagcgcctaggaaaaaaaatgcatgcccttgtatttagattgtttatttcagttagctaaacttccactattatcacttctagaccatggttgaacctccaggtgttcataatcgatgttccaaatagttaacatatgatgttccagttccagtggtatcgatagtatttagatttcattttcaaacaataaaaccagaaactttacacctctaaactaccatactgtgtataatgatagttacttcctaggatgttgttttttcctttatttttagaggactccttaaactaccatatctgtgcttgttctgctgctgccaacacatgttcattaaaccagatacaaccatgcataacatatacatttagctaaaaaaatttggtgaaaatgttgtgcattggagacaggaaaacttcagctaaagcttactactgtatattgggaatccagggaatatatatatcagaatattcagaattatcaaggcaattaataagcaaagacagcaggcggtagtaaactaaatttcgataccttcgtgatgagagcgaaatcccccgcccaattcttccggagaaggaggaagagaaaaaggcgctcacggcgacggcgggggaagaggtggttagaacccttgatgctgtcgcttcgtcgtcgacggggagcggcggatcgatgagcgcgcctcgtcctccgcggcgatggaatccgtggctaggggtggggggaaggaggagaggcgccggcgtcccgcggggaggtttcaggggtgcgcggcgcggaggcggcgccggcgcggacgcggaagaggggggatcttcgcaacgcatatgatccgacggccacgatttctcttctgatacgattttcacaaagcccccttgattcgagtcgatacatttggtagcgatccgaagttttacacaaagcccccactacgtttacatcttaaactcaattttaatcttaactaattaaaagattcatattattcctctcgtcgcatcctttgacccgcgttttttcgtccgtcaccgtccccttccgctttgtccacaaaaactaggattcggtttggacagataagctcgaatcgagctcaattccgcgttgatttcttcaagataagatccgattcttgaggaaaacggaagaggaggataagagaaatatttccccttaaccaattttggaaaagatcgaaaggggagccaggatttggaggagaaagcggcgccgggtcgggctcagtctccggccagaggttgaagacagcactgtagcgactgggacgtggtgtggactttggggaaaaaggctggcccgagaggagaagaagtagggacatgaaacggactttcggcgctgtaaacttcgtggattaggcccaagaaagagagaggatttttaattacttctccaaataaattaaccaatgaaataatctttgaattgttaaaaatatttccaatgctcaaataatttcaagaaaaatcttgaacatacttggacactctaagtatttaacaacattaaaacaagatcatttaatgattaatttattatttaaataattactgaaatgttctttgtattattaaaattagtagttgagctctgaaaaatcctagaaaattccaaagagcagaattaaccatggagaatttaataaaattaaatccagccatgctttatatttaggaaattttattatacatttacaacttactaatttatttatatacaacattaattcaccaacaaatacatagcattaagtgtaaccaagagcaaaaaaatgtggttggatttatcacgtcatctttccattcactacttttaaatgatttttctagatgagcacccgaatagattgtagacaggccataagtgttcgtgcctgcaaaaattgatcccgattttcccgtacggtttcttaagaaacccgtatgcaagaatcaatttttccaaatggaccatttaaaatatccacacgtgaaaatgtggtgtttaacttacccgcatgcaaaaatacccctgaagattctcacttttgtttattctctagtcctctctctctctcccaccacccccactcctctccaccctaccggcggcgggcaagggcgacgacgacggcttcctcctcttctcccccactcctcctctcccctctcctccctcccgatgcggtggagggctcaggcagtgggagagggcggaggagggatgcgacagcggtgacggatccgacgatggtgaggcgtgtggtggcggatccgacggtggggaggcgcggcggccatcgcccgcacggatccgacaacggcggatccggtggtgggaatgagcggtggcagcggatccgatggtgaagaggcacgggggcagcggattcagctccccctcccgcgcgtcgacggtgaagggagtgggcagacccagccaaccctagccccctacgccccacgacaaggacggggacgaggatgaggacagcagcgacgacggtgacaacgacgacgatgacgaggaggacggcgggcatccgtgatatggacaatattacatgacatacaaaaaataaataacttattgtagccataaatataggagtcaataaaaaacaattttatttcaaggtggtatcaatatctttcttataatcataaatcgactggatttaaaacaacaaacaaataggtatgagtgtagtgagtgtcaattcgttgcaccacaatacaaggttcgatttagtggagttgctttcggttgatgtgtcatcgctttcgactccttatccactaacttgcatgtgcagagtatgtatgtaaaatcaaaattgacttcatccgttacaacacacgagcactgtgctagtagaagtatagaactcccccatattttgtaagaaaaataacctagtagggccaactcaactttatttggtagtagaaaaaagataattttttggtgagtagtactctcaaatgaggttgagtttcaacttattattatttggtgttaatatacttcatgcctatacttatctctagtaaattttttctagcaaattgtctttcctagctgaatgtaatataagtttataatctttcagatgcatgaattatttaaccaaatacagagtgttcagttatttggaaacgtgaatctttttctctcacataatgtcgatgtttaagcattgaaactattggatccatgccattgtaacttcttcggttataaaaaaaaatgacattactattcacttattaaaaatgccattacaatttgactaaaattagagatataccactacgtaccccttcaatgcacttataaaaaattttgaaccaaattacccctccttcattcacccccttcttccttacactagaacctccgccacccacacactaatgttgaaggtgaaccaccccctcgtgtcctcctctactttgctttctcccctaccaccgccaggggagctccaaaaagggtgacagcaagattcgagcttgaaggggctaccacaaaccgctcctcgacatggtcatcccagttaccaaggttttcatcggggcagccccgccgccaccactgtcatccaagaggacgacgagatccgcgattatctaccacgagctcaatgggatggctagtgatggagaggtcgcggctctatggtatggggatggacggtgagaagtgggcctaggtggagagggcggcagccagcggactcgattgggatcaccggattggaccggtggaagagatgacatagattagtgagagggagaaggaagaaggaagtgaaggaaggagaagggataatttggtgtaaattcttattgcattggaggggtacatagtggcatatctctaattttggtcaaattatagcagcatgtctttaaatagatgaatagtaatggtatttttcaaaattgaagaaattacaatggcatgagtccaattaaccattgaaactaatttaactcacttctctgatttgttttataacaattgaatgtgctatattaaattactaacccaattaaagcatataaaagcatcatgaaacatctgagctttggccactgatcggatgagccatttgcaagttgcaacacacgttggagcctcagtttaggccccctgatcaacgtttgcaacaaatttggccacatttctctgaactaggaaggtagcccgcgcagatgcgcaggcaatttatttattgtttacaaatttaattggtaaattttgagatagatctaatggtttagaaaatttgaagatttttttcttaagagagtaggaaaggaaagaggagatgaggagagtacggaagggtgtggagaaggtgggagcacatacttttttttattcgaactaatagttaaaaatattggacccaccaattttaaaagaaaatcaatggatagattttagagtgtcacttggcttaatccaaacaaattaaaattaaatcagatctacttgaaaaaacacaactaaattgctttattttttcgcaattacgtagtacatttatcaagtgatatttgatatcctaaaatataatatgaaattatttaaaattatcataacattaattattatataaatttagaaccgcaatataaattttataagacacaaatattttatttaattaaagaaatgcaacgggatcacaaattgattatataatttaaaataatttaaaagatgaacgtttagagataattgatttcatattttttatttatattatagatctagtttatatttgcacatatttgtggagtaatatatttttatatggtaaaaagttatattttaaagatcattgattttgttctgacggtaatatgtattatcgattttaatttattttgaattttaaattgttggtttaattatgtatagagcaacagttagattagatatgatatgtgtagcttaaaataaccatggttgtttctctttatcatagctactcaaaaaatatagagagaagtggagggggcagaaagtgttgtgcgtatctaatggtgagggtgaggtggaggggactttgtttttctatttttttctaaatcatttaggtcaaaaaccaattatcatgtattttgttttttaaaaaactttttaattttaaagtcattataataacttaaaaaggtaatcttaattacacctatttaagctggacgatttaactggattgcttggttcgaattagctacataatatcacggtaaagccatgtaaactgatttaattagctatgtataatcttcttgtaaatctcctagcttacatatatatatatatatatatatatatatatgtgtgtgtgtgtgtgtgtgtgtgtgtgtattgccgtgcatgtaataaatatagctatgattagtagtaacacaatatgacagctaattaatctcaacttctaacaaccatagttactaatccttccgacaaaccgtacatacgtacgggagaaaggtagatctaattcattggtataaaataatgggtccaccaatttaagtgaaaatcaacggcaggtaaagatctaatctaatggtataaaataatgggtccaccaatttaagtgaaaatcgacgatgagattatattatgccacatgacggcctaggagcatttgtaggagcgcctcgtggtggcttaagagcgtttataggaagtttaatggacttttagtatataactaggaaggtagcacgcgcgaatgcgcgggcatgcgtcgtacgctaagtttgagatacttataaaagcgaaatattaaccggtgaatatctaccacgatttctccataaattgttttcgtcgacattaatttcctttataattttctaacctattagctttatattatatcatatttatgtaatatctataagcaattatttataatcttcttcatcatttgaaaagaaggtatacttattttcttaagaaaacatgtcaataaaaagtaagtgtaaaataaaactaaggtattttactttttttaattacatatatattatcatggtttattcgaggattaattgggtgggacatgaagctccactaaatatatgatttatatagcctaatatgatttatgtaatttgagatccatttatgaacattttatgtggagtgggtcagaagttctacgcaagctaacatgaaagcgaaatataattgaataataatatttttgaaatgtgatgtaccatgtatacacatatgttttttcttatataagatagatctaactattctaaatagtgattccaccagtttaaaaggcataggagtattccagaaatgtagcttaaaaattatggttgttttaatatccaacattattgcgaagtaaacgtagctcaactggttaggttcattgtgatggaatttgcccacttgggttcatgtcctagacttggacaaattcttttaagtagtaggtgacgtacccgttgacagcgagaagtgcatagtgactttatcaatctcaaaatatgtcagcctagtctctcgaaaggactaggacaaattctttcagtagtaggtgacatacccgtcgacagcgaaaagtacacagtgacttcatcaatatcaaaatatgtcagcctagtctctcggaagtactcataggggtatgtgcatgcgtgagttcatagagctgagtgtgtgcgttgtgaacacccgcgtttgtactttatttttaaaaacacatcaaacattatttagaaaaatagataaaacaatagggatgggacaacactgttgtgtagatgtgagagtgaggaggtagagattttatttttctaatttttctaaatgatttaagtgaaagctgatgacaaggtgctttattttttctaagaatttccaaggattatccccttttttataggacgtgccccaaggtaacttaagattttatttaaaaaaatagatctaataatttttttgatagataggtttagaagatggtttaaaagaacattgattgaatatttattatagatcttaatttaactaaacatattgatatttgtgaagtaatatattttatccttatatagtagaaaatcatattttaaaaagaccgttgattattatgtatgtatgtttttttctgtctttcttatgtatacgtatatgtatttgttttcttccagcgaagatcaggaaactttatcgttttgttttcacaatcatgtacgtttgtatacgtacggagagaacagcagtaggatttgtaacgtacaaactcatacgtacggacagtagtagcgctggtacattataaacatgcggaagttattattttttaataatagatttgatctaatagtgtaaaataatgggtccaccaatttaagtgaaaatcgacgctaagattagactgtgccatgtggtgacgtaggaacatttgtaggagtgccacgtgacggcttaggaacgtttatagaaagtttaatggacttttagtatataatagatagatagattgattcctagcaacaacaatttcatgtccagtaacagagaacaaaactattaaatgggtctcatgcaacaaagcaacattccaaatatcatctgccagagaataaactgcataaatgtagagcatttagctgaacatttacatgatggtcatgtcaaattgcactcacttcacacaagtgtcttaaacagaaggaagcaagttggttaagtaggaacaggaaaaccccaaaagatcagcacagcaagacattgagagaaagagacgatgatacaagctcagaagatcatattcttcttcacagcaggtcactgaatgtgtcaaagcagctccaaaaaagaaggtcaacactcagcagctgttcttttccgtccagaggttattagctgcatggattacatggcgtgaacaaatttcagaataatgcggagataacagagtttgatgtaatagaactaaggtggaaagaggtactgacagatgaagagaggtcagatgtcttcagtactctcagtctcttaactgaagaaacaaacatcctgcatgaattgcagtatcagactatcagttaggaggcatatggtccagtttgatggtaaaattattttctcccagtttgataatcaataaattttttaaaaaaaacaagggaatagactgcatatcattttcaagcattgctgtttgcataatcagcatccaataaaagtagtaactttgtttactactctctgaaaatgcaacggtaaaacgaaaaactcacccccatggcacatctccaacaagcaccttgtcgccttcataatcctcataaaccaaagtgtactccccagttccatctagcaagccagatattgccacatcttcctgctggcagtcctttgctccagcagtgagggggtctctttgggcttaaatacaacgacggaaattgaacacattggatcagatactaatccgataactcagccattcaaatttcaaaatactgaaaataacaaagaaataatttgcgaactttcgaaagaacaataaggaaataatttatgcagtgccatggttcagtatcagtggaaaactcttcagatactctatcataaactgcagtcgcaattgaatgatttaattgtgttacaaaacaacagagttgaggttcatatacctgcaagaaggcctcggaatagcttgtcaaccgctaaagaaagcttctcatagctatcaaaagcattcagatcgatctttctaccaatagggacaccatccatgtttatctttatgaatggagctctcttgatctcttctgcttttgcagccttctttccattctgcagttcaagagatgctttgctggatgtagccagatttcttctgaatgttcgaaccggaggccaaccaacaacaggagtactaggagatctgcatttcgaggttgtcaggttgaaaaaggttcagaaatgatctcctgtattattttgcaaataataactacagcaaactaaaactagagtatctgactagctatagttactatttttcaaggttgaaaagttcagaaatggtatcatatattattttgcaaagaataactacatcaaactacaaaatagagtatctgactagctatagttattacctttcaatttccgttttttgtacaaatcctaaatcacctatgcatcagaaactatttctctggaaaaaggatgttcaaattaaaacatacacattgtagtagtctacattcagatcaggaagcttagtgcctgatggtgtacaacaccagtaaatgattgctagctaatgccaaagctttgcctatatatggtgacacaagagtggcttataaatggatgcaatctaaagggtggcatatgatcaattttcctgaaattatacttaagtaaataatcctgcaaccaggtatgtcaggtgaactaacaacaactgtcatgaacagaagggacaaactagaaagtaaacaacaaacagtactacatgttgacaaagacaactgcatccctcataaatggagtaggagatctatctatctatctccatggatagcatgcaggcaggcagaagcaaacaagcaaaatggtttttgtcataaatgaggagcaggcatgcaggagatggaggcatctccctcttcaattcatgcagatgaggaggaaatgaggaataaaagaatcaggagctagtagctagctaccaatccaatagttgagtttgcccactcataaaaagcaaaagattatggtgctgtggaatttttgacatgtgaggagaggcccttatgattcccaaccttgtctggaagcagccattattgttggatgcaagtgcattattccctgtagctggtggtggatgtgcctcttcttcctctggggaccccttgtttttgtttgccttgcctgcacaagaacaaggaggaagaaacaagatgtgatatcatgcttcagagaactttttcccctgctgttcttgacttttgagcatggcacatgcaatcaagattgaagaagaaccaatgatgcaatattctactcatatgcaatacttctttttttttgtcagataatggatttttcattaaacaacaatgatattacctaggtttcttatgtaaacacacttaccacaagtattttcttgagcagtgtttaccacaagtatatatcaagtcaactaaacctctgaaaccatactgttaaaagttcagtgcacctatcagctccccccaataaaaacacaaaaagttcttaacaacaatcttcttaacaactaatttttcaggtttcttttctgctcattctcctcagccaaattttagaaaccactcctacttcagagttgagagcaatggcacacacatttctgctcaggtctcaaacgctgcattacccatatatctaactaagtttcatcagaaaatgaggcacatttttgtggtatgtcacaacaccaaaacactaacaaaaacacacgtataactagatgtctattacagtaacatgcaactgacatcgcaagaacacgagatcagttacagagttgtgaactttttcttttatctgtaccttgcgagtgggagacgagtgtggagtagcccagggagagcatggagctcttgtcaccatcatcatcatcagcagcagcagctgctgcaatggagtgcttcgtcgtcgtccccttgtccctgcacgccgctcgccatcctcctccggggagcccaaggctgagctccagcgtcttctcctcctcctcctgttcatcgccatggcgatggtgatcgcttggctcccccatccagcttccgccgagacggcctctgctgatcttcttcatgctctccgacgcctcccccatcacccgctctctagatgtacagctcgcccaaatccaagaacaaatcaagaaagcagaaactagctagctgagctgctgctgctgctggttgctgtcttggctgcaatgcaagagggagaggtgtggaacagagagctagaaaaggtgtgggaatggtagtagtagctgcagctgcaatgcgagcaacggcacacggcaatgtgatgctccgatgcgagtagcgtctagctgagcctgagctgagctgagatgccgcccatgacatcctatcctgctactcctcctatcatgccctgatagagagagattcgtgtttgcttctgctgcctactgcattctctctctctctctttctctatattcctctcactcaaaaggtggcagatggagcagttaaaatagcataagctagctataaatatattttaatgagataaaaatgagaaagaaaagcagtgggctacagatctgtagccagctgcagcacggactccaagacacaatatatgtatgataggtgggaccatatattaatagtatagtaagcaactattgtatgaattgactattagatcggctatagatgaattagactaagtagtgggttatactattaaacttgctctaataatgtggtggttttgctttagactaattaaagtgccattaacaagctcatcagctagtaatagagtagtattagcaagaagatgatgatgattatggaggcagaacagcaagcgacaaggccataggtgggtgagaatgagatggtgatggggataattaggcgtgcagcggagaagatttgcaggatcctgctcttttggccgctgctgtagacctgtagtactctactattcctattcggctagtattcctttctactctctctcatggcctctgtgcctgcctgcgttgggccgcgagcacattgctgttgtggttgccctgtctgtctatccgtgtgtcgtcagggtcatcaggattcaggggcaaatgcaaatgcaaatgcaaatatgcagtgcagagaaactgcaggccaggcagaggcagaggcagcagagcactgaaaaggttacagtggccaagcaagcaagcaaaggtgacaaccaaaccaaaatatgctttgctttgctttgcattgctttggctttgatgatttcctcctcttcttcttcttgcgcgcgggcgaggccggctcccgagttggtggttgttggcatgccaacggacgacgggttgttggctcaagaaagctgcctttctcttcctttcttgtgagttgggatcagagtactcatcgctagctctgggttcgtttgtttgtttgtttcggtgccttgcattgcgttgcacctgtaaacaattgcagggatgcaggtgtggcatgcataatgcattgattcttggagcaagcaatggagagttgttttgttggagaattttatgtagaaagtggtcttatgttgtgtgatacttcctctcttttcaaatactacctccgctttttatatatataacattgttggttgttcgtataatgtttgtctattcgtcttattaaaaatttagcgtaaatttttaaaaatataagtaaaggtcagagttttatatgataaaataaaacataaaaaattaaatagcatttatataaactttttaaacagaacatataatcaaacgtcacattaaaaatcaacgacgtcatatattataaaatggagagagtttaatatttctcagcacaatagtctacttttcaaggcatttaatagggtgcgcgcaccctcaacaggatcactctcccaactgatagtggtagctcggatctaatgttgaaacatgaaaccactcattttatattgtaaatgcccttcaaagataatagaagaaatagggcatgtttggattgttgcaactttcatgaccattctgttcctgtaccaaattttggtattagcattttggtattaccaagatttgataatgcaacaaatcaaacatgttcttgtcatttctatcttactaaaagttggccgtcccgaaggttttcgctcttaaaatctctatcatattttggtaaagcctaccaatcaaacataatcaatattatcaaattttggtaataacaaaatttatacttgggtattaccaagtttggtagggttggtttgggcagcaacaaaccaaaaagatgcttacctttggcctctgcaaaaataaatgataacattaatatttgaatcccagtgaatagagttatgcatctacgactccctcccatgatcacattgatgttgctttctcaatggagttatcttttgctttttcttatttcctgttttgtaaatttgtaacatctgttggcaactgaaaatagaatgtgaagtgagcccatggaaaaaaaaaggcacattgcacaatttgcggaaaaaatagttatcttagatatcatgcaaaaccttgcttgaaacttcatgcaaaattacttgtagcatgaaaccatccatgcaaaaaattgtgagagcacaagaatgcactttctgcatctaggaaagcaagtgcccctagaggtcaacaataatgagctggtggcagcatccaagcaacaacagtgtgcaggtggtgagtgactaacttcaacttgggtgccattttggactttggagggaatcattgtagtagtaacctccatccaccacctttgcataaacctctctctggtcccctacatctttgctcctcttcttcttggtggccgttggatcaaggattccttgatctagcgtcctatgtaaggtttgtcaatgtttctaccgcgagagagagagagttagatgaaatttccacgcttctaataaatttaattccattaatcatgtaactatgtgttgtcgaatagacaaccacgtcacgtcgaagacgtggtttttttcaaccgttgttggaaaagtgaaacagttgtattacttagtgaaaaaaacttttggaatccccctattatatggccctagggggctatttatagccccattacaagttctccctattagggtttagattttacaggggaattttcattgttacccttatgataggaatattattgagggcacactgtgtcctttacacatatgggctcctactggacttaaatggctcggcccatctatctgccaaaatttcctgaggacgtagcggcccgctaggcttcccgacgacgaggttccgtactttggcgaaaccgtgccttcatgccgaggctttcgccgcatcatctacacccgtgcagccttctggcaaggactccgcttggcgaagctggcgtaacccaagccacggcttacgcccatatggctttattctcaaccttcgccgcctgcctccggtctgagcctgttgcccgagtttttggtttcggcaggtccggccgaaggcccttcgtggtatacctccagcactatgcaaatgttgcatttctaactctagttttcctaataacctgtaatatgtccatattatacaacggtataggcctatataattagaaattgactagatgggtggactaataatctctactattataaaaactgaagatgtttttattggtctcttggtacaccatccgtatttgagtctgtcagtttgttcgcttttggaaacacatatccgtatgtaagtcggattttaagtccgtttgcttttggaaataaaaagagtcgtataagaaatctctttaaaaaactcgcatgctaacttaagatgaaagttggactcctaattgtagctcatgattttctaaagaactatccaagcg

SEQ ID NO: 4902 - DNA, 40731 bp, Oryza sativa
gtagattgctgatttgggtctatccaatggctccaagtgcatgattgtttttccttttcttttgggttagaaacatttgcatgcaagtattcgctatcatgttccttacttgacttggcctttttatcaatgaagtgcgtgttgaagggctggaaacaatggactaccttgacaatttgaagggaaaggagcgttttacagagcaaggggatgctattgtatttgaatcagaggtaagtctattactgttaaatgtccacatttcgtgttaaataactaatatttcaagcttcttacctataattttctatgttaagattgataaggtataccttgctgcaccttcaaaaattgcaattattgatcatgaaaagaaaaggacatttgtcttgacaaaagaaggacttccagatgctggtaagcttgatctgatggcaaatcttttatgttgacctaactatttttcgctatttgtgttatttcatctagttattgctgctgtttctgctgtagttgtttggaacccttgggacaagaaggcaaaagctatgcaagattttggagatggagaatacaaacacatgctttgtgtggagcctgcagctgttgagaagcctattactctgaagccaggtgaagagtggaaaggaagacttgcactctcagctgttccttccagttactgtagtgggcagttagatccattgaaggtccttcaaggttgagaattctcatttctgcgtcttgtacaggtgatgttttgctctagtttgcaacgttacctggatgagtcctaaggctaattttgctcttgtggatccattgcattacttgtgaaattttgttgttggttagatgctatataccttggttgagttcccgtaaaagaattagtggctgatgaaaaagttgaactttccggtactactatttgagatgcctatgataggtgctcgctccggtactttctaatgggtgtttgaaaattctgataggaaaggtttggttgttaatgccgaaagtgtgtttggttaggagcaattggttgagttgactgcttcctgaaagctttgtttagatgaaggggacagctccttttgtgattggggatttgtggtggttcttgtttgcctactcaatggataaataatgttttcttgtgtttggctgctttggcattagcataatagagattgaactaagtataaaaaaatctacgcttctaaattgtaagctttactaaatatggtatgcaattaaaacgtacactcttcgttttttgtctaataaccacctagctccactcgtaccgtcaccgttactgctacatgttgtgtttggaaaattttatctgtatgaggtggcaatgcttttaatgtttggttgctttggcattagcatgaaagggattgaactaaatgtaaaaaaaaaaatctacgcttctaaattgtaagcattactaaatatggtatgcaattaaaacgtacgttgcttgtctaataactgcctactcggccgtcaccatctgctatggctgttgtgattggcaaattttatctgtatgaggtggcaatgcttttaatttgcttagtttttttgagtgctcccccttatggtcaacacttaacacatgcccattaatacgatgttttgaaccgatttctcttcattactaataattaatatgatgttttgaaccgatttctcttcattactaataaatgaatggtttggttttctgcaggagcacctcattgcccttaatatttgatgctgggctggcgcgcgaccttttctttctttgccattttaaatcccccgtgcttcgttctttttttgtacctagaagtgagtagtagggtacctccgaaataacagactgtgccacctgcttcgaccctagagcggatcatctccttggtgaatgaattcgaccagtggacacaagccattcgtgccctggtgatatgattcatcgtccatattccaggaaatattcgccatgctgcataaggtccgtagcattctcagttaatctgtagttatgatcattgggagcatttgagttacactggcttgctactgtgcttcaaagcctagttctttgcctccttgtgcaaacgcctctaaagaatgatgtcaggtgcagctagtagtaatatgttgtcaatacatgagaattgagtatcgactgttttgagtcgccttgggtaaggcccagtttggatcaaagcatattttgcatgagttcatgagattgttgcgttccaaacgggttcgtccaactggctggaggaggaagcatgtgccatctgtcatttgaaagttattctcaatggaaccaaggtttttttagtggaaaaaatgaattcatacgcttctgttgagtgggtaattaattagcctatgaaatttcaacccattcgtcaactccaagcttcttgggttgacatctcagttcgtccagtgaaaagaggcgtcagtggatgtcacggagaaagagagcttcaggccagctggcacgttcatatgctgcccaggaaagagcaaaaccgtgaaagctgaagatcatcacataaatcttctaagcacttcacatgaaaggaaaaattgataaaagatgttatggtgccaaacttctgtggaagtcaaattcaacccttaacttcagaaatataaaatattgattctagcctttcgaaatacagaacatcatgttatcgccaatttaaaaattgaattagatctataatttcaacaataaaatgactccaattggggaacattacatcataaaataattacttgctatatgctactcccttcgtacttgtaaagtaagttgtttaggacaatgtttgagtcaaaccttgggaatataaatcataaataactcttaagttgttgagtttgaaaatataaaaattatatgaatagatttgtcttgaaaaatattttcataaaagtatacatatatcacttttcaataaatatttttatagaaacaagaagtcaaagttgtgttttggagaccgtgtcgctttcctaaacgacttcctttatgagtacggatggagtatattttaaaatagtgacatgttggggaagcgcgtggtagtagagttatggttatatgacttcactcataagagagtttaaattctggtgcttatgaatataaattatgtacacacaaatgggattttagtgcagtcaaataggattttaatgcaaattcagtgatcatggatgtaatgatggttgcaaaatagaaatttagtgagattagggttgtactactctttttccatctctttgagcgtacatgcactccatcctactctgcccatacgaggaaaacctcttgtgtgaattctatgttacactcattcctatgtattagttgatacctacggtttgctgcaggatatatatgtttaaataatgcaaaaataatatagagataatgatttaacattgcttgcatattgagttctaaaaatgcaataaaattgtaaatgatatgtcatatttgtatgatatttaaaatattctagataataattgctagtgtgtgatgacgtgacacacttgcatgtgatttaagatacaaccagttgcttcatcctccttccttcaccaactttacaccagtcagcacatcttcctccctctcctcaactcctcgactatcatccctaacaccgacgatatccactatcctcttttcgcacttcatacaccggatctaaagcatatcctcatcctccctcccttcatacaccggatctaaagcatatcctcctccctccctctcttcaactccttgaccatcatccctaacaccgacgacatcccctatcctcttttctcacttcacacactaaatctaaagcatgagagagtcctcttttctcacttcatacactggatctaaagcatgagagattcgctggagagggcatgtatgttgtgatgtgtgaggagaaggaaagggaggcgtcaaggctgaaggggacttggaagagtgtgcccctcatcgcctggctgactggcaagccacctatcgttgccttatctcttctcccttactctcctcaatgcctccatactcctattattgctatgatcggtgggggcaacgagctgagggttgccgctgcttcgttcccttgcagcgtgggagatcaaacatgggggaggcaggaagtggggatcggattcatgaagtatccatcggaacagaattccgtgctctcgcaatccttatatttttagccattagtttttgggaaaagtccattttacaccctcgaactcttatacttgtctaaaatacacccccgaactacaaaaccgggtataatacaccctcgaattgtcaataccggacacttaaccccccgggctgtttttatcgtggtttttgccacgtcagcacacaaagtaatatgggccaagccgcctagcccatactatgttcgttcttctctccctcccctgttcgttcttctcttcctcacgactgttggcggcggcagcgacagcgacggctgcggtggcggcgcggagctgcgagggcggtgactgctgcgagggcagagctacggcggcggctccccgttccgcacttggccgccaccagctcgcgaccggctgaggcgttgagtctcctccgtgcgaggggcctgtgcggctccctcctccacccgcgccgcctctgctcctctgttgcgccggtagcagccgcaaagcccggggccgccggtaagcctccaggccccgctcctccttcccctcgcatgcatggtgctgaaccgctgatatgtgcgatgatatttgcagggacgaccggggaggccggaggcagctgcggcgccggtggaagagctagcgaaatctctgcagggggtggaggtgttcgatctgagaggaaaggcggttcccgttgttgatctgtggaaggacatgaattttttgtcgtgctttggaagattgattgtgtatgagacaattgatgctggttgtttgcaggtgtgtgatgtgccgtaagagggccgatcttcttgtggctaagaaggttagtttactgctaagcaggttagtttagtggccgattcctctatgcgaatttcgaggaacaaaggaaatacatcaaatgctcaaagtgatgcattcttctactctctttttttcaatctaccaggttccatttacaaaaacataaaatgttttcattttcaaacttcgcagctccgctccgccgccgccaacggttgtgaggaagagaagaacgaacagggtgttggtatttcttaatgatattactagaaatataattcccagcaatggcgcagaaatactcatggtatattatggttacagagttcatccgcaagcgcacggatataccattgtagcatttcacccgagagtattccaagggtatcgtatttattttatcccgtgggaagatcatgtagagagaactcaactaataatttatatattacttgtgataatcatattctaagcaggggttaagataatccaaaggtagagtgacacacaagcattactactcattctcataatatattatctgagctaagtggaaagaaaagagaaagaaaatctattcatatacttctaatatacatagtatacatattctcataatatattatctgagctaagtggaaagaaaagagaaagaaaatctattcctatacttctaatatacatagtatacatatacattctagttaactgatatactagctaataccctctatctgatgccctcctggtacttcgagaagccacccctaactgccgagttccttacgacatcccgtcatgaccatacaactggggctaaatacggaggaataccctccccagggaattaacttaggattatataccggcgcagaggaatactcgtactgagctgtcaccatcagcggcccacctctcatccgcaatatataaccccaaataatgatatcccgtaatctagacacaacgtctaaactaccagatactactctaatatcatcgtcatgacatagagtaattgcataagcaaacattatacccgcaccaaagcatctcccagataagctagccgtatattcagtataacatgaacataatgtaaagtaggtattcatatacttggaaagtatttcaataccataaatatatttagaagagtattctaataaaagtacaaaacttacaaaagagaagagaaaagctactagagccatacctgaactcttccgaaggcttccggactcctgatttctactctattcctattccaccagctagatattgctagactaaacttgagagaaatgagagagctattgcttgaggtgtgtgagtgaagtgaggatgagagctcctttatagcctcccaatgacggttgtgacggttggaatggtcggtaataccctccaaccgtcattggggagcaatctcagccgtccaggggaaccctggatcaaacggagctgctgggggttcggccgaacctggggccggcccaatcctgcccaatttcggctagcggcctcctctgttgcttctcttcgcagacttgtgaattttggcccgattcgttgtgtcaattctgagttcttggcccattcatacataagtctggttctcgacatcgtccgattgatttatcgtctaagttgatgtcgattctcctccactttattgtcattctctgcaaaaggttagtatacctaatactagtggaatattattattctaacagatatatgcattgcaagcatcactagttctcctctattttggtaatattgacggtcgaaactgatcgataacgaccgtcaacacagggaagggagagaagaacgaacagagtatgggcttggcccatattactttgtgtgctgacgtggcgagggctgacgtggcgtccgacgtggcaaaaaccacggtaaaacacagtccgagggggttaagtgttcggtattgacagtttgagggtgtattatacccggtttttgtagttcgggggtgtattttagagaagcataagagttcaagggtgtaaaatgaacttttcccttagttttttccccatgcacatctgttctagacttaaaattttgttagatggtggctgcttatcacaacattgttgtatttttcttttcagagattgtatattaattttactggtatttgaggattgagaagcaagggatgcgtacatacacttgaatttgaactctgactcaatagagatcgccatatcaataacgaataatgtggacttcaaattgctgtatagaatgggttgtctgttcaataacaaaaaatttttctaccttgatttatttcctgctacttttctttgcccacgctgcattgtgtggagtgagagcaagaacagttctggacatttgagcaacaagttgaatctaaacaaagaatataatgaaaatctatgtaaacaaaatgaatctgcatcttgttcaattctctcaagtacactaatgtttcgtagcagaaccgacggatttgcagatggggcaccaattcttttgccgaagccattgttggatgcaagcaagatgatagtaatgcttgcacgccatctcggccacctcctcggcaggtaaatattcctcctgaaaagataagcaggagaaggaacatgtccacatgtcatcaccagattatcttttcaagtactaagaagtttcttcagcaaatccagtgcctgaatttatgtttgattgattggtacatcatatttttcagtacagtatattagtcattcatctcgaaattaaataacagaaatgttcttggcccaaattttcatgatattttagactagtttactatatagtagtattatatcatctgattgacttataatggtttgtatgttaaaatatatttagcatcgacagtaaggatataaaactcattattccttttcttttgctgcatgtcttggaagaagtgttgacagtaaggaattaaggatatcataaataaccagagcaactcacatatcatcaaactatagatcattctaatgatgcaatgctagtaaatgaacatacctggcatattatgcatttgatatcaccatcttcatgacttgttgaagctgagggcacatagtggattctcttcagacaatttgacagttcatcctctggaaggccagtgctcacggtaccaattgtttcccctagagcaagcaattcctagaatgccacacaaccaacatcaaacaaacggaaaggaataaattccaaacaaaaggttcttggggctaaaatgtttacatgaataaatatggactttagtaccagctctcttagaactgaataatagatatacctcataagacatgtcgtcgatgtccattctcattcctctatgcctatcactggaagcatcctgcaagacaataaagaattaaactctatgtttcaaagtggtcagcaacaaaatgcaagaggattgcatttcctctgcatcggtacattcttttcttgacataataatcaatacattctcagaacatctacagggtggatactgcaaatccattatggaagtaacaatggaaaggcgtacctcatcactttcatccacaccgaagcgccagtattcagtggagtcattcaaactgttttccaaatgagatactggttcttcttgatttctgcttctatgtctcaacaagctttgagaaacaaacctaccggtaggtccttgcaaatcagctctcctatgcacatttgctccagaatttccaccactatcactacgcattctggcattgcttccatttgtgcctccatccttccttgtctttggaactgatcgatgcaattgtcttgaaattgatctactactactactcaaggaacctgcactagatgtgtttgatgatgatgggctactccctccactcaatgagcgcttcctcgacgaatttactctttctttcaaatggtccagaagatcctgtccagcagtttctcttctaggtctgttgccggtttcgctacaggtgccggctgcattcctcctgctgccataagccattcttccttgaggtaacagcctgttggatccactgacaagtagtgatctctgaggaatcactgcttctttggttggcctgcgcattttcttctctttgtcacggaaaagcttactgctacagccagtgcgcgtacagcaagcggtcgctttgtggcgcgggctatcttccctatatacaaggattgagccccctttggtcaatagaaggccaccaactgttctcctccccatggtttcgtccatattcaactgaaaaaaaaagggagcaagctcaagtttgagagatgaataagtcatcatcaactaggtcaacagaatatcacaattggaccgagggcataattaacatgttaaaatcaaacaaagctttaggtgatacaaaacaatgaagtgctcccttataattcgcaaacaactaaagtgggaagagatctccgcaaataatttgcagaataagtatttttctactgtccaaaactttgcagcatcagcaggtcagaacaagataatggatgaaaccaagaatttgccaccaatcaaaatcaagtataatgcagaccacatatggtgacaatcatgaaaacaacggttcttgaaattaagaatcaacaaaaaaaacacacacatataaaccgataaaaccagacctgctcatcatgaaagcacaaccaaagacgacatcgacatctgtgcagatacagttatgggcaatgtgaccaaaacaaacagcattgtcagaagacaacttcagttaggtgatcctacatacttacaaattaactctacatatagattaggtcttgaggtgcttcttacaaccataaggcttatgcaaggatgaaaagccttttatcattctaccggacaaaaaaaaataaaaagaaaggaaaagttactggtagtctagtactgccccctttctagctgagatcattgccttttgctgaaaggtgaatccactcatacccacactaccacgccaagccaccattgaatcaagacatgaaacatgatccttaaaagtatacgccactattagcctagaatcaaatggcattcatcatcttgcaattgcaaatgaaaaaaacgtgacagacagtactacttggagtaattactgaatatcgaagatttaaagacagtattaattaatcgaggaaaactaaaatgatggtcaaacagagtagtaagtgatgctcgcagtaacagaagataaaaactaatcaagccaaaaaaaaaaaaagcgggggaaaaaagcagaagtgccaagatggtaaagtattctaggatacgaaccaaaacagattaaacggttttcccttaactcctacgatttgcagaagccaagaacaatcaaagatttggtaggcaagcaatttcataattgtgcatcgcgatcgtacggtcgtagtactgcgtggtggatgaacaaatacgcaagaaacgaagagagagagaggaatcaattgattgatcgatcgatcgaaacgcccgccctaatcgggcatcttttctcacgccccaagaatcgcccgcacgataccaacaaacctcaaaagaggcagagccaaaaacaatgtttcttgtcgtttaactccctaaaccattatccaagatacaaacaaaaagaaatcgttcgtacgtacgtataatctgacttgttctcgcaagaaaattacaattaaattggttccgcaatctcgtcctccgatgaacaagaacaacctatctatctatctatatctgcctgatcaatcacctccgtatcgaaacaaacacggacagggattaattgattcggaaaggcagtcacagccaggaggagaaccaaatcaaaatcaatcaatcaaacccaccaagaaaccacaagaaccatcaaaacggcagacaaagattcattcaaacaaggagatagagcagaaatcggagagataatctgagagaaaaataccctcccaatcttcttcttcctcttcctctgctgcgtgctccagctagaagggtagagagagagagagagagagccgaacaactcaactcgatgagagaggaggtctcaaaccctcaacaatgtctcgtgcgcttggcttcctcgtctcctcctcctccctccgccatggccaagaagaagaaataaaagaagagatcgagagagagagagagagagagagagagagagagagagagagagaaaacaaacgcagtcggagtcgatgatgaggtggcggtgggcccgacgtggcatatcatcctggccgtccgatgggccgcggcggatgggatccgacggcccgggacgaggtccggcacgtgggcccggtccacgtaggcggtcgagtcggacgcgcgtggcgctgagctcgtatcgggatacctgagacggggctagcgggagaggctgacgggtgggccccataggttgggcccccaccctccgggcccacttccgatgtggataccgtaagcggggctagcgggagaggctgacgtgtgggcccgaatggtgggcctcccgccctccggccccactttctggtttgcatggtggggtagttggaaggtgcacgcggcgcggccgccacgtcctcgcgtggaaaattcgttcgccaaattctttgcgaattatttttctcctcccgtgaattttttgcgaaaaatcattccgcaaaaaatttgacgactcctataatcaaatttcatgttagtatatactgcatatagatgctattttcgatcatttaaaagaaaacacgacgatagttttctttttccccttcaataattatagtgcattagtgtgccacatgactgttaatttctttgatattccctatgagataaagatatagcttttaatatcgaatggagaaaatatattctataccactgaatttgtttgagttcaacaatttgctatcgacattgtaatataccgacaactttatcaattgttttacaatacaccattggatcaccattggattggtccttcattttaaaaatgcctaaactactcttagaaacatactccatccgtttcaaaatatttgacaccgttgactttttagtacatatttgaccgctcgtcttattaaaaaaaaatttgtgaaatatgtaaaactatatgtgtacatgaaaatatatttaacaatgaatcaaaagatatgaaaaaaataaataattacttaaattttttgaataagacgaatggtcaaatacgtactaaaaagtcaacggtgtcaaacattttgaaacggagggagtacaagattaacaattgatttatctcattagaagtttcaaaatagtatgaaaacttttatgtggcctggccttcttatacaacatggaaatttgtatagaagtttcaagatttttacatttctattttttgtaaaaaaaaatataacttatctgtattacgctacataagatatttttgtgctatgatatcttgtataagcaaattctctctcatataacacataaaaatatattttttttctaaaaactaaacataccaaaaaaaacttaaaaattgtataaaaacttccatgttgtgtaaggaggccacgtaaaaaatttcatatttttttgaaacttctaatgagataaatcaattgttaatcttgtatgcctataaggatattttgggtatttttgaaaagaagacccaacccagtgggatattgtgaaacaattgataaagtcgccggtatattatataaagagacaatgtcgatggcaaatcgttgaactcaaataaacttattggtatggaatagattctctccgaatagatactaaccaaccgtgcttttcttatagttgtgaacgaatgtactagtacattatcaagggttttttttagacaaatgaactcattgttttttgacaggttgtataaattcatttgtggaaaaaaaagagagctggttttacacatcttagggccacttattttattcccacaatacctgtgtgaactgggctacatgccggtcatgtctcgtgtttttttcttgacatgcaggacattttttttcatcctgaagacgactgcatagcacggtagttttgttctttatatcgttaatgcaaaaaatatatatacagttaatattggtaaaggcccaaacaattagcttctcttttctctacagatcattaccgctttgtggttgagtcaaaacatacatacatatagtagataacactttctatcgggttaatcacattcacatcattactggtgttagcaaaaactattgtatttaaatatataacacggttgattttaattttttaaaactttgacaaataataaactatcaaatatttggtccgaaaacataaaaaatatattggcatctttttctttataagtacttttataatataatatttctgttagatattaaaagagtatgttataatatgttttagagtaaagtgtacggacggtccttaaatttgtaggggtgcgtcatttaggtccctaaactctcaaaatgcatatccaatgcatatccaagtctcagaacttgtcatattgtgttatctaggtcccaaatcgccacagccccttcagaatcctatgtggcgttgatgtggcatgccacacggacatgacgtggcattattttggctgacaaatggtacccatttaatttttttccttttcttttcttttctcctctttcttctcctttctctatgacccgtgcagaagaaaggaaaaaaacagaataagaaaaataagaatgagaagaaaacgaaaaagaaaaagaaaagaagaagaaaaaaaaagaaaaggacatgtcacgtgcatgtggcattgccacatcagtgccacgtaggatcttaaaggggatgtgtcaatttgggacctagatgatacactttgacaagttctaggatctggatatgcattttaagagtttaggaacctatatgacacaaccctacaagtttaaggaccgccaatgcttactctatgttttacttaacgccgaattaattccgttatgaaatctgagtaaagccctgtgaaaaaatgagccgaatcatttgtactttgtaaggtttcttgttgtattctgctgtcaagcgaaacttattttggtatgtcatgatacaaaagtgaaagtacgcgttgatcttactgtgaagggaatcaaagaccattttacttgatggagaaaataatttacttataatacattatgtgaattgtgatggatggcacaaaacaaaagtgttgataggttgctgcttttcaatcagaacataatccttaggagataagaggaccaagtagaagaatcaagaaccaacttttccttgaccatagacctaattggacctctcaaatttctcatcaccttttctttgaccggtcagttcccatttcaacaattaatcaacaagctaggtgatatcatgtgatgttgagtgccttgtcaactgcaactactactggagttgggtatgaatccacacaagccaagaagctgatctcaaatcaatgccacttgtgatgcacgaggaatgcttttgttttcctcccttctttattttttcttttggtcaatgagtcagttatggccgtttgtgaaactttccattggctccatttgggcctcctgcaaatttccatgctctgaaactaattaataattgcttttgtaagactaaacataattaattaacatagatgagggtcataccgtagtactgatggtgatttgggagtagaccagatagcaaagatgaacatggctacaagcacccgtagtttctgacctgaactttgaaattcagttggattagttaatacagtatttgggtaggtttctttctcttgtatatctctattctattggagtatatatgagtgatatttctctgttttctctttcttccttttccattttaatttatttgtgttctgttcttttcctttggtggcactactaattaataaagacaaaggtactttgaaaagatacggagtgtatatttttttttcaaggagtggttataggttattttattttattacaattaaaagtgtcacgccagtaaaattggaacaattttgaaacatgaagtgtatctattttttaaaggagttcttattggtccatttattttattacaattgaaaatgccatgtctgcaaagttggaacaaatttgagcatcttgcatggttacacacacaggacacatatgtataaccaaagaagaatagtactagattgactacatgtctaagaatatgtcaatctcacatgggatgttttcatggtgcttgctgcttggtgaaggcaatagtggtaccttcactttaaagaaattgtggccgtaattagctgcacagtaactatcacttgccttagcaacagtttggtcaggacacaaatgatggcaaaaactgcagcagaatcaattaaactacagcatgacaagtggagcttctactatgtatgtcatgaaaaagacaagggaaagtttctgctgctatgatcatcttcaaatgccctgctctgagaagggacaagcacagaagggacttacatagagtttttaacccttcttcagagctgtcatggaagattttgcattttgagaagataaaagaaatccctcttgaaatttaaaacactgctaaactgtttattttgaatgaaaaactctgttaaactttgttctgggatatccttatgaggatgaaattacaaaacaatttttttatctgggcccaactaggagtattatgggcctgtaaatactagacaaagttttcggaatgcatatagtacttacttttcggaatgctaaaattaagttcaagcacaaaaccctctcaagaagaaattaacaatgtacaaatgcatttttagattaatccatgtagctgacaaaatatctaacttgattttttttctatgcctttttcttctaatgttttgtaagaaaaattgtcaggaaagatgtttgtaggaaacactaatgtccaattaaacaaacaagtaattaagcccctgttgctcaaatatggatatgattattctcttgaaacagaagctgatttcatccactgtgtcatgaggaaactgaagatcactgcctcctcaagaacacatgcagaaacagacaggcagacataaaagaaatgtacaccctgaggcataaattttgccaaacagataacaggagatgaacccctcttgctccctcttcactcccaacatgcgagaaaaaaaaaatcagcagcagctgtatttacacacacacacgcaaaagaggctcatatggcaccacaaaatctgatgctctcctgagcctatctccttctccatcttcttcttcttcttattgctgcattttttttctctctcgctcttttgccggagtaaactgacagaagggcagggggacggattcattggctgctgattgcagatgcatcaggcaaaaccaggactaaagctgttgtagtactaaaaactgggagaaagaaaacaaaacaaagaaagttcagtaacaaatgttgttgttcttcttcttctttcgagtgccgtgcattgcaagcgcacggtctcctcatcatcttcttgctgttcttgttgtctctactgcttcgccggggccggcgacggcgagctgccgggccacgccggcttgcgcggcgacggcggcagcagctgctgctgctgcttctgggcctccagctccgacgtcagcatctcgaacatgacctgcacatccttgtagtcgcaggtctgcacgtcctcatgtagcttcaggaggccacggctgcctgcacaccatatattgcagtttgtgattagtttttcagatgtaatggtagttcttgccagttccaggatgtatagagtcatgcttagaaaatgatcagaaataaatgagcagcaatcatgtttcagaatgtatagatgtatattggattagatgatttttcgatagatggacacttgttcattttccaatgatggtgaaaatgcatcagaaggtatatgcatttgctactgatttatgcaaggatggtgagatgaataacatgatgtatatatagaatcatgcttagaaaatgatcataaataaatgaacagtaatcatgtttcataatgtatagatttatattggattagatgatatttctatggatggacatttgttgattttccaatgatggtgaaaatgcatcagaaggtatatgcatttgctactgatttatgcaaggatggtgagatgaacaacagaaggtaaagaaaaattcatttgctactaatcaacaccctttcttcttcttctcctttttattttgagagagcaactctttttatactttttgagaggactaatcaatgcattcggtagctttccaacccagtatatggtggtttactgtatgagagccaaaccttcaatgctaaaggctaaaggcaatgaggcccatatactacaggtagatagtactgagcctttttctgatgctttgggccttgggctccacactcaacaggctgttggcccttaaatggtcatccagtagtacataactctaacgacttaattgctaatttctaaaacatactaatttgctaattctatgaaaatcaaaaactgtttgcaattatttggtgaaaacaaaaaatgtttgtttagaaatgtaaactgaacaaaaaaaaaggttaaaagagcatgtcaatgaaacaaataaggcaatacggaaaataatttttttacatgacgccaagaaatatgggtaatacattttacaagccaaggatatatactgcaaatgcaaacacttagttttaaacaaaacactcaattcaagacaggagaagagaaaggaagctaagataggtatgaaaagggagaagggatgcaagtcagtgaaaaatatccaactattatctgctgtgtaattaatggaatttccttcatctttcccaggataaacatccattttctcgtggcctgacatcacggaaactttacaccattccagatactacaacaaatggcagtatggcaccacagattgccacagcaatacggccagggagcaaataaaaaaaagaagaagaaagaaagatgcaaaagtcattggtccaataacaaattggtgcaagtcagtcataaaagttcggcttagtgatcccttgccctctgcaactttctgccaaagaaatggccaatggtctccattactttctaatttatagcaagggcttcagaagcagcaaaatctatgagaagtttcctattccctactaactacaaaaactgtaaaatttccgcgaaattcctatactccatcggagtgtctcggtaggccaagattattattgatttggatggtatatagatttgaaccacaatcccaacaaaactctaatcagctataatctacatctatccattggccgtgtacaaccctgttggatgtagaggacgggttccgatctatcatctaagaaaatattctactacatctgtccagataatttgatccagaaaatacaaagtacagaggtacacacggtgaagtatcctcctgtgtacctaagattgttgagtaaagagaggtcgacattagcatgatgctagtaaaggataggagcacgttgacatgggatcctctggaccaggtccctgcactgcactgcactgcagcaccaaggacgatctggacaacgctgtgccgactgcccccagtagtgtaggactaccatcaccaggatggaccggggaggccccacctgtaagtgtcagtggcagtgcctcacctactgcattcgcatcaatggcaggcaggcaagcaaggcaaaacgttcttcagtgcacacacacacacacggcctgtacgcctcgtgacgccacgcaaatccccaaatcacaaatgcagaacatgcaaaatgctattgctaaatgctagtattaagatcgaaatcgagtcgaaatcgaatcgagatcgtgtgtggtggggagcaagacagaatcaacagtacagagtactagagagacgctacgcaacaagatctggaagaactctctctctctctctctctctctgtccttaattccactcactcatcatcacgtaattcatccatgctggttggttactgaatctgttattctcttgttctgcatttttttttctgcttcttttcttgctctatctgcagtgagcctgcagtaactaactaactaaccaactaaactaactgtgagcattttttccaaattgtttttttagttttgttgttggcgccgcctctataggtacagtagtacatggtactctctaaataaaaaaaatatatgaaaatttattcaacaccttatctctttgctaagtttgattatcttaattgtattaactatgttggtttcttctctaattaaaataaaaaaatgttgatttcttctctaattaaaataaaaaaaatgtgcagttccaaacagaaaaaaaaagagcaagaagaggagacatgtaatgtaaccaaccacatgagcaagtttcagagtttcagcaaaaggaggtgagaaagaaaaaaaggactagtggagtaaccgtatttatcatttctttatttttgttcctttttaaggtcgcattaattagcatcatggttatatccttatcattttaaagatcaatttgcatagtcaaagatggatactcttaattaatcgaatcgcagatacatctaaattaaaaaaaagcgaaaaaaaatgaactcttaattacggatattgcacatggagatagagaaaaaaatggaacgaaaagaaaaaaagcaaagaaatcatgatcaaagaaacccctctttttcttgatgaacaaccaccaccaccaccaccaccaactcgcatggcgtcaatcgaacaaaaccgcgcatacgcataaaagattgaagagaagagacaaaaaagaaaagaaaaatcctaggaaaaaatggcacttcgcttcctccatggaagcgaggagaggacgaactccgattctccaaccccaaaagaagaagaaaaaaacagagagagaacacccgaaatgagacgagattaactaacatcacaagagaccggagatatgcgacagcgacaatccatcatcaaccaagcaaacgaacgaatcaaccaatcgattctaagattatctacgtgggatacaccgatcatggaggaggaggaggaggaagaaggggagagagagaggaaaccgcagcaacagcagcaacaaacagtatacacacaccttgcttcctcgcgcggaggcggccggagacgagcgccgcccacgcgcggcgcgcccggaacgcgaccttcttcctccacccctccatcgatcctcgccgccgccgccgccggttcgccgtcagaagcgcgtggccgccttcgtctccgctgctgtgctgggagccgcgcgcgtgtccccgatcccacggggtttttatcccctggggtttgggccgtgtgggtgtgggttggggttgggttggaccgcccgggttttagggttcatgttaatgtcattgcggtggatggatggatggagacgcggtgtggctgcaagggcttttggttgggtgcacgcacgtaacaaggatgatgattttagtttgggttatgaatttagtttgtttgtttagttaaagagaaaaaaaaactaatacgctatacgagatagtatagtgcgtgttattaaaataccatcttacggagaaggatgttcacgcttgtattaatagtgaagaggattttagtctgggtcgttagtttaatttgtttacgtaaaggaaaaaaaaatactaatacgctatacgagatagcatagacagtattattaaaataccatctgacggagaaggatgttcacacttgcattaatagtgaggagggatgtaatacgtctagaggccggcaggagacgtggtgtggctgcaagggctggtccgatgcatgcacgtaacaaggatgatgttattttttttaaaaaataaaagataaggtcaaggatgaggatttaatttgcttcgtaaaaagaaatgtataatacgcgacttgagatagcaggtcctaaaaataccatctttaagaagggtgtgcatgtttacattaaatgtgaagagtattacaatatatcagcttagctgaatttggacttatcgtgtcacttatacgtcatgtggatgacagatagctatatctctttgttgtagaaaccatttacactctcccgctgtggagctcaccatgcaatgaattttagatttttgaaagactcaataaactccaatctagaaacgtaattccttgctcaccacgtttctttctcatccgccctaaccacctctatttcaacttagaaatgttaccatgttttctttctcctattcttttggcaaattatcctgatctcttcattccgtgctaccaacttcattggttcactactgattagtacatctccgtcgtgagaaaatataggagaggctgacaaccccctaaattcctctatcatccatcgttagactctgatgattaactttcttagcaccaaaatgttagagcattggtagtaggcacaaccaattcctaattggtgtgggaaggatgacactacattgccttgattgttagttcagaatcctatcatagtggcatattacactatatgattggaactaaatacaacaccatatcatttttttgaagaaggctataccatgagtcttaaggagcgggatgtgcacgcttgtattaatagtgaagaaggctagaatatgtctggggtagtcaaatttgaactattcatttcacttatacgtcatgtagatgatagatagctatatccctcttgatgtagaaactatttactctctagttgtggggatcactcaaaataaattatgactttttataggctcaataaactcaaatttagaacctttctttcttactcgccacgtttcttcccatcctgtcctaaccacctctgttacaagtctattccaacttacaaatgttaccatgtttctctttgcttattctttcggcaaactatctcgatcgctcctctaccttatttcgtgctaccaactccattggttcactactgattagtaaatctccttagttaaaaaaacatatgagatgctagtggctcctttacgacaaacgatgttgctaacgttctctatcatccatcttttgtgatgatataatgttagactattggtagataggcacaagcatggtatggttgcaagagtttggtctggtgcacacacacatgcaacaaggattttaggatttagtttaggtcataaatttaatttgttttggaaaaggaaaaatgtaatgtgtgactcaagatagagagctttaaaatattgtcttaaggagcaagatgcacacgcttctattaatcgtgaagaaggctagaatatgtttggggtatctgtatttgaactggtcgtgtcacttctccgacatgtggatgatagatagcttcatagctatatctctcttgacttggaaaccatttcctctctctcattgtggggctcaccaggcaataaattgtaactttctatgaaggctaaataaactccatttagaaacttccttttcttgcttttccacatttcttcccaccctgtgcaaaccacttgtactacaattctatttcaacttagaaatgttaccatgtttccctttgcctattctttcgataaactatctcgattgggcctctacctgatttcgtgctacgaactccattagtctacgccatgaatttaatttgtttaggtaaagaaaaagaaaaatactgatatgctatacgagatagcatagagagtattattaaaatgccatctgacggagaaggatgttcatgctcgcattaatagtgaggagggatggaatacgtctagatgccggcaggagacgtggtgtggctgcaagggctgatccggtacatgcacgtaacaaggatattgtttttttaaaaaaaataaaatataaggtcgaggatgaggatttaatttgtttcgtaaaaggaaatgtataatacgcgactcgagatagcaagtactagaataccatcttaaagaagaaggctctgcaaacttacattaattgtcaagagtattacaatatatcggcgtagctaaatttggacttctcatgtcagttatacgtcatgtggatgacagatagctatatctcttgttgtagaaacaatttactctctctctctctctctctctctcgttgtggagctcaccaagcaatgagttgtagatttttgaaaggctcaataaacttcaatctagaaacttacttccttgctcgccatatttctttctcacaccaccctaaccgattctattccaacttagaaatgttaccatgtgtttttacctattcttgcaacaaattatcctcatctctcctctacctgattttgtgctatcaacttcattggttcactactaattagtatatctttgtagtgagaaaatataggagaggctgacaaccccctaaactcctctatcatccatcatgattaacttccttagcaccataatgttagagcattgataataggcacaaccaattcttaattggtgtggaaaggatgaaactacattgccttgattgttcgttcaaaatccttttcgtagtggcatgttacactatatgattggaactaaattcaacaccatatcattcctttgaagaaggctataccataatgtcttaaggagcaagatgtgcacacctgtatcaatggtgaagaaggctagaatatgtctagggtagccaaatttgaactactcatgtcacttatacatcatgtggatgatagatagctactatatccctattgatgtagaaattatttactctctcgttgtggggatcactcaacaataaattgtgactttttataggttcaatgaactcaaatttacaacctttctttcttactcgccacgtttctgtcacgcccagaaattcctgaatagaattccaagtagaatgtgcattaaaatccctgtctaggaccggccggggtacacaaacgataaagttgacatacagatccacgtcttacaaacatcataaaagtcttacataaatgctggaaaattaaaagataaatggagctaagccttgacttggactgcagtgggaacaccactccacaggcatcctcgacggcacggacgaagcctactcctcggagaagccaccatctgacacgtactcaaaactctggggtttcggggaaagtagggcaagactgagtacaaccaccgtactcagcaagtcataccggaataggggtatgatgcaggatataaccaaaggatagctacagcggttcatttgcataaagcgagcatttaaaggcagcagttgaaagcagtaaaacagttgtaataattcatcaatcttaaccatccactgttcaacgctaccccacgttgcaataggcctaaccatccgcctgaactaatcaattccattagactaagctagggtgagactaatcacggtgaatctggttgaccgcccgtaaccgcgggcacgggtattcgaatagttttactctgatcagaggtgtacaactgtacccacaagacacagccctgcgacacgttaccgtgctccgatatgccaccacgacataccggaaagggaccatgacaggacccttcgcataaccccctctagccaagcacaccacacctcaggtttcacccccgtccccagcgggcaacgggcggtcccctctcgtgcctaggtgaatccggaagcgacagaggccatcgcagggcccgccccactccatcacgcccaccattgcctagatgcgtcaacgagagggaagctacactataagcccagccgttgcctacgctggcttgtggtaagtacgataagttcttccagggcatcccgcgaaccggtccttaagtgccatgggcgcgaccatcgaaaccatgcacccacagcccaccatttaatatattttaattaaccaacaccggagcggtgtcattaaccaacatcattactagaatctgatatctatgcattaatgtaactcccccattgtgtgctagttgaactaagcatggctaagcaatccctagtccaatatctagtcatgttatatcccaagctaacaaaggagcatggtacaaaaatagcatggctataacagtaggtaaacatcccatagtaacattataaaacaatgcagtatttaagggaaaacgatagagcatttgcaatataggatcaacatgttcaagtgataagcatgacttgccttgctccgctgctggaggaacctcggcgactatttcaaagtacaccggagcgtcgggagagccgaaatctaagcgacatacaaagcaaacaatacaaacaggccataagactactgaaacagagaaaaaaaaaccatttttaatggattctatgcatttttcttgatttaccgagacttgaatgggcttaaacggagctcggatgaattagatatgaattttagaagattcactgtgtttttactataaatagaaaaatccttaattgatttattgcgcaataattaaaatcgcggggagagagagggggcggcgccgacatgcaggccccatatggcagtgactcgggtggcggtctgcggtggaccgggtccacggaccggggaaggagcggcgcaccacgtggcgctgacgtggcgccgacgtggcgcacacgtggcggccacgtggcagccacgcgagcggccgaaccgacggccccgatctaccctcagcggcgggtgcgcgcggccggcgcgtacgggcggctcaagccggcccggcggccatggcgcacggcggcgctaccgcggggcgacgacggcaaacggcggtgaccgacggcgagcgacggcggtgtgaccccgagcagcaaggggcagcggcgctaggaggagaggggaaggacgacggggttcttaccgaggattcggccggcatggaggggcaacggcgaacggcggcgaggaatgaccaggaggcgacgacgaacggcggacggtctccggaaccacctagcgggcatgatagagagagagaggaggatggaagagggcaaggacgccggccgaagccggcggccatggcggtgctcaccggcacatgatgcggagtgggttccggcggcggtttccgacggaggagaggtggacgggacggcctgcacgacggcgaacgcaatggcatcggcggcggttgcgggatgcggcggcgccggctggaggtaggagacgggcccgacaggtgggccccacctgtcggcgacctgaagggaggagggaggaggcggccggctgctggaacttggccttcggccggcccagcggggaaggggaggggaagagaatgggtcgacgacccattcaaaaaggaaaaggagggaaaagaaaaagaaaaagaaggaaatgaatttccagggattaaatattgcttgtgctcatttttaaatgattaaaattatttctagagctctaaaaattccactaaaaatcttgttagcacatttcggcatgtagaactcaagaaaaattccacatgccaattccaattattatttgcattaatttattagggtttcgctattgcttttacaccggtattttcttgaggccatttataaattcaatttaggcttgggaaaagaacttcagggtatgacaaacctacccccttaaacggaatcttgaccccgagattcggaagagctggtgaagaggtgcggatgggcggccttcaactcatcttccctttcccaggttgcttcttcctctgagtggtggctccactgaaccctacagaacctggtgaccttgtttctagtcctcctttcactggtatcaaggatgcgaactggcttctccacataagtcagatcttcttggatgtcaatgtgctccgaattggcttgttcttcgggtaaactcaaacacttctttaactgggacacatggaacacgtcatggataccgatcatgttggatggaagttctagctgataggcaacttctcctcttcgttccaagattttgtatggtcccacgaagcgtggtgccaacttgcctttcgtctggaaacggtgtactccccggagcggagtgacacggaggtacatataatctcctgcttcaaaagtgagctctcttcggcggttgtctgcgtagcttttctgtcgagactgtgcaattctcagcctctctctgacggttctgactttctcctctgcttccgttagcacttctgttccgaacagttgacgttcgcctatttgatcccagaagagaggtatgcggcacttccggccatacagcgcttcgaacggtgccatttgtagactggcctgatagctgttgttgtaagagaattcagcataaggcagacttttatcccaagctccgccaaaatcgagcgcacaggctcgcaacttatcctccaagatctgattgaccctctcggtttggccatctgtctgcggatggtaagctgtgctgaaattcgaacgggtacccaattcctcttgcaacttctgccaaaattttgaggtgaattgactccctcgatcagatactatctttttgggtactccatgcaaacacatgattcttgagagatagagctctgccaaccttttgcctgtataagtagtatgcactggaatgaaatgagcaactttggtaagtcgatccacgactacccagattgaatcgtggcctgatgatgtcgtgggcaggcctgttatgaaatccattccaatctcttcccatttccattctgggatttgaagaggttgtaacaatcctatgggcctctggtgttctgccttgacccgctgacaaacatcgcagagtgcgacgaattcagctatttcccttctcatgctggcctaccaaaatttttctttaagatcttggtacatcttggtactgcctggatgaatggagtactgagtctgatgagccttggtgagtatcagatctttcagctctttgtcatcaggtatgcacaatctttctcccagccagattgtgccatgttcatcttcaagtaaatcccgggcttttccgaccctcatattctttttcagttcagctatctcaggatcatttacttgagctgctcttacttgatccacgagcgtaggccgtgcctttagagcagccacaaacccgtgttctacgattcccaagttgagatgttcaagctcctgctgcaattccttacacatgccttcggtgcacaaagcattgcagtagctcttcctgcttaatgcatttgccaccacattggctttgcctggatggtagtgaatgctcatgtcataatctttgattaactccaaccatcttcgctgtcggagattcagatcaggttgggtgaagatatatttcaaactcttgtgatccgtatatacttcacagcggttgccaatcagatagtgcctccagattttcaaagcatgaaccaccgctgccatgtgttggatagtttccttcatgcggacgcaactgccgcgaggcataagcgaccactctgctctcttgctttagaacgcatccaagcccgtgacgggacgtgtcgcaatagacttggaagtctttcgtctgatcgggcagaatcagaactggagcaggtactaatttcttcttgagctcctcaaaactcttgtcacactcggctgtccacctgaatttctcgtctttcttaagcaactgagtcataggtctggcaattctggagaaattttcaatgaaccgacggtaataacccgcaagtccaagaaaactccgaatctgtgacacggtcttaggtggggtccacttggtaactgactccacattcgatggatagactgccacgccctgagctgtaatgacgtgacccaagaatttgacctctgataaccaaaagtcgcatttgctgaacttggcataaagctggtgctcctgcaacttctcgagtaccagacgaagatgttgctcatgctcttcttccgacttggaatagattagaatgtcatcaatgaataccacaacaaacttatccagaaattccatgaacactttgttcatcaggttcatgaagaaggccggtgcattcgtaagtccaaaatacataaccgtgcactcatacaacccataccgagtggtgaaggccatcttgggaatatcctcttcctgaattctcaattggtgatagcctgatcgcaggtctgttttagaaaacaccttggctcctttcagctgatcaaacagatcatcaatccgcggcaaaggatatttgttcttgatggtgacctcattgagtgtgcgataatcgacgcacattctcttcgtcttgtccttcttctccacaaaaatgaccggagcaccccaaggtgaagtacttggtcgaatgtaccctttctgcaactgctcatcaacctgcttcttgacctctgctagctcgttggctgccattctgtacggcctcttgtaaattggggcagtccccggtgccaaatcaatctggaattcgatctccctcttgggtggcatggtagtgaggtcctcagggaacacctctggatactcgccgactatagggatatcttccaatttcctcgaactcttctcctcggtgaccatcggattttccacctcaatctgatttaaggagattccctgcttcagtacgactggtgacttgtacaccactgtttcccctttctcattggtcaaggtgaccgtgcgattcacacaatcaatgacacccttgaacttggtcagccaatccatcccaagaatgacatctaggtctttggattcgagaaggatgaggttggctagaaatggtgatctttggatttctattgttacacaagggctgaattgaatcgaggtggagctattcccgggggtctgaacccgcattggtgtactaagttcttctcttattaacccatgtaccccaacaaacttctttgaaatgaatgaatgcgttgcaccagaatcgaaaagtactgttgcagggattgaggctgcattcgtttgggtgatggggagtgagaatgcacatcgttttccgcgcgcacacttcccaaactactaaacggtgtgttttttgcaaaaattttctatatgaaagttgttttaaaagatcatattaatccatttttgaaatttaaaatagttaatactcaattaatcatgagttaatggctcacctcgttttacgtatcttcccaatctcctcaatccctttctcctcaaacacaccctgagttaacaggaaacgtacccagtacgacctctggtgctacttgcgcctcttctgcggacgcgtggttaacccgagcctggacaaacttgggtccagcacgcctgggcttcgggcacttgtcggcgaagtgaccggactcaccacagttgaagcaggctcctggcttgcctccggtgtccttctttgggggaacgggtgcagtttgctgaactggcgccattggcgggcgtggggctgcgctgcggttgtgctgaccttggccatgatggctgccactgctgccggggtggaagttgcttgggttgtaagggcgatgctgtcgaacaatcatggtggtaggcccaccctgctgtccaggagtgaagcgcggtcgctggtgacttccttggttggaccggaactgtcgaaacctgaattcggcaataataaaagggggtagcgcacgagacctaaaagtggatggatgcggagacaaaggatttagacaggttcaggccctctcaatgagaggtaataccctactcctgtttggggatttgaatccgccgggtgtgtattgatctgatgatcaggttgtgtcatgccccctagagggcctcctgcccaccttatatagggtggggggcaggattacaagatagaaaccttaaccaatacggtatcggtttcctaaatctactttacaatattatcaaaccaggactttaggctgttccgtaatatataaggaaacgtaatacccgagtcatgatctattacatattccatagatataagttatcccctatgactagtcggataaccatgccgtgtgggtatggggtacccataatctccacagtagcccctgagaccttcacagtcggaaagataatcttctctcgaaccagattactccaaagccgagtgcttcaatcatctttgtcatggtctcccgagtacttttaccaaatctgaagactgtggagggctggaaaataaagtcaggtgcaccgactagatgcacctaataggtgtagcccccgacaatgtggttaattgaacaaaccaagcatatagtcaaggaataaataatccaaccaaccgagtggttttgataatcgtaatcaaccaagtgacttgatatcaatatatagcatatgcggtgtgaatcctccaaataacatgatccgagtgatataccaactgctttgtaaaatatgatgagtgatatagcaaaatagctataaagaagcttgtatattgtgaataaagaaatttccaaagtattgggcatacgccatgcgcacactgctttaacagatgtgcttaagtccctagaagacacatggtttcaccacacctggaaatatatggcatatgtggtgtaaaatccgagtaaataaactcataaaggatttaccaaccgcctagaaaatgaccacaatatataatcagcctaagccataatattggtcaataaaaatgcacacttacgtggcaaaaagcaacgatattgtatccaatcaattgctttaaaacccaaacagcaccatgactatattaaaaagtcagcggggcagctatataaagctttactgtttgacaccttttaagatgcattgtaccaactcctaaaaagttgagtaactgcggtataaaaggattttaaggtattgggcacttgatcacgcgcactttggcctaagcaaaaagtgcctaagtccctaaaagaacgtgacaggccacacctgaaaatatgggctgcagacatattaagtctaggccaaaaaatatgccttcgacaccctttaaaggatgacgcatgtaacatgctcccgagtaataaatcttccgggtaatatagaccaagtgtagctcatatgaatagcttctgatctgaatgattatcccttatgggatactccaaaataaatataataattgaatcccgactggcgcaagtattcggttgatagcccttacggggaataataattggtccagtctttgagcatagaaaatagactcatgactatgaatccatgtggaatgtatccggaacaagtccaaattggagatataatcctcacgcttgagttgatgagcccctgagcatatagcttgcccttctgtcatagtcaaaattgtctattggcaatagctgacgcagtcggcatggagatgaaatgaccaacatgaagacgaaattgctcatcagaagtaacggaagatgtcagtggtagtaaagatgacaccaatcaaatgtaatgaagttgcataaccatggaggcgaagaaaccagtcggcaacagtcaggtcagctagcagtgaagatgtaggcgcccaacaacaacgaaagaacagttggtggtgacaaaagcaaaccgacgatgaagatgtagacgcgcatcaacggtgatggcgaaatccaccaatcatgaagatgaagaaaataatcggcggcgacaaacgcatccgacggtaatgatgattagtggcaacagagatagccgactatgatgacgaagtttcccatcaacggcagcagagtaggctatgttgatgaggcttgacaagatgttgatgaagatgacgatgtcggtgatccagtcaatagcgatgtagcagccatggaagtgaagaaaccagtcggcagccatggcaaacgtaggcagcttgtgttgaagatactgatgcctattagtagtgacagcgatgtagccagccgtgaagaagatagcatcagttggcgttataacaggccagccgtgcaggcggtgacaccagtcagcggcggatgcggtggccggtcggtgaagacgtagacgcccaacaacggcagcataataggccagccgtgcaggcggaaacaccagtcggcggcggtcgaagcggccggtcggtgaagacgtagacgcccaacaacggcggcataataggccagccgtgcaggcggaaacaccagtcggcggcggcgaaggcaagccggtcggtgaagacgtagacgcccaacaacggcggcataataggccagccgtgcaggcggaaacaccagtcggcggcggcgaaggcaagccggtcggtgaagacgtaggtgcccaacaacggcggcataataggccagccgtgcaggcgaggacaccagtcggcggcgacgaaggcgagccggtcggtgaagacgtaggcgcccaacaacggcggcataataggccagccgtgcaggcaaggacaccagtcggcggcgacgaaggcaagccggtcggtgaagacgtaggcgcccaacaacggcggcataataggccagctgtgcaggcggaagcaccaatcggcagcggcgaaggcaagccggtcggtgaagacgtagacgcccaacaacggcggcataaaggccagccgtgcaggcagaaacaccagtcggcggcggcaaaggcgagccggtcggtgaagacgtaggcgcccaacagcggcggcataataagccagccgtgcaggcgaggacaccagtcggcggcgacgaaggcaagccggtcggtgaagacgtaggcgcccaacaacggcggcataataggccagccgtgcaggcggaaacaccagtcggcggcggccgaggcgagccggtggtgatgttctgactgatccattcctggagcgtaagagataagcttaaagccatgaatcccttttatgcatatctggatctggatcctgcagaacaaacatatatgatgagtagtatctgatataaatataatactcgagaaaaaatcaagtattttaaaatatttataaatatgtatttctcctcttgtcaattttgatttccccgagcagatgattcattacgtttaaacgctctgtccgactagtcatagcccccaagcatcgggagtcggcctaggcacttcccagacatgcatatgagtgacatgagttcgccattaatagaacaaagtttcacgaatcagaatttactactcgggtacttttgcaattattaagagcagaaaataaatttatctcatctctatgcttttgatttattccgaataatacttagcaccttgcgttactcggtccatccaacgggcccccgggtgctaggaatcggcccaaaggcaaccatccattggcaaaccaaacggaaagcataggaagatagaactccataactcgataggtacttttgtactcagattatgtcgcaagcaatcaagataaatattataaaaaatatgatataacatctgtagcccccgactcactactcaatggaagaccaattggtgtagtgaggcagaggaaaaggaaaaatatcatataaagaataaaataaatgatgacttagctttgtaatattccccttggtgatggcagaagtggccaatgtgggaacaaagtcgtccatcaatggtgacaaaaaacaccagtcggcgccagtgaaaccaagccagtggtgtagatgatgaagcccattaacagcggcggagtccgccaaccgtataggcgaaaacaccagtcagtggcggcagaggcaggccagcggtgaagtcgtagacacccaacagcggcggcataataggccagccgtgtaggcggaggcaccagtcggcggcgacggaggcaggccggcggtgaagtcgtagacgcccaacagcggcggcataataggccagccgtgtaggcggaggcaccagtcggtggcgacggaggcaggccggcggtgaagtcgtagacgcccaacagcggcggcataataggccagccgtgtaggcggaggcaccaatcggcggcgacggaggcaggccggcggtgaagtcgtagacgccaaacagcggcggcataataggccagccttgtaggcggaggcaccaatcggcggcgacggaggcaagccggcggtgaagtcatagacgcccaacagcggcggcatattaggccagccgtgtaggcggaagcaccaatcggcggcgacggaggcaggccggcggtgaagtcgtagacgcccaacagcggcggcataataggccagccatgtaggcggaaacaccagtcggcggcggcgaaggcaagccggtcggtgaagacgtagacgcccaacaacggcggcataaaggccagccgtgcaggcggaaacaccagtcggcggcggcgaaggacggccggtcggtgaagacgtagacgcccaacaacggcggcataaaggccagccgtgcaggcggaaacaccagtcggcggcggcgaaggcaagccggtcggtgaagacgtagacgcccaacaacggcggcataaaggccagccgtgcaggcggaggcaccaatcggcggcgacagaggcaggccggtggtgaagacgtggacgcccatgaacggtggtgtgaccaaccaaccgtataggcaaggacaccagtcggcggcgacagaggcaggccggcggtgaagtcatagacgcccaacagcggcggcataatagaccagccgtgtaggcggaggcaccaatcggcggcgacggaggcaggccggtggtgaagacgtagacgcccaacaacggtggcataataggccagccgtgtaggcggaggcaccaatcggcggcgacggaggcaggccggcggtgaagtcgtagacgcccaacagcggcggcataataggccagccgtgtaggcggaggcaccaatcggcgacgacggaggcaggccggtggtgaagacgtagacgcccaacaacggtggcataataggccagccgtgtaggcggaggcaccagtcggcggcgacggaggcaggccggcggtgaagtcgtagacgcccaacaacggtggcataataggccagccgtgtaggcggaggcaccaatcggtggcgacggaggcaggccggcggtgaagtcgtagacgcccaacaacggtggtgtgaccaaccaaccgtataggcgaagacaccagtcggcggcgacggaggcaggccggcggtgaagtcgtagacgcccaacagcggcggcataataggccagccgtgtaggcggaggcaccaatcggcggcgacggaggcaggccggcggtgaagtcgttgttgttatcagcaatggcggtggcgaagacaagccggcagagtggactcgcggccgatcgaccggaaagctgagacgcctcgagtccatgaccagcatcaatcgcctcaatagtgccgcgtaattatatgcgaacaacaacaaaaaatagcaagagattaatctgagattaaaaatcaatatgataaataatgataaaaatcagattgagtttccccctgactgatttggatcaagtcggagcttgaagaagtggtcgacggaaaggaagtgaaaactcccgaagcgaaaacgaagtcggcgactcatgaagttaattccatcgcgctcgttgataggaaactcgacgcagcccctacctggcgcgccaactgtcgaaacctgaattcggcaataataaaagggggtagcgcacgagacctaaaagtggatggatgcggagacaaaggatttagacaggttcaggccctctcaatgagaggtaataccctactcctgtttggggatttgaatccgccgggtgtgtattgatctgacgatcaggttgtgtcatgccccctagagggcctcctgcccaccttatatagggtggggggcaggattacaagatagaaaccttaaccaatatggtatcggtttcctaaatctactttacaatattatcaaaccaggactttaggctgttccgtaatatataaggaaacgtaatacccgagtcatgatctattacatattccatagatataagttatcccctatgactagtcggataaccatgccgtgtgggtatggggtacccataatctccacaggaactgagctgcctcctcttcctgtccattttgttgcgctgatcctcctggcggattgccttgtctaccagcttctcgaagtcagtgtaatccccggagatcaactggttggtcagctcgtcatccagacctgctaggaacttctcctgtttcaatgtgtcaatgtggacatcctccggtgcatatcgcgctaggcaattgaactcatggaggtactcagtcactatcctgttgccctggtggagtgcctggaattctctcttcttttgtgccacgaccccgtctagtacttgcgccttctggaagctgcgacagaactctgcacaagtaacttctgtgcctggcgggcgggtagccatgtggttatcccaccaagctgacgtgggaccctggagctggtgtgtggcgaaggcgaccttctcctgatcgttgcactgcagaagattgagcttcttctctatggcatggaaccagtcatttgcctccatggggttggtggtgctagagaaggtgggtggcctgacgcgtagaaattccggcagcttggactgagggggagggggaccaaactgctgctgctgctgctcggcttgctgctgcatcctctggtgcatctgctagggctggtgctgcatcagctgcatcatggccgccatcatctaagtctgatgggccatcacttgtgcaagagtcgggttcttggggagcggtggtggactgttgccagaggcgctgttgggatatccaccgtcggtgcgttcttcgccgttgctgccttcacctgctgcatggctgccattcctggtgttgaccatctgaaggaagagcagacggagggggtggaaaagaagaaaaacagatgctcaggaactaagctatattatataggaatttaaattgcaattgttctgatctgaattaaaacatttaaaacagcaaacaaatccttattaagacagccacatcataggcacatgatgtcgaccgtcgactgacccacaagcgaacaaacctaaacacacaaactaacaaacaaatactaagcagtcgataaactaagtgaaaacaagcctaatgctcggaacggctcctgcggtcggtggagtcgaaggcgtcctcctgctcgtcgccaggtccctctgagcggctcctggagtctggcagatacgtctcgccgttgcccggctctgagccactggaactgctgctgctgtggtcgtggctgccactgtgagtagcaggcaaccaacctccgttgccaatggctggacccctggcggctgacgctagagcgaaggagagagcggacgcgggagctgacactggaacggaagctgggactggagctggaactgcgggcgctgcgggaactgtgggaggtgctggaggagctgcgggaggaggtgggttcctgggcgcaagctgaatgcgcacgggtgcagtcgttgacttgcgaggcgtggtgcggatccggactcctccgggagcggggagacccttcagctgagcgttctccttcttctggcgtgctatctcatccttcagagctatgatcctcacaagcttcccatcattcgaggccttggatgccttgtgcaggtcagagtgcatcgtgtccattcccctcatcacggcacacatgtggctgaaggtggtgtcattctcactggccgtcgggcggaaggtgctgacgtcgtcgccacttgctcggcgagggtggaagcggtacgccgtgttgcagaagatttagctgtggcgatcacgaagcctggccatcatcaggtatgctgcctcctgacaagtgtgatctactgtgcctccagaggcctcaaccaccatgttagcgaggcaggtgcccacaaagccatgaacctccagacgaacacggtggggaagctcgccactgagcggcggaacggtcgagtactccggcgcgttggggtagcccaccaccagggtcatgcgagccaactctgccacaaaatcatccatgccttctccacggtggttgggtgggtggtcggccatctagagaagacaaagaagtaggatcaatgcatgttcaaatccaatttaaataaagcagtaaaggactcaaataaaatgaacgaatgagagcggaattttgtgcatagatcatttttgcatgagagcgaataaataagacggacttacatagcgataaaataatgagaaattagatacatactaataataccaataagagcataaataacttgcaacacatattcctgagttaggacccaatgcattcctcctatcaaatcccgactaactgtcaaataaacctcaaataattttactaaaaccctagactgacctgatttgataaatcttacttaaacgagcgaccaagatttttcccttgaactacagaaacaaatcccaattttcccagaacaaatccaattgcaaagaacatatgcaatgaaaaggattcagagggctcttaggttttccatttggcttgtcctacagtcaaggtcggctctgataccaacttatcacgcccagaaattcccgaatagaattccaagtagaatgtgcattaaaatccccgtccaggaccggccggggtacacaaataacaaagttgacatacagatccacgtcttacaaacatcataaaagtcttacataaatgcagcggaaaattaaaagataaatagagctaagccttgacttggactgcagcgggaacaccactccacaggcaacctcgatggcacggacgaagcctactcctcggagaagccaccatctaacatgtactcaaactctggggtttggggggaaatagggcatgactgagtacaaccaccgtactcagcaagtcataccggaataagggtatgatgcaggatataaccaaaggatagctagagcggttcatttgcataaagcgagcatttaaaggcagtagttgaaagcagtaaaatagttgtaataattcatcaatcttaaccatccactgttcaaagctaccccacgttgtaacaggcccaaccattcgcctgaactaatcaattccattagactaagctagggtgagactaatcacggtgaatctggttgaccgcccgtaaccgcgggcacagctattcgaatagttttactctgatcagaggtatacaactgtacccacaagacacagccctgcgacacgttaccgtgcgccgacatgccaccacgacatactggaaagggaccgtgacaggaccctttgcataaccccctctagccaagcacaccacacctcaagttttacccctgatcctagcgggcaacgggcggtcccctctcgtgcctaggtgaatc

SEQ ID NO: 4903 - DNA, 93658 bp, Oryza sativa
  unsure (1)..(93658): unsure at all n locations
agttttgttgtttagactataatagtatgaattaagtctagatatggaaattaactaggaatttacaaagttttttagagtgtatgtattactaatgtactgatgtaggatatgtaaagacattttctttttgctgatcgattttgcttaccgccccaacaataacctccaactccaacaacatatttcccttctctttttagagcagcaaagatcggtttagaatcttcagctgccttcacctgaaatttcaattgaatatactgatcaatatcaattgactcctcgataatcgtcgttgaataagctatgtaattggtgaaaacaattaccggagagtgagccatgatccattttgtaatgtttatacttgggtctccattgtaaggtcgcctttggaagaaatctggcaccacgacgtaatatcccgcttcaccaactttgtcagctattttcctgtaattgtcagcattattaaccacaaatttgattttaaattgtctttgcaatctagaatgggagtaaaaatgtaaggtgtattgaaaggaatccagttgggacgttttacaatactttcaagctaaaggaagcacttaaaattggaatgaaaaacagaaaccttagtacaatccacatgaagaaatctttgctgttataccattggaatccacgatatttttacagaaaaactgaatttctgaaattggatcgttgcttggttatccattcataaatcagctttacaaggacagcaatgagatattactattgactattgagttacgacagcgtttgcccctaaagaaatgatgttttagaaagcatgtaatgaacatagttatgcacagtaatacagtatacaatgatagtactactccttttgtttcaaattaattattgttataactttgtcccaagtcaaatatttctattttagcctattaataactagcaatttgtataatttaaatacatgtggattgcatatttggaagtatttcttattgtgaatcaaaaaacatattaaaacttatgtcatcaaaatatacattttttttaaaaaaatgattgttaaagttagaaattgttgacttaggataaaactagaactacaaataatttgtaatggaaggagtagtagatttatcttcaacttcgtagggatacagaagatgaaagttttagcatatatgttgtctaagtagagtagttaaaataatgaaattgcacattgaaagtaaatgatgtatttcaaccgcttaacatatttatatcattagaaggtcagaatatggaaaatagcaaaaatgagtatacgcttctgattctccgtatgaattgatggttactcaaaaaaaaaaagatactaactactccctccgtttattcgacgccgttaaattttttaaatatgtttaatcatttgtcttattcaaaaaatttaagtaattattaattattgtcttatcatttgattcattgttaaatatacttacatatatacatatagttttacatatttcataaaagttttttgaataagacaaacggtaaaaaatttaagtaattattaattattgtcttatcatttgattcattgttaaatatacttacatgtatacatatagttttacatatttcataaaatttttttgaataagacaaatggtcaagcatgtgctaaaaaatcaacggtgtcaaatatttaaaaacggagggagtatttgaaacggaagaaacatgtacatagcaatgttgaatattctttgttcaagctcatggatggtgagggcgaatggacgattatttgcttttacacttttgcgtgtctaaagtctaaacctgttatccttctcacaagtcactgcagaaagataggagatagttcactaaaactgacctgaacccattgtgacaagaaaaacaggtatggtacacaattaagccatatctgtctttttctttttttttaaatcagtctctttccagagttgttcaagtgtcaagtatttgtcatgccctgttctctttagattttcccccggataattgctacagattatttggtccatgctttaaaaaatattatttattctactgcattattagatatttgcaaagttcatttttcaaaatattaatttgttatgttaataaaataaacaatctgcgcctataatccagagagtgaagaaatgaagaaaattactgtcgaagatgacaacgaacaagaagctaaaggaaatgaaaagaagattttgtacctcagcaatggtgcttcaaatcctgaagaaaccaaattaacagcaacaattaacggctaatcaatcgataatcaccaaaggatggcagtgagccagtgactgatcagtaagcaaatcaggcagacatgcacacacacactactaaccaaagacgtcggaggcgaggacgatggcccggccggagtgggcggcgccgccggtgacgtaggccgcgaatcctcccaggttttggacgaccacgccggcctcgccgtcgccggcggccgtcagctccggcgggttctccaggcactgcaaccgcggagaaccagcagcgccgccgccggccgccgcggcgagcacggcgaggcagaggaggctccggtggagcatcgacgtcggtgccatggtgatgggtttagtttgcatggtaatggtcattagatgcagagggttttgtactacattttggctttagcacggtaggtagcaaaaagaagacgcacttgacatgttagtgtcgcattgatgttgcaatcctaccttttcaaattgtgccattctgtcatgctaaatctttgttacacgtggccaagttcgttcgaaagattttatctcggtttctgttagcgcgttttttaatatgttaaacggtacatctcatacgaaaacaactttcaatatagtagtggctttgaaatattagataaaactatttttttatttattttgtaagtttgaaataattaaaactcaaatgatcatacgttttctcgttttctatacccatacttaatattcatctaaatcacttccgttaacactgatttgagattggatggtagcatctcatctaaagaagatgaaactgcgccttcagtttcatttgcagaggtccctctttcaactttgattttttttcttccccggcgtttaatttggagatcttacctttctacttagagagttgagcttttgagttgaattccttccattatttgttcctcaccaccaatacaaagaatcatttctagtgttcgacactaacggcatgtcatttcctgccatcacattgtcaaattcaccacctaccaaattttaccccgaaaggaaatgggccatgcaataattctctaactcaatactgggaaggcatgttgttaaaaacttgcttcaatttccccgcaaatatcacattcgttggcactcctgtaatcctattcgtttccatgaaaattgttgagtcagagaagccatcggctggcatttagcccaacggttaagtgatgatgctgtctcgttttctcaattaccagaactcctgaatcattactttgtcaagagctacatttctaaccattgtaattaagaagtacaagatcgctgattgcacatcaacgcattatgttattatcagacacatgagatgtgctatcacaagtttatgccgcctaaccttcaatccttcagttctttccttcaagctggaaggcaggcctgccatcaccatccgccacaacaggctgctacacaatgagggcccctttgaatcaaaggatttatataggaatttcattggattcaaatcctataggaaaatttcctatttggccctttgattcaaaggattgaaacttttcaaatcctatgaaattcctatagaatgacacattgtaagtggattttggaggaaacttagcaagaggtccaacctcttggaaaaattcctttgagtctatatttctcatccgattcctgtgtttttcctgcggtccaatcaaacgatcattcctgtgttttttctgtattttgcaattctctgttttacacttcaattcctatcaggatgaatgaactgtactttttttatggaaaggcataggaagtcccgtagtagttgcatcaattaagtcagaaaaccttggccagaaagaatttaaagaaaaaaaaatctgaatattgttctcctaattacctgtgttttggagaactaaactaacaagaaaacgtaacatggatgggggacataaattacagatcgtcgggtggtggcagagtgtaagaatactttattccccacacttcttagacaaacgaggaacaaatttcgccaggcaaatgaggaacaaattgaaaggaacaaaactggaagagacttggaaaatacagtacctgcatgtcttgttggtcgtgagtcttgtcaatccatacagatctttataccaatcagtccatacacataatgtttaggtgttataacggcatcaatggatcttcttaatctttagcgagtgatgcttgccattttctgtaggattcctcttaatatatacagtgtttatagtcgtcttgacatgttcacagccatcacactccactattccaggctttctgtaagcatatcatacttgcattccatgtgagcttgcaagcaatcaagaacagccaggacattgtttacttggtggctctttgatctgttctctgccgtgaaggaataaaccttatcaccgacttctatccagctacacccaatgttcgtctttaggcctctcgccttcattgccatcctcactctggccacatcactccagcaaccaattgtggcatacagatttgctagttgtatatgagttgcagcacaacctggctcaagtttaagacggtgctctgcagcctggatgccgatcgaaatgttcccatgcaccctacaggaacccagcagagagccccatatgacggcatttggagggatagacattgtttggatcaaatcccacgcttcttcaagcaatcctgcgcgcccaagaaggtcgaccatacatgagtagtgatcgagccctggttttattccatgttcaatcattgtcttgaagcagtgtcggccttcctccacaaggcgtgcatgccggcatgaagaaaggacaccaaggaaggagagagcatcaggtactatgtgttgcctctccatttctttcagcaagtcaaggcaatgcttagcaagaccatactgcgaacatccaaagataatggcattccacgaaacaaggtccttacaggcaatgcagccaaatatgaactgggcttcatcaatacacccacactttgcatacattgacagcagggcattggaaacatgcacatacgaatggaaacccattctcatttgtaaagcatggacacttctaccaagtgctagaagtgcatgtttagtgcacacactaaaaagagtggcaaatgtgatgtcatttggcttgcaacttgaaagcatcattgatgcaaacaaatggagacatggctcaacccgattatgaagcgcaaaaccagaaatcattgctgtccatgacactgtgtttttggttggcatggtctggaaaaccaagtacgaactttccaactggctacacctcgaatataaggtgatgagtgaactgccaataaagacagttgaatcacagccaactttaaccaatagaccatgaagctgtgtgccttgggtgaacatttgcctatcagcacaggaactcatggcagctgccaaaatagattgatcagtactggtttctcctttcctgtgcagctccattatcagcataaacatgtcctcctttatgaatctagtcctggaacacaaagccgagccattatttgaaacaaagctatcaaatttagcctgtgcaggattgctgcatgagttaaaagtgacaccatttcccttgtgtatagtatgatttgattgaacccccaagatgtcattcatgcagtcatggattagtcggtgatggcatggacctcccactttgtcatagtcagcctttcttggtacaagattcaaaacttttagcgcactgttgatgttgctgccatgctggtcctttgatgtgctttgtgctgcagaagtcccatagcttgcaacaggtacacgaatagccgatgctactgctgctgacaaactgctgaaacagccacctacaagacggttgtgcataactgaagccgtccatgtgtgagccaatgagcacgattgaggagcagaaaatagcaagcaatccagagcacttaacatgtgccatggagtcccagtagagccccaaacatgtttggaagataatctgcacccgcaccttgggattaatcttgctcgctgaagaagaagcacataaatcatcaaaccaaggatagatggataagattggtaaggatagcaccatggagaaaataaaaatctaaaaggctataactaaatgaacggagagtaagattttcgatttgattcctcacagacacagcattacagcaatctaggggttccttaaaacaggagaaatcaaccaaaattcaaatggacctccccaggatttcagagttataaataaagttattgttcaaagattgataacagcaaaaaaatcaactacaaattacaacctgtgtagcaaatacaactatgcttctaaatgcaagaaaaatgtgtgatctaatcgctcgagaacagtggcggccccaggattttaaacttgtgtattcgaaatagaaaggggtaaaaaaaatttgttcatagacctaaaaacctaataattggctaattggcttgtatagtatcacaaactaataattatataatatatagcgtataattgagcataaattcacacattgatagaattgatcatcatttgaaattgtttaacatatagaatactaattagtaaacatatcaaagtgccaacatatgaaatacataaagggtagaaaatgataaattgggaagaaatcttacagtttggagatcaacttttcgttgtttgatattttggaaataagtgatgatgtccttgtctttaatttgcaagaaaaattctctttcaatgaatgtaactaaacaatcattcaactattgttgccctatcttgcttctcaagttcatacattatgatacaaagcacaaattagcatatatgatgcacagaaatatgtttgctaagtcgctagtaatctcaattaaaaaaaggttgttagcccattactagttcatccaacatcaggatcaggaacacatggatgctaaacatagaaaatcatgcgaaactgaaatctagatgcaaaacctaagtaccgaggggattcacatgagacaggagctagggattaaaccaaaccaggaggaaggatcgccggggggtgcggtcgttacctcggggctcgggacttgatttcttcgcgctgggcctcgaggcgggtagagcttgtcgtccatggccgcactgccgctgtcgcagcaggccgcgcgtcgcgccgcaatgccgctgtcgccgcaggccgcgccgcgccgctgcctcacgagtcagccgctgccccgcgccctggcgccaagccgagtggtcctcttcctgcgtcgacgcctccacggccgtgcgcccgctccgccgccaccctaggagatgctgcgccagtgcgtccagccggcagccgcccctgcctggctggctgccccgcggtcgccggctcgccgccgccgtacaccgcgcccgccgccgcaccgcacgccgcacgcagcgccccccgccgcccgtctccttgcaaagctagggttaggttagggaatttgggaattggggattttgggttagctgcctggcaggtgagtttggcttcgaaatggtcttagttgcggcccaagtagactacgggccgagtgaaagggggaggaaggtggaaaatttagacccaatagagaaagaaatggcataacgaggcccaaatgagtagtttaagtctttttctttaactttttgaatacatatatgaactatagagtatatatacctattttttgtctaaaaatcttgggtatacatctgaatacccttgaattatagctgggcccgcccctgctcgagaagttcagcgcttcagctagttggcacaaatctgcaaagcttgtaaacaagtttatacttgaggagcttaggttcttgtttgcttcaaaattttttgattttccagaccttttaaccactatggacaacagctataaagaattaaagattgtgagttgaaatggaagatgcatcagttctatttcttcaggatggaagtgatctagcattctagcctaacccaacctattcttgccaggataaaaatggcccgttcactgattcaccatctcgaattgaacaaaaaaaaaattgagtggggaaaaaatcaggattcacctgcttgctacctgaactgggaacggtgcccgccagcccaggacgccgcccgcagccgtccgccgtaggctgcagcgagcgccggcgacctagcctcgctgcatggcgtgcgtggccctttgaggcttgggccgtggacaacgccggacagagagagagagagagagagagagagaggtaggtttagcctggacaagcacgctgctccgccgctggtcggcgccccgccggctggcctcgtctggcagccgctgcgccgctcgatctgctgccgcctgcggagacgatttgatggtttggttatgggactttggccgaaacacatgcagggatgagtcggggaaaagatggcccaatgggcttaggtaattgaattttgaactccattttattcggaaactgaaactgtcagccttgctacttaactactaggcatcactgtatgtataccaccaggtgttccctttgttccattttctaagacattttatatcctcttttatttagacttataagctaggggctgatcgggagatattactgtggctatgcaactgcagcggtagcatcaccaaacccaaaaccaggggtggatccagcaatgaaaaattggggggggggggggggggggggaggctcaacctataaaagacattactcccaaaattttcaggttttcctggctcaaagcaaacataacagtacaagcaaaacgctgcattctttgattcactgtactctaaccaatcatagatctccaaccaacgttgttggaaagatctctattcaccactttgccatttgtgaggaaatgtataaccaactggttgggttgggacccttaaaacatatgccctcttcacttgatctctaatctcaaatggatactcatcaatttgcacattcctggatcactaacaatatctgagcaagtgaactagacccttgccaatttttgttgtcttatgttctcatcgtcctctgatgcagtagtactgctactgccacttgaataatagttgaacaatgttcttttcgagatgctgagattctagtctagacaaaaaaagaaaatgaaactgtgctaaattgctaatggattgaatcattccaaatttccaatcaattaatcattaatcacaattgcattgcatatttgcataaaattctaaacattacataccttgtttagttattctgcctgcctgttgctcgcctggtcctgcctcttgctcgcgtgctcccgtgacgtcgccggcgccgcccgccgccgacgccgcgcgcttccgcctgctgcctcgccggtaggggtgaaaacggttcggaatttttccggattccggacctgttttcggaaacggaatcagccggtcggaattttttcggaatttcacggaaacggaatcgaaaacggaaatattttttcggaaacggaatcgaatatgataatatcagtttccgtcggaactcggaatcggtcggaaaaattccggaaagtttgtcggaatttccgaagttaaaaaggcccatccaaatagtccataattcctccccaaattcccagcccaacccaagtccctaactggctaaccctagagaggagagagagagagagatcgagagaggcggcgcatcagagatcgagagaggcggcggcggagcggcgcatccaggggtcgagtgcgccaccgctggccgcctggccgccgtcctcggctagtcggctctctcgctccgtcctcgcccccaccattttcgccggcgccaccaccacagacgacgccgccgacgcggacgacgccggccactggccacaccgtcgatgccggctacccactaaatcacggaaaaaaataaaattccaaaaagaattcaaaaaaagaaaccctagccgtcgcccaagctcgccgccacctgcccccgcctcctcgtcgtcgtcggcggcggaggtgaggaggagatggctttggcgccaccgccctaggtctccgctggggcttcacccaaggccgccgtcggattcgggcgggacgaggtccgccgccgccggatccgggcgggacgagaaccgtcgccgccggatctggcccgtcggctcctcgtcgtcgtcggcagcgacggtgaggaggagatggcggtggtgccgccgcccgaggttgccgcccactcttcgaccgaggtcgccgcccccgccaccgccagctccaggccggagcccaaggcggccgagccatgccgccgccgccgccgccagctcccgccaccgccaccgccgccctaggaggagtggagaggagagaaagagagttaaggaaagaaagagagtgaggggagaggatagaaagagagagagtggaggtaaaaatatcaggatagggagagagaagaggagatgaaaaaatttgaagcgaggaggagtgaaaaacaattaattttaaaatattaaaactttgaatcgaattttatgatattaaatgaacttgtgtgaaaaagttatcaaaaataaagttgtagaactcgttaagatctaccaattttcttttggccatttctccattcaagtttgattggactatataaagtttgaattttaaaatataagaaattcaaataatttttcgggtagtaaatgatttcaaatgggaaagttgtcaacaacaaagttgtataactcatcaagatctacaactttagtattggtcatttttctatatgactttgtttgaacagtttgaatttgaatttcaaattatgataacttcgaataatatttttaagtattaaatgatttcaactgaaaaagtcatcaataacaaagtggtataactcatcaagatctataacttttatttgggttatttcttcatccgataaagtgatttataagatcgttcacaaaatgtacatatctcttatatagtttatagactataggagatatatgtaaattttgtgaataatattactatcactttatcggatgaagaaatgaccaaaataaaagttatagatattgatgagttatacaactttattgttgatgactttttcagttgaaatcatttagtacttgaaaatattgtctgaagttgttataatttaaaattcaaattcaaattatagaaacaaagtcatatagcaaaatgatcaaaacaaaagttgtagatattgatgagttatacaactttgttgttgatgactttttcatttgaaatcatttagtatttaaaaatgttgtttgaagttgtcataatttgaaattcaaattcaaattattgaaacaaagtcatatagcaaaatgaccaaaacaaaagttgttgatcttgataagttatacaactttgttattgacatttttttcatttgaaatcatttactaccctaaaaaatatttgaattgagaggaaggaggcattatagacttctcggcgagggaggagcaaaagggctgggccggcggcccgaagagggaggaggggaaggggaagccggcccgtggagggagagagaggctgcgggctgcgggctaatagtgtatactttataccttataccatggtattttgctgtaatttttttagaatatttgttatacaaattatatgaagttatagaagaatatattttgctgttgagacttaccaattagacttcatataattgtgttttataatgaattgttgactgttaaaacttgagaattgaacttcacaaaagtttgaagctcagtttgaggggtttctgtattccgataaattttcgttaccgtatccgcaccggttcgttttcgctctgttttcggtttcgataatattcgtttccgttttcgtttccagggtttccgattccgattccgattccgaaaaaaatatggaaacgaaaatgataaaggttgtttccgtaccgtttctgccggcgcgtgctccgctgcgccgctcgtcttcacctcgccgcctgcccccgcgccgctcgcctcttgagccgccgaacggggagctcactgccttggctgctagggattcggggccgggtactggggaattaggtagtggaaaaagtgcaccgaaggtcccttaacttgtcattgaattacaatatcgtcctccaaccgcaaaaccagatatccggcaggttcttcggtggttttttgacaaattgacccttttcaaaaacttatttcgaaactaacccctgccaaaaacttcaaccaaaactaggccgtcggctcagcgccaagcgcattggcgctgaggttggccgtgtcagcgccaacgggactggtgctgacattgtgccaccgtggcggccgggccgatcccctagctgacgtggcagctacctcagcgccaaccgcttcggcgctgaggtgcccaacctcagcgccaagtaagttggcgctgaccttggctacttagagcccggccgaggccgccccagccagttcttcctccgttttttccccagccgcccgcctagggttcgatcgccaccgcgttctcctcgcccaatctcccccaaaaacctctctaatcgaaggtgatttgtgcggcattgagtttgggatcggaagagaaggtaaacccctctataaaccctaagctccccaaagttttattggatattttgcattgttttggttgtagacgtggtttgataatagttggctaaggatggattattagatggataatatgggtggggatgaagtgtggaggtggcatatctttatctatttggttgttattgatacatttgacaaaatatatttgggatggatgtttggtgatgcactagggtttgatgggagatggatgtgtggtgatggcctaggatgtgggatggatttgtggtgattgagagggtttgaaaggggttgatgtgtggtgaagggtaggtaatttgtaggagtagagtttttttttatcaataatgtgtagtatttgagtaatgtacttatttattggaaaaattatacatgttgttagcttttgaagtattggtattgcaatggtaattacatattattttcaagtaattaatgtttatgcatgggttaaaaattgtagatggatagattggtccggcttcattatggtggttgtgtggtagatgaaagtacacatggaagccaatttgagggaatgacagttagacaattagtgttttttgcgaagcctacctttgaggagttaatgtctcgcatcaagcatgaattggattggaatgatgagtcggttggtatgcaagggagatacgatgtgggcggcggtgtcatgtcacataaatttatgttagacttgaatggagagatcgaatggcaaacatatatagatatagtattggggtcacatttcaaatctcttgaggtgtttgcatggaagaaagatggtaggatagggaagaaagaacttatagagcttaatgaaagtccactcatagaatcacccattagctgtcacgaactgtcggagaggtgtagtaggaaggaagaattgattgaggaagacgtggaggggggcgagggagtaaatgatatggcggatgtggaggtcagggaagagaatgacccggtaagggaggaagtacatgctgaggagaatgtgccgttaagggaagaagtacatgtagaggacaatgtgccgttaagggaggaagttaatgtggaggagaatgtgccggtaagagaggaaggagatgttgaggatggtcgggaggtaggagatgatgtggagttgcctgaggaagaagcgaatgctaagaatgtaagtatgggcctaagggagttggctaggctgaaattctatacccgagaggagtgtgaggaggctatgatacgcagtggattgaacccaggctggttggagtatgatacagaggatgaattggatgagtccgcttccgactccgatgatgatcgtccagtgcgtaagatgtcagagcatgaaaggactgtgtttgcgaaactggtgggtagaaacccggaaataacacaattcgaggatcttaccagatctggtgttggtgaaagatagcggcagacggcagcactttgttggcagaagatcttcagtgggtgattgatggaaagagaggggaggcgcagggtatagctatttcggagggagcagctcaggtggttgtgcgtggcgacgacgggggagatcctgagcggcgtagggggcggcgatgtgggaggagagcgatggctgcgtgatttggggaggtcgtggcgcggttggcgtcgccaatcttgcaaaatactgaaggaacacaaagagaatcaaatccagtatgagtaaaaacttttgaaagtgcagtgtgacagtggaattcttctgtttgaccattttagtgaatagttttaacaattgtcaggaaacatattcatctagattagagtgtttatactcaacaaaccaatgcatatggaagatcaatatgtacaaaggtatattactacaaggtttcgatggcaatccatgcagaaactaaagggaaaaagataaatcaacagaatattaagaaattagctctaaaaacaatgaggcattcatcagctgcaatgaatatcatgaaaaattgcacaaacatcaataggtttcgtacggaataacatgacgatgaaatcagaactcattcaactgcatgattgtctagggtgaactgaattttcgcctcaacttttttgcccccccccccaaaaaaaaaaaacaccctaaaggcatatcatcgagcactacgggagcaatgccacaatggtaccttctcaggagccacagtattttcgggctggaggagcgcgccacgtgcaggggggggagcacggcgggggggttggacggcgattcaaactccggttctgccgcccctgaattttctgatacggggcggcgcgatagcagctgggcggcggcgaactgcggtcggggtgaggggtcgccggcggcgtgatttgcggccttgcgggtgtgcgagagagagaggagagaggggaggggcggcggcgcgatttgcgggtgtgcgggcgatctgagagaggaggggataggggcgagaggtgagagaggagggggaacgtggcgatacgaggggcgttggcagggtttatacattccagcacggttttcgacaagttttgtactagtaccgaattttaattttgaccaaatttactgtatgatatttgaatttgtctgaaagcattcgaaatcccaatcaaaccgagccttgtcaaaacgtcgaaaaaccgcgaaaatcgatcggctttcattggctttgtaaaccatgggcgttggattagatgattatatggatcatcggatttgatataatataataaataatgaataataatataatatataataataaataaatcataggttaatagactatagtgcaacagtaaccgtgtaggcgtgtactagtcatgatgaaggaattgaacatggtgaaggaattgaacgtgttgacttgtgtaactggtggtaaatctagctatcaatttagtctactatgttgtagcgtatcgggtgaaattaagagaagaaagtgatagtactcattattgagtgaatttttttaataagtggttatagctttttaagtaaaggccaaaattttttgttccattattgaaaaaatagcaaagcccagcaggcattgagagggtagaaattagcaaccaaattcagattgcagacactcattgtattcagcctgcatacatggctgttcatgcaaatttgtacacggacaccggtaatttattctgaataaacagtcgcatgttctttcatgtatttattaagtttcatcacttcaagtgtttctgaaaccagtccagcattaaggcgagagcttgtttcccggtttcgagagcaaacgggtcgctggtgttatatcgaccggcaaatccatgggaaactcctggaaaaatcttggcgtagaaatcaatctgcaacaacaaaaatatcatggtgttactctgtattatatgctagaagaataaattgggtcaaagccacagttttttttaattgatttacaagtgccttgaacattgatggacttgttaacctgccaaatatttcagtttcagttattcagagctttcaatcctttattagaacacacataagtttttttttctttctctatttaataaaatttgccgcatgtgccgatttattaaaaaaatcccttatttattcacgatgagtcatcaacacgtggatttaacctatatgtgattgagaggatgagggacaaattagaaatcgtgtcaacttttagtggaaaatgaagattttatccgagaaaaaaaggtaacgagacaaaaacatgctggacgaaatcaaacaagaactcacatcgtttctttgacgcaaggcatgcacatactggtagactaatcttggtggtgtaactgtgtcattctggcctccaaggatctcgatgggccatttaacctctgtttatcaacgggaataattaatatgagtaaataatacagattagatcaaatgataaatattgcatagcgccaaaaagatcaacttcacctttcatatcatcagcagtcactgcgtaaggatgagagatgacaaccgcttctacctcattggttttcgctacctccacagcaaactttcctgccagataaacatgtttttagagactttaatttctatcaaacatagtataatgtggatagcaattgaggaagtttcaagaatatatgtagatataaacacataaatacattttcttttgtttgatcaatatgactcaccaccccaacaatatcctccaactccaacaagtgatttcccttcgtttcttagaaaagcaaagattgatttagctttttcagcttctttcacctgccatgcatggtcaattgaatatgctcatccctcgcaaaaaaaaattgaatatgctcatcaatatctacttgttgactcaatttcaaccttttgactcattgatatgcatcttaattttctaaaaaacagagggggaaaccctcagcttcctacagaaaccatcccttaccctccataagcatctcagacaggtcaaggactgaaggttttgttatgcaactaagatcaaatcactccttagtaggtaaatcatttgtatttattcaactaagatcaaatcactccttagcaactaagatcaaatcactccttcgtcacaacaaacttgaataaatcatttttcacataccccaaaatctaaactttaaaaggttttattttttaatgatcaaaattagctcgtattgacagcacgtgttccaaaacgaggccctatttgtttcagcttaagattattgtgatctagattattaaatcagattactataagccagattataataagctgacaaagaataagctgtgagttgtttgtttctctagattattggaggcatctaagggtagtgagtctttagctactcaataatctagaaaaagctcctccaaaggagattattaggttataataatctggtttatagattataataatctacttatttgtttcagcttactcctaataattcagattataataatcctaagctgaatcaagcggggcctactccctccgtcccataaaaaaccaacctaggatcggatttgacacatctcaatactacgaatctaaacatagtactaggatatgtcatatccggttctagattgattttttatgggatgaaggaagtatttctcggagcataagtactgtaagaacaaatcacttcagcctcgtttcagtggaccagttgccccatccatgtgtatggggtatgactttgaaattttggcctatccaaacgacggcttaagatggtgatcgagacgaattgtaccggagagtgagactcgagccattcggtaaagttcacagttgtggttgctggatctccatgaaacaaatcaggtaccacgacgtaatatccggcatcaccaactttatcagctatttgcctgtaattgtcagcatcattattatcacgcaaatgtgttctgttttccgaagttatagagaaaacatataagagcaaaaacacacacacacatacatgtgttagggacttaaggtgtgttcagaacaacattttcccaattgctaatccctcgttttccatgcgcatactgtccaaactgtcaaatgatttgtttttttcaaaagaaaattacatgaaaagttactttaaaatcatattaataaattttttaagtttttttacctaatacttaattaattatatgctaatttgccactccattttatatgctggaggtgaagggttcctaaccttcaacaccgaattcagccttacagcatctccaagagactctccattcaactctctaagctaaattttagccaacatagcaaaaaaaaaaaaatagtgctccaacagactttccgtctatatggccaagccatctagctggccaaatatggccactcaatgctatcgtctattttcctcctcccacgttctctctctacctccatcaaccatagcaacattgtcgtcctgggagccgactgtggccgtggccgagtaccctaccaaccactgactgcatgcgtgccgaagaggtcgtagccgcgcactaggtctgccgcctcaccggacttcttccaagcaccgtccctaccggttcccactgccaccctgccccgccccacgccgattcctactgctgcgggtgatgaccaccaccaccaccatctgccgctgccccttgagaccaccaccgaccccgaccccatcaccgcctagactagcgccctcctccatcgctccttcatccctctgccagctggacccgtgccattgtggccatggtagcggactagcagttgcttcgcggcatccgcacccgtggcctccactgcttcctcccccgcaccgtctccgcctccgttcatccttgtcaccgttgctttatgccctcatcgccatcaacatcccaccctccctccgtcacgtgtcaccccacggagcggcgacgtggaggaagggacgagtagctgatgcaccagggaatgtcgcggcggctacacggagggtggccatctagaggcacccttcccctccccttcgtcctctccgccatcgccagcagctgctcccaggctcccagctcctcccggctctgcagctactgctccgggccgaggaagtggcggcagcgtggagaaagggggagagacagcggtgtggagggagtggagagagaagaagaagagaagaatagagaggatgggtgaaaaagggtgggaaggtcaacatgtgggacctactgtcacagacgtagaggatgttgaagtaagtaatgaatctgatttgacaaatcagatgaagagttagctatatgagtgtttgaagagtctaatttatataatttggatagtatgttggagaaactcataggactcaccaacataggtgtgtgtttgtatgtgcgtgagtgtgtttgcttctgacttgtacatgaaaaaaaagtaggatttgtcaaaaagaatttaattggaatgagaaacttgggcaagcgttggtgcatcttccatttaattgaaataaaaacagtttaccatataaaatgaacatttttccacgccattattttctatgtagaaattaaatcagtctctttccatagcagttcatgtgtcaattttctttccatgcgattgtgacatggctacaaatcggacacccgattttatggtgaaaaagtaggtgctctcccctactacactgttgcatttttggctagtgcaaagaggagtctacccatacgcatgcaaagctacacactttatatctcattcccatatattttattttagcctccttctcgtatcttcaaactattttttcctaaattatttaccatataaacgatttgatcataccattatatttgttataattaaatttttacagtaatatcttacacgattatattttaatcaaaaaagtaatatgatttgtgctagaaaagaaaactagaaaagaggaggatgacaaagaaaatttacctcagtaacggcgcttggaaacctgaggagttaaaccaaattaacaatcacgcatgcagcagcaagcaatgaaattagcagttcatcatcagtccataatcaccaaggaatgaacaaatggcagtagtgatcactgatcagttagctagctagctcaggcaatcatatgcgtactaaccgtagacgtcggaggcgaggacgatggcccggccggagtgggcggcgccggtgacgtaggcctcgtagcccgccaggtcgtggacgaccacgccggcctcgccgccgccggccttcatgtccggcgggtgctcaaagcactgcaagcgcggcggaacagccgcggcggcggcgccggccgccgcggcgaggcagaggaggaggctcaacgaagcagttgccatatggttaatttgcatactgatgggtgagagacgatgcttgggcttttgtaacatggatttaaccggtagagtcagatgaacgctgcaatcctgcccccctttttttcttggaaaaaataaacagagtgaaactaccacactttgtaggacgtactcactccgtctcatattataatttgtttggtttttttttcttagttaaatttctttaaatttgttcgattttatagaaaaatatagtaacgaacatattaaaatatgttcaatgtcaaatttaataaaataaatttagtattgtagatgttgctattttttctataaacttgctcaaaccctgaagaattttgactaaaaaatataattaaatgactgtaatatggaacggagggagtactccctaactatttgtcattgtcgtttagaattatatgttattgtcctttcgaattatttgtcgttgtcgtttcaaggtggtccaatttaatgtttggaatatagtgagttgaaccacattcgcatcaattctacgtgtcccaagctcaagaaatatttcgaggaggatgagaaagacaacaaggataacaacgacttatcttaatttgaagataaaattaaaggaagaactacaagtgcaaacttgtgtgtcaaatgctacaagctttcaaaggaagttgagtttagcgatgaagaataatcggaaagcgaggatgataaaaaagcagatgcaaaaaggtagccatttgtaagtttatgtcttactgtaaaatgctcgtgcgttgcaacatgaaaacctacccacttaaaactgtgacaccttattacacatgtagtattccagtgaaacgtgacattgcctcatgtgaattgttatctcgtcacgctcgcttcatacaaaatgggaggtatcgaatcatatgtgttgaaatcacatcaatattggggaaaacaacaaagaaaataatatcataaacaatgactaaccaaatgtaatattattttcttatcgcccaaaaattttagaccatttaataattgagaaaattcgatcgatagcataggaaaaaaaacagtaccaaaaaatagcacaaaaatttttcgctttcgactagaagcacaggccaccggtttttcttcgctctatagcacttccgtcaggtttagagttaacagcattagattgaagtatagaaaaattttgttggacccatttgcccttcgtcttcctgtgtcatctcgtcctctcggaccggtgcccacgatgacggcgccatcgccaaactgcgacgcggcgacgatccccgtccccatccccgccgccgccatccccgtccccagccacgtgccattccgtgtctctgtcggctcccgtcgcgacgacaacagtagttgtaggaagctgtacgagccccggctggtggccatcaggctctaccaccgtggtcgggacgagcaccatgccatggagcagcacaagtggcgcttcctccagcgagctgcacccaccgtcccgctctccgacttcgtggacgtggttcgggccgtcgagcagcgtgctcgctgctgctacagcgagagcacggccatcttgaacgacgacggcgacggcttcgcggagatgctgctcctcgacggctgcttcattctcgagttctcggcgaagctgagccgcacgaattagtgcacttgcaaaaagctaattaggatttaattaattagttgattaatttgttggcgctggcgccgccatggttgcagatgctcccgatggccgccatctcatcaccgctgccctgtggagacgacacgagcgagctgagcgcggagtcgaagtgcgccatggactccgctgccgccggcaccatcatcaccatctgttcagccgccaccgcccatggcggcatcattgtcatcgtcgcgttcgccgccacagcgggcagcaatgcgcccgcacctgtgccggcgctggacgaggaggtgaaggaggagaagtagtcgcgcagcggggaagaagtgctcgtcggccatcatcgtcgtcggcggcggcgtacagcggcccacatccatccacgctcgggcagtcggggagacgaggcggtcgcccggcacgccgatggttgccgcgccgccgtccacgagggagtggaagaggagacctggtggggaatgtggggagcgaagggcaaatgtgtccgacgaaaattttctctactccgatctaatgccgttacttcaaaatgcgacggaagtgctacgtggcgaagaaaaatcggtggcctatgctatggatcgaaagtggaaactttttgtgctatttttttaccactttgtttcctgtgctatggatcgaattttctcttaataattttggtgatggtgctcaattgaaaaatgaattgaattcatgcgttacagagacaaattctcagtgagaaaatggttaataccagtgttgaattagcaaaggataccatagtttaccttgaaccatgacaatctctaaaagttaatgttttgatatcaaaagaaactgataaacatcaagcatgttttttaatcaccgggaaaaaaaaggcttgttctattttttttaaagtaaatttcagaaaactgtaactataatgataaaattatcagtttactacaatattagtgatctatttcagtttgctgcaataatagcgtgagaaattatcacaaaactattaacttttacgtgatatgctgctacagttgttacctacatgtcatgtagcagtatatcacataaaagttacagttttgtgataattttctacgctattgttgtaacaaactgaaatagaagccccctccaatttttctaagctccactgctgtgggacttccaactttctaagctccaattgcagaagtcctctctttcagtttgcatttgttccaacgttcaaatttgaagattagttttaactttgaacttgagaatacatgcatgtgcgttgggttgaattcccaccgctgagagatttccaggggaaggaatcggaaagtttcataaatcaattcagcagttaatacatcgacaagctcaattcagagaaaatcatagccaattaatcacattgacatggctggttatacttatacatggacaccggcaatttatttagatgaaaatgaataagtgcaattttctgtattttcacaaatgactatctatattgtcatttttttaatagaataatctatattgtcatttcaagtatttctcaaaccagtcaagcattaaggcaagagcctgttgagcagttttgacagcaaactggttgctggcgttatatctgcaagcaaagccatgagacacgtctggaaagatcctgacaaagtaatcaacctgcaacaaagatgcagtccattagaggcactttgtaatttgcatcttttcttaaacatcattgagtggttgtgttgaagaaaaaattagggtcttcttgcaaatatagaacaagtcaagaagatataggatattttccgaatttatggccatgtacatgtatggaactttaattgcaataatgtactagtgttcagactttagttattgtaaatttcccaaatgttcttctcaaaaacaactttccaaatgttgactaccaattagagccagcatgatcttttaatatctcatcatttctggtagatttatatcttgtctgtttaccgtttcagtttttttttttgggggggggggggttgaataaactctgtttcagttattcttgtgctttctaatatgtatttttttttacaaaatttaagatcatttggcatcaggtgccaatgaaacacaacagcaactcacctcagttgtttgacgcaacacattcacaaactggtccaccaaacttggtggtgttatatggtcattctgacctccaaggatttcaatggggcatttgacacctgtgttcaatgtgaactaagtaacaaaacaaaggctacttggatacaacttacataaaatgactagataattcgtgtatatgtagtgcaaccaattaagcatcaaatcaaaacaagttaaattcacctttcatatcatcagcaatcacctctgaaggatgagagatgacaatcgcttcaacttcattggttttggccacctccacagcaaacttcgctgtcagttgaacttgtgctgagactataatatgatctaaatctagctgtggaatctaactaggaatttgcaaaaaaaatttagagtgtaatcctaatgtactggtgtatgatatgtaaagacatttttctttcgctggttagtttcgcttaccaccccaacaataacctccaattccaataacagatttgccttccctttttagagcagcaaagattgatttagcatcttcagctgcttttacctgaaattcaaattgaatatactgatcaatatccattaattgactccacaataagcaccatatggaaaaggttttttttatgcaactatgatcattattacttggcgttttgaaacgaaccatgtaagatttcatattgatatagcattaaaaaattacaagaccatagccctaaatagttatgaatagggggaaaaaagaaacaacagtcacaccacgtgtctacaagatgtaaacttcctcctgtttggatccccttgagctattttggggctaaaaggggtgggctaaaaaatatccctaggatctaaacaccccctatgtaaacggtgaaacaaattaccggagagtgaagtgtgatccattttgtaacgtttatacttgggtctccattgtaaggttgtccatggaagaaatcaggtaccacaacgtaatacccagcttcaccaactttgtcggcattgtccctgtaattgtcagcatcagtaaccacacatcagcttgtaaattgtttttggaatctagaatgggaataaaagtagaatttgtatgagataaatttagctgggatgtcgtactatttgaagctcaaggaagcacttaaaactggaacgtaaaacatagatttcagtaaaatccacatgaagaaatcacgggtttgtcgttgtattgttggaattcaagatatttctacagaaactggaacactgaaattggatcattgtcaacccttcattgagttccgaatacgtttgtcctaaggataaaatcggataaaatctgatggctttttacttataaaactgtcagaatttttatttatttcattataatgcatagactttacatattttttgccccaaaaaaaaagttccgacttcgtttgtcctaaggacaaaatctgacggttttttacttgtaaaactgtcagaatttttatttatttcagtataatgcatagactttacacattttttgcccaaaaaaaagagttccgactacgtttgtcctaagtacaaaatctaatggctttttacttgtaaaactgtcagaatttttatttatttcagtataatgcatagactttacacataggtataatattattggcatgtacagtattttcaataatttccactgtatttgtcacttatatatatgcacgatgtgtggacttaaagtttgtgtgaacatgaaattttccattaaaattatatatatacatatatatatataaacccgcttgacatatttatatcattagcgggaggatagaatatggaaaaattgcaaaatgagtatatcacctctttaaattataaattattttaggtttgttatagatcaaacctctttaagttcgaccaaatttatagaaaaattaatatattgaacgatggttgttgaatgaaattaatttgatgttgtagatgtttctacattttttataaacttatcaaacttaatgatatttgacttaggtcaaacccaaagtggcctataatatgaagggagggacgaatagtttaaaaccatgattagtcccaaaatgatcaggaaattaaactatttgaaatgaaagatgagcattgtctaatattatttattgaaaccctgatgatggccttatgggtgatgagaactattattcacgcatgtcactgcagaaagatagggataattcagtaaaaatgacaatatcaccttttaagtcatacaattatttgtcatgtttgctctgtttattttccctcaaattcagtctctttctagagttgttcaggtgttaatttctttcactaaatttgtggagcaaatgaagaaaattgcggagcaagatgacagacaacgacgacgaagagaggaggaggaggttaaagaaattgacgaatactgtacctcagcaatggtgcttcgaatcctgaagaaaccaaattaacagcgacaattaacagctgatcactcgataatcagttgataatcactactaaccatagatgtcggaggccacgatgatggcccggccggagtggacgtcgccggtgacatacgccgggaagcctgccaggtcgtcgatgaccacgccggcctcactgtcgccgtcggccgtcagctccggcgggttgtcgaggcacggcaagcgcagcggatcggcagaggtggcagcgccgccgccgccgccgccggccacggcgaggcagaggatgctccagcagagcagcaacgaagacggcgccatggtaattaattagctctactgatcatagttgctgaagcagcttttgtacatggatttagacggtagtaggtagcaaaaggagacgcacctatgacatgtttagtgtcgcatcgacgttgcaatcctacgtccttaaccaggaatgaaataaataggtgacttggaagttttcaacttaaatttgagagttaaaagttagaatctaaagttttaaaatctatacataattatttttttaaaattttcgagttgaaagatttgaaagtttaaattagatacaaactttgtatacgtgtatatggtttttatacatcaaaagtatatacatataaaaaatttgtattatatgtacgtatgtatataatttacatacatacgtataacctttttatatgtgtatataaagttgagagaatatattttataccattgaatttatcccagtttaacgatttgccaatgacattatctctttctactatgtactgatgactctatcaattgtgataggcctctttttaaaaaatacccaaaataccttagagatatacatggttaacaattaatttatctcattagaaagtttcagaaaatatgaaattttttatatgccctccttacacaacagagaagtatgtacataagtttcaatttttttatatatttttttaaaaatatttttgtgtggtatatcatagagaaatagcttacacaaaatataagagaaaaaatcttatgttgcatatgaaagataatttatattaaaaacaacaacacaaaaaatattttatatagtatataacaaataagttatatttttaaaaaatagaaatgaaaaaaacttatatacaaacttttatacttacaggaggccacataaaagttttcatattttttttaaacttctaatgatataaatcaactgttaaccttatatgtccataagggtattttaggtaggcaccaaaatcagtcgaaaccgtcattcacacaactatgatactcgatttccactgattttgatagttgacggatactatatactccatctgttccataatataaggcacaaccattttttttggatgttctataatataaggcatgcatgcatatatacaattaattagaacctcttctccattaaattattacttttctaaatcctccaccctcaagatctctaattctattggatacatgcattatatttattagagtggtccaaattagaagatgataatagatagttgtgacttatatttttgaacggagggtttgtggtttaaggacgcgaatgaaactaaaaaacgaaacaagataaatcagcccagtagcaaactgggcctgggaaagcttcggctcgagccccacgtgcgtcgtcagaaggatggactcatcgtccttaggtcatggcccagcatcctgcatatgcctgagtcgatgatgggtaatcctcctcctccccttctcggcttctcgctcgctcccgacctctctccaccctccccaagaccggtggcgagcagccagctggggatgcgccctctctgctgccggagaatctggatccggccggcatcggcgacggcgacggcgacggcgagggccggacggccagatcgacggcgccctcgacgtggggtggagagcaggtatgccacgcacctctactcctcctaggtcgctctgcgcgctgttctttggctccgactgaatccatccggttatgagtttttgtaccatatcgcccattctgagacaacaccacctgtttattagctcgatttgattctattccatcgccaccccagggacacccaccccgactgcaatgggcagcggtagggcgtgtatccgccctaccgtttcagctgcaaaaaaaaaaggcagtgaaaagatcccctactttggggcacggcaggcgaccccctgccggccagctgcaaaaaaaaaagaaaaaaaaaaggagcagtgaaaagatccaactagactcaaatataaatgatatgtcattggcacttagccgatcggctatcatttataggtttaaatgcggtttctttgtttctgtttcttgttgattgcaggatcaaatcaactggtacgctagcatacccgaaggcgagttttgggcctgcactggagttaagcaaatctcctaggcctcgtgttttacgtcaacaataattaattgaaatatcaatttcctggaatatttaggtatttttaagtaggtatgtgtataattaaattaatttataagtaaagtaagtgtgagaaataaaatgatatgtgtcggtgatatgggcccgggggtaccaagactagatggagtaggctgcccccatcgccacgtggccctctcctgagggcggtcgggcccggggctaggcggcggctgccccctcccatgaacccgaccccctccgtgggttgccacgtgtggtgggttaagtggccgcctccgtgcgtccacttacccgtatttatggtggcttgagcgggcgtgccatgcctcatttaatgcggtgtactgcgtatccatctggtctgtgatcggttgattgactgacgagacaaggggtgtcagacgcactaccgcgcatgccaggcggcgtgtgtcttgccctgtcccatcggtcatgatgatgagaggtcttagcctcccatcacaaccggagttggctcgtctgccctgattagggcaggggttccgtttcccggtaaaaatgagaatctcaggctggtgggtccttcactgttacacgtttgtaaccaccaagcacaacgatgacgagcagtatgaatgggaacccggaagtcttcaccccataaatggcgattgataggggcgtcccccgtgtcaagcggcaagatttgatgggccccatgaccagcgcaatattcgtattgctttccaagtcaaggaacaagacatgcgtttaatacaaagaatgtaatccttctcccctaagttaggtttttgggcccatgtggtaaccccttgaggtataaaaggaggtccaggcctactgagggagaggatgagcctttttgtgtagagcgtacaccccgcctccaaaatccgcattagtctgctctacacgttgagcggacccacgttctcatggtatcccgcttacacttttgtcctcacttcgtgtaaaagggttaacccggggataccatggttggagcaccaaggcttataagcaggccctcacccacctaaacttccaaggtggtactaaactaccactacacatccacttctgggccacatgggccaaactcacactactaacaggcttcaaacgggctggggtgttacattcagcctgccttaagggctgacgccccagcagctcaccgtttacacggcagaggcccagaaccccctccggtgcagaccatggcccaaagcacatgcatcatacaacggaggtttatgctctgataccaactgtaacaccccgcctccaaaatccgcattagtccgctctacacgttgagcggacccacgttcgcatggtatcccgcttatactttcgtcctcgcttcgtgtaaaagggttaacccggggataccatggttggagcaccaatgcttataagcaggccctcacccacctaaacttccaaggtggtactaaaccaccactacacattcacttctgggccacatgggccaaactcacactactaataggcttcaaacgggctggggtgttacaccctcatcatcaacaccttctagtccaacaaggagatattgtaacttcttacaggatcagctaagcacaggagtagggtattacgcttcttagcagcccgaaactgtataaacctccgttacctcatcttcctcgagaggcccgaccccctccttttcacacttccaccacagagttcctcgaatctcaaccgctatccccggccgaactaaaaaaggaggatctcacaattccctaatagaggagttcaccctctgacaatatggttggatttaatttttactaaattaagcatgatttaataacactctttgaaattttgttgggacatcatttcagtatttatttaaataaaaatcctcatttctctccgggccattttcagcccattttatttgtcagaccgcaactgaagtctaattagcttccccaaactcctcctctcagcgcgttgtgttggacccaccggcctgccagtggcccatcaagcgtgcgcggcacaacaatgatgcagcatggcgatggaggcggcccgacacggaggcgatcagagccgtccgatctgatggatggctcggatcgcctccgcgctgctaaagattcggatcggggaaaaccctaaccctaaccatcactttctccccttctctcttccgatcccctcccccggcgacgattgtgagaatggacggcggtgactggacggtggtccggagaggtggagcacgcgtgcgacgacaagcgctgagtgcatccttttgtgccggctgggggtgtgcccgaggacggtgccaagtcgtgccacggtgtcggtagaccggcaaggtggtcacgcaagtggcggttagcgccgtgtggctcggacctcatcggcaaccacgggtggggtggggagggatggggacagcgaagccaaaaggcggcacaaggccaacgcttccaatccccggcaagggacggtggggaaaattccatggcggcgcacgcacaacggtgaaccggcacgaccccgacaaggccggtaagtttctgaaacccgaagcttacattttatgattttatttggatttgatttggatttaattagttaagatatttcaatgtcctgtataatgaggttattatggggagtggacgatatattatctgttaactcaaccgatcgctttttgtgataatggtctcgcagcaataatattattgtaggttgtccataatagtatgaatagttggactcagtggcggactcaactttgaaatatatatgggatggaaaacggagatgttcactcgataagagcaatcgaacacaacacatatcttatatcttatttatagttcaatcacaaaactgcctcgatcattgtttatggcgtacgcgtgtgtaataccccgtatattaaaagatatttaggtttttttagtttgggttgacttgttaaaataaagatgttaacagaaataaataaaagaaaaatatctttagaagtgggccaacctgagaagacccataaacccagcccattagttctcccctaaaacctagagagaggggaaccgaatcccacctcccctcatagtgccgccacccctctccctagccgtagcctccttcctcccctcctcctgtgttcgcatctctccgctctacaacaaattgctctccctaaatctccaccttcatagcttggatcaagaagcgaagtagaaaaatggaacgaggaggaggagaggagtagagggaggggttagaccgaagtctcccctattgtctcctcacaagttctctaaagaaaccctaggtgagacttatccccttgttgtatcagttgttctagcatggctttagtgctttaattcgtggttagggaaagatagagaatgagtttgggtagttgtggttcggtttgttgcggttcggtttgctgcagttctgcatatggccagatttgtagtgcttcagtatttcgatgttttgggctctaaatgtataactaggaagttgtagataatgtttggatctatcttctgaccaaagggcgcaattttatctcaagtggtttaggagatataattttttagtatgactgttgtttttgtgtcaaaatctggataatagtagattgaactgtttttagaggggttaaacagtggaatcatgtcacgcccggaatttctatccaaaactccaaacgcttacatgtgtgtaaaacctttgtccaggaatcagccgaggcacacaataacaaattgataatagagtacaattattaatctaattacgaagcgaatataaggtcattacagaggtagatagtttctctcaaacaataaagatgtaagtagcggaaaataagataaacggcgcaggagactctatcccacaagcagcatgaccagggctacgcctaatcctccacaccttcagcatcattatagaactcctcttctgatgaatgattgcaaggtgagtatatgacatactcaacaagccatgcaacaaatatgcaaatgcatgggataacaaaggatggcataatatagtctgatttgcataaatggcatttaataaatacttcagaactagtaaaacagtaaagtatttaattaaacaatattaatccatcgctatacaacatacccgttgcatagacccaaccattctgaacaaccattcctgactgcacagttctatctccaaaccaggaatataccattccaaaccaggagctaaacaaattattaggacgatgtatgtggacatccctatatccacatacattaacttaggaggggttacatcccttttagattgattctttttggatggagggagtacatgatatgctttgtggttaggatatgtcccatataatttgacgtatgcaccaaataaacaaggaagaacaaaactgattgatctcggtctcaattttagtacgtaaacataacaggaaatttactagaataacgactaactcatcataaaattacaaatagattaatgcatttgacatcttattatagacgttctgttctgtcgctttctatcattccaagatggccattatcaattcgtgtaatcaacatgttgaataaataaattttccatcttttcttataaaaagtatagtacatgcacgagctattctaaattacaacatatctgcgctcacaagtcaaagataaggtgacttgcgtttttgtcctgtcgatatccatgggcagtcacccgacaagatgatgtcggaagagcttaattatagagaaaaatgaatgattgttttttttagctagcgatgttagagtttacaattcaaagttgacatgaaccaaaattgtagttgttttataataattaatgacatgtcatatctcaacaaactgttcagtgtttgtgccttcgtggactgagggcatgagggtgggctttcctatagtcagcattactaagttttaagagcaacattgggcgtccgatgaaggagtgaaaaaatcgggcgctgacgtcagcataacgcatgcgtgcaaaccattttaaactatatttttctcttaaattatttatacaaatcatgattcgattgcaccattaaattcattgcaattaaatctttaaaacaagaccacacatgtatatattccgacgaaattatttttagcttattattgaattatttttaaatgttgcacgctgttccaccaagtatatcgaaaatgtttcactaaataaatctaaaatgtttcaatcgtttaaatcggacgttgtttcaccttatataaaaacaatgtttcagcaaatagcgaaagaatgtttcagttcactgcaatatttgatccatatatagtgaaatatataagtacactaggtgaaacatttttttatggaataaaaaaatgaaacgagttcatttaataaagggattctaaaatatgtgggtgatttattgcaaaagaatgtttcagttcactggagcatttgatccatacatagtgaaacattttgttcactgcaatattaaatctatacatagtgaaacattgtgagtacactaagtgaaatatttttggtggaacaaaaaaatgaatcgaattcccttaataaagggtttccaaaatatgtggataatttgttgcacggaggtatgtggtgganacacgtggcagttgggggcagtacacatggtggggcacgggggggagcgaccgattttgctcccctcccccctcccgccggtcgcccaacgctaagcaatttcgctaatttttacaaagttgtacaatgtttcgatcgactctatatgctacttatcataaggcagaagtcatggtccacttggcctacgggttcgtcgttcatttcctcgcacggaaaacagagtagctcattaggccataatttattaagtattagataaaaaataaattattataatatttgaaagtaactttcctatagagaatttgtgaaaaaactacaccatttattagttcgggagtgtgcgtgcaaaaaaatatacgaagtcttttaaacctggacacgaaaattgaggacgattttcacagacatgaccagttatggtgcgtctgcaatccaaaatctaaagagatctctttataagaaaatcgtttttgtaggagtgctctggacacttagtagcattagagctagccggtgcctgtccttggtggtgcctggcttctggcccttcacttcaagaacattcttgttaatttaaatctgaatttaaattaaaagaaattatgtaaatactttgattttcttaatacttcctcgttcaaaaaaaccaacttagtaccggctgtgacacattaattctagtactatgaatttgtatatgcatatgcctagatttatcgtactataatagtataataatagaatatgttacatctggtgctaaatttattttttatgggacgcagtaagtacatgttagcatttttggtaaaataatatatttatttgtcaggtagttttgcccttgacgatcaatcgtgcgcgaccctgctctctcacgttgtatggtgccccacagcgaaatcaacggttcctccatgctgcaataataataataataataataataataataataataatagtaataataataatagtaataataataatagtaataataataatagtaataataataatagtaataataataatagtaataataataataataataataataataataataataataataataataataataataaatcagcggttcctgttgctttctgtcattctaacatgccctattatcaattcgggtaatcgaaataacgttgaacaaacaaatttgccatatttttcttataaaaaggagtacatgcaggagctataaagtacgtatcacgagtctaataagttcacttttgtttgtcatgtcgatatccaaggagagtcacccgacgagataatgttggaagagcttaattatagagaaaaatcaacgattaatatattgttgttggttgaggtagcgatgttagagtttatattacataattcaacgtcgacatgacatgttgtgtactattatgggcctattcggctgcttgttttcgcagctgcatgcatggcagctagctgcaacagcaagcagcacagctgcagccgtagcactgcccccaagaatgggagccgaacagatccgatgtctcaataagttgtcctcgaatgggctaaaggcttgggtgggcttccctattgtttaaaaatattactaccatcatcattgatgataatatcactaactcggatatataacaataaataccttatgtatttaataattaaagatgtatactttctatgtacgatttatatattatatatttaaataaacgatactgcaccataagtattttgtatggtttcgttttgggcatttgcttgggtaaaactagcttggctcgactcgagttcggcttgagtctgtaccgagtccgagcctaaacaagaaaactagctcagcttgtgttgacagtactagtcccagccaggctgccgacccctctattgttcttcttcccccttcacctctttgtccagtcaaacaaccacgcgcacagtcatgtcattccaccttagttgtctcaagctgacacagtgcagtgccaaccatcgccatcagatgtgacaccagtgacaccgcctctcatccaccatcaccgaacctgcaataacctaaagcattatgatcaagtactgggatggcagtgacaaagacaagtaatgacacattaagtagttttagtattaatcataagtgtgaagtctgacttttgtgaattcatttgtatttaggcgctgcgttcattcctgcaacttgcttccatttcactggcatataaaacaagatgaggggttatagtataattaatgaagtattaattatatcaacatggaaaattgacttatttgattttttaatgatattttaatatataagttatagtaaaaaaacaaaccttttagtaggttaggaaatgaggaagttcccatttggagttgaacaaaagaacatacctttttttacctcagttatttgctgctggctagggaaaagataataattacccgctaccctatggatggcaccaaacaacaactagggtggcgtcaaagcaaaaacaaacaacccccgtagagctaaagcagatcaatccgtaggatctcctatggctttccaaaaaatgggtggaaatgcgccaattacaagatttctgtatattagaattttgtatctacatatgtatatgtataacaatataatgtagtggatatgtgaaatttttaactcacgtaactgatcaaaaagtctacatgaacaaaaagaaggagtgccaagcggtggaaaaacaagttatggctcaacatttgttagatactacctcctccccataaaatgccgcttttagccacaaatcttgacaaagaatgaaaacaatatcatgacgtagatttgtactagttgtttagtatagtaatgagattatgtctaaacgttatcatgacacagcaaattgtctagtgtttggtgccttggtggaataatagggtgaggacctggactttctcgtagtcagcgttaccatgttctacaaaataaaataaaaataacaagtagaagtataacaggagaccaagtaaaaggggagggatgttgttgtgacaaagactgtaaattacacattaattgtttttggaaaccataaatgtagagttgtcatacaatatgtattatatatacggactctacgctaatacggggatctcaccatgtgtatatattaatcatgaaattagaagtcgtcaccctctcctggctttggacagggtggaatcacaacaagggcaggaacgacttccgtcgcctgctagaacaataatgtatactttttgacaggttgtcaattcgattgaataagatttgtcaatatttgttagatactacctccgttcccataaaacgctgcttttagccacgaatcttgccagaaaatgaaaacaatatcatgacgcaaatttatactagctatttaatatagcagtgaaattatgtcttaatgttgtcatcagacagcaaactgtctactgtttggtgccttcgtggaattattgggtgaggacatggactttcccgaagtcaatgttaccaagttttacaaaataatataaaaataccaagaagaagtataacaagagaccaagtaaaaggggagggatgtagttctgacaaagaccctaaattgcacactaactgtttttggaaatcataaatgtagagttttcatacaatttatattatattgatttactctacgctaatgagggcatctcaccatgtgtatatattaatcatgaaatcagaagtcatcgctctctcttggctttggactgggtggtgtcacaactagggcatgaacgactttcgtcgcctgctagaacaataacgtataattcttcacaggtcgtcaattcgattgatggagatttggccacatttgtcagatagttcctccgtccccataaaacgctgcttttagccacgaatcttgacaaaggatgaaaacaatatcatgatgtagatttgtactagttgtttaatatagtaatgaaattaagtctaaacgttatcatcacacaacaaattgtctagtgtttggtgccttggtggaataattaggtgaggacctggactttctcgtagtcaacgttaccatgttttacaaaataaaataaaaataataagtagaattataacaagagaccaagtaaaaggggaggaatgtagttgtgacaaagaccctaaattgcacactaattgtttttggaaatcataaatgtagagttttcatacaatttgtattatatcgatttactctacgctaatgtggggatctcaccatgtgtatatattaatcatgaaattagaagtcgtcaccctctactggctttggatagggtggaatcacaacaagggcaggaacgacttccgtcgcctgctagaacaattatgtatattttttcacaggtcgtcaatttgattgatggagatttgtccacatttgttagatactacctcctttcccataaaacgctgcttttagccacgaatcttgccaaagaatgaaaacaatatcatgacgtagatttgtactaggtttttaatgggacaatttcgtttttgcccccactttaatttgtaatatttattttgctcctagtttttagtgttttcgtttttactcccacttttttgaactgaaagaggcgtttacctctggtttggatggaagttagtgggaccgggtttatggcaggaaataaagaatttttgaattagtgatttaccattttacccctgtggaagtgttaaccatatggactctctctctcctctcgctacacagcaacccgaaacctagcccgtgtcaaaaaaaaaaaagaaccgtagacctagcctaggcggcggcggaggaggagagcggccggggagaggcggcgcggcagcgagcggccggtgcctaagcggcagcggcgagtgggtgagggcgagcggcgcggtaggcggcggcgagcgggcggctgcggcggcgaaggaggggagcgagcgtcggcctggtgccgctcctcccggcgcgtgcaagagagcggccggggagagggcggcgcagcggcgagtggccatcgcccaagcggcagcagcaagtggatggtggccaagcagcgcggtaggcagcggcggaggaggaggaggaggaggaggagagcgggcgtcggccaggcgccgctcctcccggcgcgtgtaggagagtggctggggagaaggtggcgcggcggcgagcggccaacggccaagcagcagcggcgagttgttgaaattttgttgaaatttggacaaaatttttgttcaatttctatcaaaatgctgccaaaattttgtcaaaattccatcaaattcaaaatttgtccaaattgtaatgtcaagatccgtccaaatctgtcatttgattttaaacatattcacaaaaataattttccaaagccattgcaggtggccgtgcaccaccgccccagcttggcgtctcaccagccgaaaatgatcatgcgatggtcaccagcggcaaggccgggattcgtcgcccggtcgatcggctcaacctccacgccatgccactctcgctagttcctcacacatatcgtgtagctctagctgatccccactggcgcaccgctatggaagaggagtacaacgctcttctggccaaccagacatgggacctggccaaccagacatgggaccttgttccgcgtccacccggcatcaacgtcgtcactaggaagtggatcttccgccataagtttcaggctgacgggacccttgacagatacaaggctcactaggccttgcgtggcttcactcatcgcccaggtgttgattatgatgagaccttcagtccggttgtcaaaccggccacagtacacacagttcttagtattgctgtctccaaggattggcgtgttcatcagcttgatgtcaagaaagcctttcttcatggcactcttcaggaaacagtctactattcttagcccgctggtttcactgatcctaccaagcctgatatggtctgctgcctcaacaagtccttgtatggtctgaatcaagcaccccgcgcatggtacagtcggtttgccaacttcctgctcaccctaggattcaccgaggcttgctttgacacatcattgttcatatacactcgtggctctgatgtggtctatattttgttgtatgttgatgatattgtgctcaccgcctcttctgacagtctccttcgatggactatcgctgctcttcaagccgaattctccatgaaggatcttgggactctggatcactttctggggatcagtgtttgccgcacttctgctagtatgtatctcagtcagcgtcagtacattctggatattctcgatcgtgctggtatgtcagattgcaagccatgctccacgccggtagacaccaatgccaagctttctgctgttgacggtgattcagttgctgacccaacggactttcggagccttgctggtgctttgcagtatctcacattcactgacctgacatctcatatgctgtccagcaggtctgtctccacatgcatgacccacgggagccgcaccttgccgctctcaagcgcattcttcggtatgttcatggcactcttgatcatggactacacattcagcgatctcgagcagttgatttggttgcctactctgacgccgattgggcgggttgtcctaacatgaggaggtccacctcaggctatgtcgtatttcttggggataatcttgtgtcttggtcttccaagcatcagaataccttatcccgctccagcgctaaggcaaagtacagagccgtggctgaaacctgttggctccgccaactcctgaatgagttacattcacctccctccaaagctacagtggtctattgtgacaatgtcaacgcagtttatctcttcaccaatccagaacaacaccaacggactaagcatgttgaaatcgacctacactttgttcgtgaccgtgttgatgctggagttgttcgtgtgcttcatgtgcctaccacttcacagtacgccgacatcttcaccaaggggctacctagttctgttttttcctagtttcggtccagtctcaatgttcgtttcaccgacgttgcgactgcgggggaggggggttagaatatatctcgtgtatagttgtttccttctgctgatcctatccatatcgtctctctcggttttgtttctataaaccggttgagtagataaggtagggcttgtgcctatatgtactccacatcgatgtcaatctaataattgcgttgagtctattccgctttcacctgccaacccctccccagtcgtcttgttcctgtccttcatgtccatgcctagttcaaggtcacctcaccaaatcaaattatcttagtgaaggcgcttactccaactacccaaaacaactcaagcaagcacacgcaaacatgtcctttcgctcaacttggctcaagttgccagctgtacggggccagccttcgctactagatgtgacacaccacagtcacaccacctctcatccactatctattaacctgcatgacctagcacattaaatacgaagtctgacttttgtgatttaatttgcatatattcattgctaggtatggataagagaataatcacccactacctagaaggaacggaacaagaacacagcataaaagtgaaaacaaacagcccccatacaactaagtcaaactataggttgctatgggcctttcatcaatctgtaggatctcccatggctttccgagaagtgggtggcatacgctgctgaagtaccaatatgatgttacagttaacagatgaaccttatcatgaaaaataattgtactagttgtttaatatattaatgacattatgtgtaaacgttatcatcagtcatcacagcgcaaactgtctactctttagtggcttactggaattggatgaagacctgggcgttcccgtagtcaactttatattaccaattttttcaaaggaaaataataattactttctccgtttcataatgtaagtcattctagcattttccgcattcatattgatgttaatgaatctatgaatgcgaaaaatgctaaaatgacttacatcgtaaaacggagggagtagaagtatagcaaaagagaccaagtagaaggggacgggtgtagttgtgacaaaaactctaaatggcctcgttgatcgattcgcgacggcggtttcgctggcacgacgcacatagaatgatattctgttaatgagatctgcagcacatacatcaattatatcacagcggccaaaagatcagtgtttgaaaaggacgaaaaatactgaatcaaaaacatgagaaacagttgggaacttgggagggtattcgatcggctgggagttggatcatcacacagcacaaaccgggcatgctccgtctgatctaccgcccccgtctcccaccgagattcctatcacgcgcaaacccgccggctagccaaatcgcgagcgttttcggcccatatcctcacgcgcggcccactagctacaacttcttttttcttttttttcgcagcgactcagacttttttccctttaactcccgttatacgcaagtatggtctattaaacaaaccattcttttttttctcagcacaaaaaaattgaaaatctacaactttcaatgtaaattttgaaaacttttaactcaaaatttgaactttcaagttaaattttgaaaactttcatctcgaatttaaaaaatttcaacctgaatttgaaaactttcgacccaaattataaaaactttcaactcaaatattcaaaacttttgacacgaatttcaaaaacattcaactcgaatttaaaactttcaacttaggtttgaaaactttcaacttaaatttaaaaacttccaactcaaaatttaaaaactttcaactcaaattttaaaacttttcaactcaaatttataaactttcaactcaaaatttaaaaacttttcaactcaaatttaggaacttttcaactcaaatttaagaactttcaaatcaaaattaaaacttttttattctacatttgtaaagaggtgtgcgaaagattgaaaaaaaattgggaaaaaacggcgaaaaagaaaaagaaaaacgtgcccggaggcaccaaaatcggggaaaaaagtgcaaacaaaaaaataaaaaaaatacggggaggggggcagctggcatgcgcgccagctaaattgctggcgcagatgcgcgcatcagccacccccgcctcccaccgcctttgcacaaccatttgcagaactggtgctctctctcgtacgtcatcctataatccgtcacaacgctggccgggcaccaacaacgacaccccgcacagctagctcgtcgcccggccgatcttaattaaccatctagcctgttgccagatccatcgagcgatcgtgtgcgatgaccatgtgcggctggggtcgagctggacagcctgggttggatgtgggcttttacttgccggacgaaattgactcttcctaagtattgatgtactttaattttgtccaggttttttttcgaggagcgtagaagcttgcactctcaaactattattatgggagcatgtagccccctaaactattttcttctcattttatacccataaatgtttatgtggattgtctcgctcaccgagaaatctctacggtgttttttttttcactaacaatattgacattatgcaaattcttggagttgggttttgctgaaatgccatcctcacatgtggtttcattaaaatgcgatgctcaaaggatcaaggatgccataatgctagagtgccattttctatattatttgaggtgttttctcaatgtttttaccctcgtttttgtgctggcttgaccgaaatgcccctttggtcggctacagtggtcgcaacagccggtgaccaagactagatgacaagatgccttgtgctccctcaggggtgaatccactgttgtaggagtggtgtcagatgacaccaatgatttttcgctagtacatgtatcctctatcctctttgtattttatcattggtgacatcactctcagaattatttcggccaacatttgttctgattctcatccgtggacagcagccaacagaaaaaaattcatgcagctcaaccaaactcacgatgattggttgatttcttgcagccttcttcctagcctttcacgataccagaatggcattcacgcagttgtatcgcacaaacagatgtccgatgtctcgatgaggagcagctagtgtatggatgagttttcatttgctctagaccactgaatatcccaatttcgtacacacctaatttgcatacaaattttgatctcacctatgtattgttgagagggccttactcaattaatttccttaatctcacatgattatttagattcgggacatttggtttgcagagatttcaatccttcgacggattgagggttgttattctttgatgaaccactagatgctgggatataggatatctgatcttcttttagtcttctagctagtacataatatatttactttgaacatgttgtatcctgtagtttttgtctagtaatttataatttaatttttaccaattatgtcaccattgcttaaatgactgaatgtttgaattaataagttgtgttcatggttactctctgttttttacatttatcatacatataattaattaattatataagtcatgctagttgagaaccaatggtgacaccatccatctgaaattctggctcgggaactatcgccgatggcccgggcgaggggcgacaatggggtggctactgcagctatgggtggcggcagcccgcgtcaagaaggcgccggggctcgtcgactggttcctcgacctgtgtttatgcttgcggtggcagcagcagctgtgggaggaggtgcggtgtattctgggcagcggcgaggctaggttcacggagggaggaagggatcagtgcgatatgataggcatcgatcgattccctttcgtacgcacatgaaggaatagcctaggggaaaaaaggtcagtgtatgtgccaaaataaaaagaaagaaataattaaaaatggagaaaatggcataccagcaaggttaccttgtgagtggctggttgaacttaacgacatctcccccaaattcggcgcccacgattgaagattggtggatcgatttatgcaaaattacaccaaaagagattagaagacagaacttgggtgctttgataacaacctggtggaacgtgtggctagagcggaatgggaggattttcaatcatagataccggaacgaattccaagttgccctccaaattaaggaaaatattgagttatttgttaaatcgagagactagctctgctttcagttttctgagtcgctctctcttctttgtaatcttccagtttttctagcctaggcctatggcctaccaggcgtttttccttttccttcatgagacttttgtatggttttttttgttccttctaatatatccagcaaatctcctgccgttttatcgtttcaaaaaagagcaaggttaccttatttaatactggctttatttagattccaacttttttctttaaacttttaacttttccgtcacatcgaacttttctacatacgcaaacttcaatttttccgtcatattgtaccaatttcatcaaacttctaattttagcgtggaactaaacacacccactgtcattttaacaaagtcacatcgtggagtggcattacaatgtcaattttctcgcttttaccatgctttgtcttggggcatgagccatggcgctccacttgcgttgcgtgggggttctcttatacttcttctctattcaaaaatataaaggattttatgttattttcggttacttagatattaaaagaaaatatggtctcctcattcctttcatagttgattatatacttactagagacttaaaaacgatataagttatggataaaacttttatatatgtagttttaagctacttaaaataaatgctgaaaaaaataaactatattagaactgaatttagagttgactttaaagaaaatatttcaaagagaacttaaaaatcaactttaaattaagttttaaaatttaaattttggttataactgataaggtcaagatcaaacgatgagatagtaatctaaaataacttttatgatgtacaaaaaatatttttctatcaatgaggcgcacaaatggcgacttgcattgcaacgcaaccttctccagtcttatgatctccccggttcctcgaataatgagcaatgtgcaacgcctagctaagttcctattcccgaccacccagttattccgctcgagacaacaacaatggcgacattctgcaaggtacggaaaagagatgatggtatctacgtcctgacgctggccagcagcgacggccaccactatctgaccaccgaagccatcacccagctcaagcaagccctcgagagaatccgcagcaccaaggcgagaggcctggtgacgaccaccacgtcgggctccttctgcgacggcatcaacgccgtgtcggatgacgacgacgacgagccgctttcttcgttggagcgtggcatggccgaggtggtgcgcctgctgctggacctgccgatgccgaccgccgccgccgtccgcggcgacgccaggtggctgggcttcgtcctggcgctggcgcacgaccacctgttcgtgcatacggaggccgtgctgggattggccgccgctgccgacacgacggccaagccccgacggcgcccgctgccggactacgtcgtggcgctcctccgggagaagataccgtacgcgcagctgcggaagctgctcttgctcaaggcgcacgtgttcaccggcgaggagctcaaggggaactggcactcggtgcacgaggcgatccccaatcgggatcatgtggttgctgttgctgtgcagaacctccaaagcgtggttgtgggagacgggatggactacgccaaggtgaggcggaccatgtacaccaacagctgcgtggctgttgcggtgacgacgacgacgacgaccatgctgcctttcgatggatcatccaggtatatatcatagatattgatgatgattacataaaaaatagtactctttttttttctgagaaacatttttttgagcaaggatgattccattaaagttaactagaatatcttgaacatctgttaatcaacgtaacaaagcagcgtagccaacggtgtgacgataagcagtgaaatgacgccttcgggggaatccttcaactcaaggtatgcacccatgtatcaatttcaagtttaaaagctctctcacgattgaacaaaccatgcaaaaatcggtctttaatttaattttcctaaaaacgtacttctctcacccaaaatagtacttatatataataattaaaatttgtactaaaatgtaagcgctttactattcagtatactacctaaataaatcactacctactcatttagagtacctcgacacattcaaacttcttgacgtctgaccctcgacatctactgtttaacgaattgagttctatgatctttgacaatgagaagcatttgttaaacaatttatacgtgaacgcaaataaccgatgcacttattttaccattagttttgaaactatatatttctaaaactgttaaaataaggccccatcgtttcgcttgttcgggaaatgagcccaacaacatatctgcaaacgaaaataataaaaataaatctactaaaataataaaaataaaaacaataaaattttgtacatatctggaaactaaaataataatatttgtgaataaaacatttatacaagtattctttacgatttaaaaataaaggctgaaaaataaacttcaacaaaaaaaaccccaaaatcagctccaaatttcaagatgaaaattcaaattttggctgataagtataagcataaacaataaaaaaaagataaggctgtttagttttatgacaataaatctactattatatttttacattttatatcatgatcctctgacacaaaataattgacctaccattttaggacatactatttttaatagcttttgaatatataagtctttagtccatataaaaaatataaggcatatcttgtttcataaggataagtctttaaccaactattattattattattattttattttttttgtgatgcaaaattaatgttattatactttgttatacaaatgaaatgataagtgaagcaattggtggacataaaacgacttatttactttaaaatagagggaacagagggagtacgtctttactcactagttcttaaggacaaaaatgaatcaatgtgctagatctcctctaaaatcaatagaaaagcacaatacaatttgtactctcagttttgatcattgaattaattggccaggtctattccccgtcttaattaccattaattattagaacttcaatttctcttgcatgacttgcaaagctataattcaagtactacaccagtggatataagtctagctgccatagaagcctgtaccgatggattttcggaatcaaaaaaagttgggagtggtgcgtatggaaaggtttacaaggtatatcccttatgctttggactgttttctcaagtgatactagtagctagcaccagtaatagcgggaagtaactttgtatgatgtattaattacataagccaaatataatagggagtttacaacgaggaggaacttgcattcaagaagattgatggcttggccgtgcttaacgaggatcaattcaagaatgaacttaaacacctaatgagtgtccagcatagaaatatcgttcggtttgttggttactgttctcaaataaaagaaaaattcatctggcgaggaaaggaatacgttagtgttcaatatataacaagaattctgtgctttgagtatttgccaggtggaagccttgacaagcatctggatagtaagttcctacatacaattccggacatattttctgttgcgaaaatgagataattttcgtaagttctctcttttctctacattgcagaagaatctgaatctgatggatttgactggcgcacacgatacaatataatcaaggtgatttcccaaggattaaattacctccatgaattggaaaaacctattttccacttagacctgaaacctgccaatgtattgcttgatgagaacatggagccaaaaattgcagactttgggatatcaaagcatttcactggaactaaaactcacataacaatatcaaaacctacaggcacaccgtaagcgaaatctcctcttgcacctaatttattttaccctgcagttaataaatttgtgactttcttatataaactggtcatgaccttaacttccattggccccgtgcagtcgttacatgccgcctgagtatttgaataaactcgtgatctcaaataagtatgatgtattcagttttggagttatggtcatggaaatcattgctgggcctactggttatgacaacttcagtgaagcgaatgatcaagacagttttaaatatattgatcgtgtaagaaaatttatttgtctacatgacctatattttttattagaacacatagtttgcacttttcctcatgcatacaactacagcaacaattctgtttttatatcatatataggtgtataagcaatgggaaaagaggataacagcaaagtcgcacgatccatctgcagaaataaatcaagtgaaaagatgcatcaatattgcggtgaagtgtttaaatcagaacagagatgataggcccgaaataaaggctatcgtgggcgaactaaattaagctgaaagtgtgcttcctacctataattgacacatcaatcgagccagaagaaatcggcgcatgcaccgcctcccatatatagaagttgtgtgttcaactagagatactcgttatgtatttgatgagagttgttgtaacattttaaactaaaagaatttattttttctcttgtatgaattgttttataatccatttgtttttttgaagaatttccattgtctcaaccacccaagaaagccctgcatgcaatgccaaaaaaaagacacacacacacacatatatatatatatatatatatatatatatatatatatatatatatatatatatatatatatgtcatcgatctggagtcgcctaaatgcaggagcggggcagccggggcaaaatcgaggagtcacagtagtgcaggtcatccaaagcagcaggttagtatctgtgtattttatacggcaagatcgacgctcgattcctaaatttttctcgcttgcagagtcatgggagaatcagtttgtcaccgcagtccaaggtatgtcaccagaaattgatcatcttgttgcctatagagaggggttatgcatagttcgggtcatgcatgatctcagttgtggatggcaatttcttgactctgaatgcatatgctgtttatttgggataatgtatatgccgattttacacctgaagtatatgctttccatacatgggtatgtacttattttttttaaacataagtatctattgaacattgtatattctgcatttctgtggattggtatatgcttctttttcccatagagaggtatatactgactggtacatactggattggtatatactgcaattatccatagagaggtatatgctgtttttttttttcatctgtagtatgttctgaactttgcatatactgcattcctatggattggtattgaaccttgtatatactgcatttctatggattggtatatacttattttttccatagagaggtatatactgactggtacatactggattgatatatactgactggtacatactggattggtatacagtatgtactgcattttacaaagatatactgcttatttccttagacatgcttagtttttcaaagagggggcaaatacaggctgaatttgcttcacagaaatatatccttcatttttccagagaaggttatatgcagattttttaaaacagaagtacatgttgaatttttaaatacgctcaatttttctcagccttagtatttgttatatttgtgttctgaaaaataattatccgtaggctttcaaggtctcaggcacaaggggtagccttcaaaagacggctgcacgggtggtatctaggtatcggcaaagcagggtactaaatagacagaagaaagacaacactacctttggtatcaattgcaggtgccagcccaaatgcatagtgaatatcactaaagacttcgatgataggaagaaggagttgattgctgaaattggatttgatggaattttggatatcaaacttactaaggtaaacaggcagtttggggcatggcttctgagcaaggttgatccaaaatcaggcactattgttacagatttcaaccaggagttgccatttggtcccaacgatgtcaatgcagtttttggcttgccatgctcaggtcaacttattatcccttgctcacaagatgaattagacgggaagaaacaaaaattgtgtgaaatatttgagattccaaacttttcacacctgaaaatatcactcttagagagagtcctaaagaagcagtatgttcatcccatgacaatagatgaaaagagggaattcaaggcggcttttgtgtaatatgtcacaacaaagctcttggcaccgcaatcctgcgcaaacttcatatctcctaggtatattagagctgtggctgatgttgacaacataaaacagtacaactagtcccagttcgtcatagatgaggtgaagaaagcagcagaatcattgcccaaacgctttccgaatacgacgcaacaatccattaacgggtgtatcatcttcctaatggttagcactaatacctgccttcctaatgcagtatataatcaacacacatattgacattttgaagcaattgtgcaggcaaaatatttgagcaaactcgtgatacagaaggttgggatcacgagtgttaaatcatgccacatttctcagtttgaggacaatcaaattgctatgatgatccaacaagatatagtaagtaaacataatccaggatacactttccctcgttatgggaagctccaggtatgtatggtgccctaactctaatatacctatttaaggctgcaaaaaataagctaattagcaacgcatatgttcttcagttgatgaaggctccaagagaaaactaccctcaagcgccagaggtgtctcccctcaacttatcctccgtttcgaagatacaatgcagaggcaatgatggaggcgccaatttaatcaaattcctggaatcacacttcaattcgttagacgtgagtgcaatggttgggccacaggtacgtgaaccatagttacagtatgctacttcagactatatccgacaatgggattaagtataatttgtggttactatgattaaaaacacaggcctataaggagttgaaatcttacgttcaggatggattcaatcggattgatgagattttgcctagcatagcagatttcgtagacataagcaacctcaaaactgctactgaagcagcaaacatgttcaagaaagctttcaagtataatatggcagcggcagttaagatagcgacgagggcagcagttaggaatgttattgataccattgaggatatgcaagggcctctccatccatggggagacccctctgccatgggataccacacacccacgaactactccacacatgctacagaatatgaaaatatagtggagcaaccaacaggtaacgcttgactattaacaatatgaacacacaaaatccttacaaaatgtgactttaacaaatttcttacattcttcatttatcagatacccgacactgtgatcacaaatttggagcctcgcagtgcactcctacaaaatttaatggagctccaggttggtgtgctaaaagattaaaaaatcaaataaaaaacctgattactgcgtactaatcagtctcacatatccaggttcgaaagagactaattcttcaatgtcgcctacgtcgggaacacgcatgactaaccaatgttcaattatgctaattgaagaattcggaaccgacgagcagaagaagcgcaaatatactgttgaaaaccaccttctcacttgctgaaacacaaatcaaagcgtgcagttaaaccaaacaggaaactcatgtcacctttcctgtcaaaacaatgttcgactgagaggctggactccaggactactgatgaactgtattcctatgttatgtctatttctaacgaggcatcgttagagtaagtcctgttattcaactataccaagtatcacaccccacctaacctgacattcttttattctcttatggtttatttcagcacaaaatggctgcaatgttcctatccattcaggatttcattgacgctacgaaacatccaggagactataaagattgggagccgaatggattcagattctctcaaccttgctattcgaataatgttctaacaagaagttgagagatttcaaaacacaaactacttgggttggtggcatttcattaaccaagattttggggtaacattgcacacgtcaaaaaaatattcttcttttgctaatgggcattcaaattcaatgattttttttagatgtatgctgtagctggagatgaattttgggaagctagtcatcaacttgcacacttcacgggccccgaagttgtatatgatgtttcagatagtcacatggtgagtttgatttttcagtacgtaatctgtagtcttatttgtgaacaataacagagaagccatcccactaagaaacaattactttgcagatactaatacctgttcacctattcaaacattacgtgttgtacgtatttaacatggagagcaagaaggtattagtccttgattcactgaacacccaagatccactggggaatcacgtttcaccaggcatgacaagattaagatcatggtgtcccggtgcgtaatggaatgcatgcgtctggcatctccagggtggaacaaggacatactgaactgggactatgaggcagtggaaaatataccagagcagcaaaacgggtgagttactactccaccaaacagtatacaacctctccatagcttgaactgacaatacttttacaaaaacacatagggatgactgcagctttcacgtattcaataatatggtgaactgggatggtcttcgtcttgtgaactctacttcacaggtatataatggcttccaccctttgtagaccacactccaccataaagtcttcgccaataagctataacgaaaaactgtaacattcacaggacccgtactacctccggcgacaatttttgatccacctattggctctgcgtgataacgaggcaatacttccagaatatgtggtgcaccgtcttcgacatattaaatacaattagttcaacaattttatccttatagttttaccataacttttcatgtaattttcgatattcacttatgtcttcgcttgacagaatcttaaattcgttgctatgcatggacaaagaaacatctgtgttcaaatgacagttccacatacttagttatttcaatttttcgctaccccaaacaataacagtatgcaagtgtttattcaactgattgtatggcttatttttgtatctacacccaatggtaccatccatagggatgtggttattcacttaatcatccttccaaaatccccgctgccgcgctgcagcttaaacatgaactggatggagcaaaccaaaatccttcggtcctggcctaatgaagtagtacgtgtcttcgttgatgtagaaaatacaactcaaacccacgcaagtgcacataccttttccaaaggataaacatcacaaaaaaacacttccatttctctctttaaagagaaaataccatcatgtaaatgatatagattcctgttaacacacatccatttgtttccactgaagatacaaccaccaaaaatatccaattgtaaaaaattgaagcaaaatttacttaatatagtaaaaactgaccaatccaccacttccataatcataataaattgctcacagaaagcaaacgcaaacatctctcaacttaactggaaacaacttaaagcaaaaccactttaaacattcagaaggggctatacaaaactacaatgaaccatatactaaaattttctcttgtacgtagacgtccggccgcaggttcttgaattatgtcctgcttggtggcatgtgtggcaaaacctacgaggaaaaggcatttcatccgcatgatcattgtcttggttttcttcttcaacggaatcaccctcatttgctgctttactcttttcactccttacttcttttcttcttttcatgctggcagcctcaccgctagatttatacctattcacttttggccttcctctgcttcgctttctcacgggtggaagtacatcaccagtattatctccactctcttcctcactcgacatatcatacgcactgtcgacgtcagcagcgccaacatcttcatttccatcttcggataataccgttggccttgatatttgtatagttgctcgctttggggctgctccactattgtcatcgtcatctaaagataaccgacttttcatgtcttccaaaagttgattgatgactgtcattgccatcttaaatgtctgcacatctttgtttgcaacactagccacctccacagactttttattcagcattacatgtctataactcctctattgtgaagcatcgacatcatctttgtatccatgtagatgaggtggaacagaatcccgtgcattcttcgtccatcttttcaatatgtacctatctggaatttttgacaacccatactgaacaagcacctaacaggacaaaacaatgaattacaaaataatcaagaatacttcaatagaagttgcaaatgaagaaacatatacccttaaaacgtggctgcacagtatccccttatgctcaaacatcttgcaaacgcatgaaaattcctctctttccacatcatagtacacctgatattccttccgaaggaatgagctagactcttctgtgcacattcgtacaacttgcactgtgctttcgtcctccccaggtttcaccatgtatgataaactatcagttaactcctcagagaacaactgaaaaacagctctagtatatacttgggaagcatgaatctctatcggtgagcttgttttaatttcaaccttgtcctgcaccgagtgacaccaaaagatgattataataatcaattaaataagaacaacaaaaatgtcaaaatggatacttacgttactagtttggaattcctctgagtcgtccttttgcagtttctcattgaaaaaccggtcatacctcttaacaaacccgttcatagaactagagggtttcacaaacattttgaacacatggtttgcagactcacttctttgcgtagtagtcatcccagcaaagaacctatgggcaaaatatacaaacgcccatttgcgccttatgtcccaaatgtgacgcaaatatacattgttttccagttggtaatcactaatcagtttgtgccaagcagcttcaaactcatcctctgtcagtgtctgcgtgagaaccttgtgaaatgctttcttgaatgatcgacgcttcgagtagatgttccccataaattcttttgctttcttcagaacgtgccacttgcacacacgatggattgtgttgggaaatacctttcgaatggcagctgccattgaaggacagttgtctgcaataaaaaggtcaaatacttacaataagcatagtaaactttgaaatcctatcgaactctgaaaacgaccaaatacgcgcatacctgttaaaattccaataggttccttcccattcatgcagtctttgaatgtctcgaacaaccatgcaaacgattctttggtctcttctctcagcagggcacacccaaagaaggtactctgaaagtgattgtttaccccaacaaatggtgcaaatggcatattatacctatttgtcttgtacgtagtatcaaatgtaatgacatcaccaaaatgctcataattcaatctagacacagcatgagaccagaatatgttcttcacacggcaagcctcatcgagctgtatactataaaagaaattcttactccttttttgcaaatccttcaggacatttagtgtttttttgcatgtcgtcgctgcactcatcccgcctaattgcatacgctagcctatccatagcttttctcatgaatggaaccatggaagctccgccatgcatgctagacaacaaaccatacatatttgtcagactcatgctattgtccaccatctcttcaataataccccgagtcccctcatctattcgattgtgtgaatgataattctttgtaacccctatactctttttcattggatggttgtgtgcagcgacgaccttagttactgtccagcttcctgcacctttcaacctatttatcttgatcattgctgggcatccaattcgaacagaaggttctttggtatttgtgttcttcccctacagggatcaattacaaattaacacatactccatcacaaaaaactatcagttcattgccacaacaaacatactgtcataaatgttggtacctggtgtgaacaacaaatctgccgcattgttctctgcttattaacattaaggcgctctttattcagacggatcccaaatcctttactaacagcataaacattataaaaattaaaggcatctctctcagtcttaaatctttgccccaatgcgggagcaagaatattagcatcagcatactccagaggaatggcagcactgctgtcaacattatctactaccattctgaaaagattgtattcattcagtcttcagaacatacaaccaacaacatgccattaaaatcaaataaagcgaaaagaaatcaacatgagatccaaacctttccatcggtatccctgccccatctttttcagctgggtttccttcagtccaatctagtgaagggagcacacttctgtaatagagacagaaaatgattttataccactcaattccaaagtatatgatcaactgataactatgccaagaaagataccttgtcaccggagttccatgacctgaatcatgcgagccaactgtcaatgacatgtcctcctccatggctacaggactgcagaacacaactcaatatgcatcagtatcggccgattatttctacaattcagaaaatatggtatcttgatctcaccttgtctggacaccatgtgggattgaatcgccatcaggtatgccgaaggaagggttgcattcatccataataatttgactgaatcaatgatccagaatcattcttgttcacacccataaatcaaatgaaaaaaacccaacggcacatactgaaaaatcaatcatcaaatcagtataacatacctagaccctgtggtacaattgaaatcggtgtggttcttcacaacgtcatccatccaaaatcaccagctccgcgcggtggcttatactcgaccaggacggagcaaaccaaaatcctaatgaagcagtacgtgactttgacgatgcagataccgttcctcaccacccactagctgcactgacctattcttcaggtggttagttatgcattatcggtaattaatcacttttcaaattaataccacgcatcgttcggctaatgggtacatactgcgtgactctgcgtgactctgcactgccaacccgttaacaggtacagatctcaaagttaatcaatggtatgaggggagggagtatgtacacccgggtgtatataagagtcatcctatatatatatatatatatatatattatatttatatatgtttttcaatacatatacatgcataatatatatgtatttatacatatatgtatgcaaatgcatatgtatatattaaagcacttaacattttatgtgcatacatatgaccaaaatatatatttacactaaagtaaatgtgtacatatagaaaaatagacatgtattaattacaattcattatgtcctagctagcgacctatgaattgtatttccgtcgtagtagaattcacctcaggatcaaggacttgttcgttgatgaatcccatgagttgttcttgaaccgccgcgataaattccttgtgtatgagttatccctcatgcgaataacctatgaatgtatgaaattaattagtaaacaacaaatctatatgtacgtaacgaaattttgaatttatttgtacgtacaccgagctctcttgtggtgatgatttggtctgcaaggcagtggcaatactcgcacacgtagtagccacacaagttagttccctggtcttgctttgcacactatatatactgtaggaccttagattgatcaagaatcatgttgaggttctttttaccatcagaaaatctttgcaaagaacttttcaagtaagaaacctcttgagtaagagtagcacaatttttgcaagcatccaaaagacctttttgttttctacaagttgagcaagaaagcacctcatcttatttgacaatttcttccatgtacttaacacgacccaaagcatcttttaacttcatctcattagcaacacatgtcaaacaaggtttggtactatattgcttaatcctcttagagctaatcaaattaaacatcgagctagcaaacaaagcaacttgacatttatttaaagctctcttagtcaaaaacaattcatcaaccaatctagtgttcatggcaaagctaagtgcaagacaagattcaaatttccgagttttcttagattcaacatcaagcttcttggaataaacatctctaattgacttaatttcagcaaataaaacctcacaagatttgcattcatcatcatcagaaataagagatcttattctactattttcagcattaagagactcaatagtaacttcatgttgacttatctttttctcaaacttagaaattttgtaaccaagtctagcaatcacttcttgaagatattcaacactaggagtaggaattacctcattgtcatcgtcagaatactcttcaacgcttctagccatgaaacaaactccaacaacgttcttgcctttgtcatcatcttcatcacttttaaaatcagcatcacttgattcttgaacagctgcaaatgcctcatcaagtgccttctggtagaacttcttcatcttcatgttcttgaattgcttcttgttctacttggtgttcttagtgttcttggaatcatcttgaggttcttcctttggattccttccaagcttgggacaacgagctcgaagatgaccaagtcctccacaatgaaagcaacgaggtggtcctcctcttttcctagacctgagattacttacagctcgagaaattctgttagcaagacaaaccaagtcctcctcacttatttcctccagttgatcatcggacaaggcattaaaaatagaaagagctgccgtaggagaaatatccaaagaaggtccagaagaagacaccaaagcagtagatttcgaatctgttctttttgaactttttgaaagaatattcatctcataggttttcaatttagtataaagaacatccaaagtcaaagtgttcatgtcaacagattcctaaatagaggtcactttaacatcccaaaccgtcatatcaagaccattcataaagtgacgagcaatctcagattgagaatagttaacatcataagaatcatcaacagatctaagatcactcaaaattttattgaaacgccccaaataatcatccaaagattcaccagaactcatctcaaatttaatgtagtcctttttgaaaacatcttttcgcaactccttaatgtttgtagatccagtatgaaaattattcaaagctttccaaatctcattagcagctgcaagatgtgaaacacgatcaaaatcagaacgagaaatcccactgagaagaatatttcgtgctttacaattattttcaaaatcagttttctgggcaatggtttcaatacgatcaggaatctcataaactgtagcaactttcatccagatatcatagccttgagatgtaatgtaagactccatctttttcttccaataataaaaatcaactccattgtaaatatgaggtttgcttgaaaacttgtcagccatggcaacaaatctaaagaccggtaaagatcaaatagaaaaacgtggctctgataccacttgtaggatcgcacaagaccaaacaaacctaccagagggggggtgaatggtagggaagaccaaaaacccaaaaatcttttgcggaattaaagattaccctcaaacgaagtcgatgacgaagttcagtcgccgccggtcgaaccgcccacctgccgccggtcagactgccgaagccttgccggtcagaccgtccggacacctgcggtcagatcgccgctatcccgctggtcagactatgcgcacatctgcggttagaccgtcgggacccagaaacaccggtagatgataaactcgaagatgtagattgaaacttttcgactttattgcatcaactagtgtttacaaagtgcaccaacaacactcctcaccaaaatctcgaactaaactcgaaaccctaactttctctcaacttgtgtctctctaaaaccgataccaggaggcctcactctcccgctctatttatacctcaaaatcctctactcagagtaggtgtagaactcctatttacaataggacttaatccctcaatttcctttttctccacagccgcaccagccatggaaaatccagccgtcaccatgtcggactctatctacgttcgtgatcgaatccatcttcgacacatgtccttctccgtactgctcacgctcgtctcgcgtgggccgacgcctcgacctgctcggcctcccaacacttgcatggcacggcatgcatacatcacatgcacacgcatatactgctcgccacagtacacacacatatgcatgctacagtacatcgccgtactgtagcgctatatactccattccaatttcttcctgtctccttcgcgaaaaccgacgcttgcacgcacacctcatgaagcccgttgtgaagatctctcccacatggtgtctatccaccgtgtgccatctcgtatccaacttcgtcacccggtatccttgaccgtctggacctcaactcatccctgagtccagtcccgatccccaccgttgaccgaagttgatctctaaaaatcctgactctagtcatattctcacatggtatcccgactacactagacctctgctcctctctaagcatagtcccggttctcaccattgaccaaggctgacctcaagtcacctacacacaatcagacaaaacgaccgttactgggcacagatatcacaaccggacccacattagtcacacgcactcacaccaacatccacacatcttttcaaaccaattcattgattaaatcatttgcacagccaattgttcatcacaaatattaatcatgacaatgatttcatatatacatgacaaacggcgagagatctaattaatatacgcttgtatttgaattggagattcaatataaatttagagcatgtgtactcacataaaatttaaacttccgcctaagtttttctttccaattgccgcggaccaaatgacagaaccgataccaagccctacatggagtttaaagctatgattcatagtagcaattaattatatcaaaattcgtaataacattggaacttatgacattacatgtctatatgttcaaaaacctggtcaaacgtagactcttttttatccattgagtcatatacattgactacgcaagcctccaagtcgaagagtaaaaggacccagtggaatctgcaatgtgcgtcggatgcatgacatatgaaacacttagcatgtacgtacaggaatgcaatttggtaggaagaaagtaaaaactaactgtgtgttgtacggcaatagtacgaacgtcttgtaatgctgctctttcaggagatggacgagattgtcctctgtggcttgcggatacttgtcgatcattgcgacgtttattttccgagggtcgatgaatccagttcgaaaaccccccgccgtcgagccctttgaatatccattctacaacgataaaaggaagtatatattatatatggtgcacttatatacaaggacctaattaattaaaggaaacgtaataagaaatctaaatgaacgatacttacaaaatccaacaactcataatagagacgtcgagggcgtccagctcgtatagttcgtagatacccttgaaattgatccaaagaatatcttctccttgcaagaagtccatgtccctgatcctcgctccgatcatctctctaccggtggcgctcatttccacgtacggttgatggaatttgtatatctgtgtcggtagggactgcagctgctcaggcttgacaagcggtttaccgagttcgtacttgtatttcacttccgcctttgggattggtgcgcctcgtagaaattgatccgtagttagcccggtgtcagaaataaaatcttttattccaatttcttcaccggtcaccaatggctcgacctcctggtttggttgctctccaagctgagggactggtttggactttgcagaatatgctttcttaagtgttcgatcatagtccgatagctttatggcctccttggcaggtgcagacatacccctgaagaagtttctgacactagggtctataggaatcttcttttctgtaatttgaggcttcaattacctcttgacttctgctgccacataagattcaagctcctcttgcgtgcaatcgtacgccggctgcttgtttccggcggcgtcaactttcgccttcttcgttgcccttgtgcgggcaggcggtggagcttggtgggaccttgacttggaaggtgccggacgaggagcttgaggaggagtcggcgcaggagcttgaggagtcactgtagaagcttgagtaggaggagcctgaggcagagtcggtgcaggagcctgatgaggagtcggtgcaggagcctgaggtagagacggtgctggagcctgaggaggagatggtgcacgagacgccgcttgtcgcccagggaggatgatgtactgcttgcgccatagtataatggcgtggcttgtgtctcgtagatgcgtctcaccgtctcctccagggtagtccaactcgaagtcctcgtacgcggcttccaccaactcaacttcgaccttcgagtatcgtactggaattggcctgtagtggtaagtccctgaagggtctgttgggatggccattcccgatgccaccttcacgtggtgagaggttatctattagtaatcaacataagcagcaacttgcggaatggacaagtcaaaaatcataaaactatgagcataccttgattgataagttcttgaagggaatatgcaactcacatggtgtccgctgagtgatctcatcaacggggcaggtggtttcgtcctgagtttgcatggcgtccatgctctgtgatcctacctgccccgttgatgcgcagctgctatgattgcctgatgggctgaccattgcaggaggaatgtacggctagggatcctgagaccgatgtgcggccatgcgttcatccaccttccttgccacctcctcttgcatgctgagctcgtagctcgataccctgtactaaagatctgcaatctttgcctcggtatctcgcttgctcctcatccgactcctgtacgtgtggatgttctccttgaatccaatcttccaaggaatcacccctttccctcgtgttcgtcctggatgctcgggagtctgcaggttgagtgacagctcgtccttctctctgtcgggtcggaacgtgccctgagaagaggcttccactgcgttcgttagtcgactggcagcctcgtgtatctgatcgctgaagaccagggagccatcaactgggttaagcgttccaccgtgagcatagtaccagaacttcgatcgatccggccatttagcggtggccggttcgatacccctctcaaccaagcttgcctccatctcctcccacttcggcatcacgacgctatagccgcttgaccccaagtggtgatggtacttcttcttggcggcattttctttttttctgtccatcatcgcctgcccttgtttccctgtcttgtaagcaacgaactcgtcctagtgatcccttagcttcaggaatgtgttgacgtttggtgtctgccccatcaggatgtatttctggtagagatctcccttgaatctctgaaactgttctgccattttctttagagtccaccttttcactatgttctctgtacccgtaggaagggtgaatctctcgagcattgttgtccacatcatctctttctccgaatctgggaccaagctgtcatgatctccacgtgcccatgttctgcgccagtacaccgtactgacaggcacgttatcccacacaacccaaccgctgtgtcgtacttaattcttggctgcttctgccggggcactaggtcggccgtcttcgtccacttctgttgtgatgtgtcgaccctctaacttcttcgcggcacctcattgtccgcgtgccctcttctgtccagcggagggttgacttccactagcctcctctcctcgttcccctccgcatccctctccacgtaaactctaataatcttatattaaaattttagtaatgatatatgctaagtctaacattcacatatgctaagtataataatcttatattaaaaatctaattatcttatattaaaaatataataatcttatattaaaactctaacaatcatatatgctaagtttaagtgtcgtatattagaactcaaataatcatatatgttaagtctaacatcgtatattagaactcaaataatcatatatgctaagtctaagtgcgtatagtagaaccctacataatcatatatgctaagtctaattaagttttgtatattaaacctctaataatcttatattaaaactgtaataatcttatattaaaattgtaataatcatatatgctaagtctaacactcacggcgacgacgtcttttctgcaacatgcaaaaaaatgtattagtctaaatgcaaaggaacatatattgtatttcacgttttcaagtatatataatcatatatatatatatatatatatatatatatatatatatatatgctaagtttaataatcgtttaattatctcgtttgtacacgtttcgttcacgtttcaatggtgttcgttcacatttcattcacgttttgttcacgtttcattcacgtttcaatggttcgttcacatttcattcacgtttcattcacgttcgttcacgtttcgttcacgtttcattcacgttcgttctcgttaagttcacggtcgttcacattcgttcgcgtttcgttcacgttcgttcacgtttcattcacgtttcgttcacgttcggcaatgacggggcggcagcggagcggcggtgtggcggcggcatggcgttgcggcggcgtggcgaggcgggggcggcggcatggcagtggcatcgatcagcgtcgtcggcagtggcggccgtgtggacgttacgtcctcggtggtggcggccgcgtcgaagtcggggtcggcatcggcaggaggcggagtcggggtcggccgcgtcgtcggcggcggcgtcggcaacaaggcggcagcggtttggagagagagatcgagatcgagatagagagagaggcggcggcgacgttggcggcggcggcgacaacgatgaccgcgagacgacggcgagagacgatggcggcgtcggcgcggggatgccctaggctgtggcggcgaaggagaagccgagatcggagaaaaatcttctaagtgttggtggagaagacgatggcgcatcgggaatatatatacccctagatctttagtcccggttgttctctccaaccgggactaaagtctcggttggtgagaacaaccgggactaaagatattttcccactatttccaaattccttttaaacccagttagggttaagaaccgggactacagataatagcaccggatattgaatttcattacatatgtgtttctaaaatagtaaataattcattaaaattatttaaagtcaaaaaagtaatgacaaaaccttcgaaaaattattgttgtctgtattaaattaagtggataatatataataagcacatgaatgatttaaaattgttaaaaattctaataatcatatataattagcatatgcatgatattaaattgttaaaaattctataacatatgtaaataccacatgcacgatttaaaattaataaaaattctaataatcatatataattatcatatgcatgatttaaaattgttacaaattctaattaacatatgtaaataccacatgcatgatttaaaacttttaaaaattctaataatcatacataattaacatatgccataaaacaattgatttatatggatattcaatacatctaaaatagtttacatcgtgtacacaacaattacggcaatacatcggcggtgacggttgaccgcacgtactttctcctcactattgatccttccttgtgatcgctacgtgagtaaggggtatcttcatttgataggaggatgctaggatcaattgtcaccgtgaaagggggttgcccatcaaactgatcgtaatcctcgtcagtcttgtcctctactccgacgatttttttttgcctgggagaaccacgtggcgcttcggctcgtcaggccctttgcccttctttcctttgctagacatgtccttcacgtaaaaaacttgcgttacatcattggcaaggacaaaaggttcgtccgagtatccaaccttgtctaccgttgtcatcccactgtcatcaatcgttacgcctccaccagtcaacctaacccattggcactagaacagagggaccttgagaggtccatagtcaagttcccatatgtccttgatggcaccgtaatacgtgccagttgtaccatcgtgtcccatggcatcgatacgaacagcattgttctggttcgtgctcttcatgtcttgggctctcgtgtagaatgtgtacccattgatctcatatccctggaatgtcgcgatcgagccagatggtcccctcaccaggaaggccagttgttggttaatcgtctcgttacccatgagatgtcgtcgcagccacgcggggaaagtatcaatgtgatgccgtgtaatccatgcatcggacttaccgatgtttctggcgcgaactagacccaagtgctcctcgatgtaaggagccaccaatgaagattgttgcagagccgtgaaatgggttttacggaataaattgttgtctaccgtcattattgctttccttccgagagtcccctttccccgtagtctcccttcatggtgtgattcaggtaccccgattaggcgaaggtcttcaataaattctacgcagaattcaatgacctcctctgttccataccccttggcgatgcttgcctctggacgagcacggttacgaacatactttttcagaacgcccatgtacctctcgaaaggaaacatgttgtgtaggtacacaggcccgagaataccgatctttttgacaaggtgacaaagcagatgcgtcattatattgaaaaatgaaggtggaaatatcaactcaaagctgacaagacattgcaccacatcattctgaagggcttctgctaggcccctttccaaacactactttaagatcttttaccatagcaaacactgttttcccgctgcgatgtttagtcttcttacggtagtccgccttatgttcaaagtgcttgcctttcttccgtactggatggtttgcagcaaggaatcgacgatgacccatgtacacaaccttcctacagtgcttaagatacgtactttctgtttcatccatacagtgagtgcaaaccttgtacccattgttggactgcccggataggttgccaagtgcaggccaatcgttgatggttacgaacagcagcgctcgtaggttaaactcctcctgtttgtcctcgtcccacacagggacaccttccttcttccacaacagtttaagatcttcgaccagtggtcttaggtacacatcgatgtcgttaccaggttgcttggggccttgaataataattggcatcattatgtacttcctgttcatgcatagccaaggggggaggttgtagatacacatcgtaacgggccaagtgctatggccgctgctcatctctccaaaaagattcatgccatccgtacttaaaccaaaccgtatgtttcgtgcgtcctttccaaaatctttaaattttctatcgatgtttcgccactgcgaaccatcggcggggtgtctcagcatcccgtcctgttgacgttcttcagcgtgccaacgcatcattctagcattccccttgttcctgaacaaacgccttagccgtcgtattatagggaaattccacatcaccttagcagaaattatgttctttgttggctgcccgtcaacttcacctggatcctctcgtctaatcttgtattgtagtgctttacaaatagggcatgcttctaggttcttgtactcctcaccgcgatataggatacaatcattcagacatgcgtgaatcttctgaacttccagtcctagagggcagactatcttcttagcgtcgtacgttgtctcgggcaatttgtttccctccggaagaataatcttgacgagtttcaataaatcgccaaatgccttgtcactaacaccattttttgccttccattgcaagaactccagagtggtatccaactttttgtgcccctgctcataacctgggtacaacgacgttctgtggtcctctaacatccgctccaatttatgggcctccttttcactttcacagtcctcctttgcgtcctgcaacatctgaccaagatcatccacagcgtcgttatcgccagcatccctgtccacctcacccgtttgatttccttcaaatctagcgtactgagcccagttgggaatgttctcgtcctgcgcttcatcttcttccatttcaaccccttgctcactgtgggatgtccaacaattatagcttggcatgaaccccgactcaaacaagtggaaatgaatagtcctggatgcagaatactttttctggatcttacacttattgcatggacaacaaataaaatcgttacgcttgttagcttcggccactctcaaaaaataatgcacgccctcgataaactctttgaaccgccggtcagcgtacatccattgccgatccatctacatgaaatgaaaaaaaaatcgtacataaataaattttcgtacaataataacagtcaaacaataatgataaaataattaaaaactctttcgacaagcataaaaaataatgacatataattactcatacaattagtaattataaaataatccaacaaacaattcttattaacaatttttgaagttctgaactaatattaatgttgtacttctcttaattttcaatttagtttgttttctattttttaagattaattttcatcatattttaaactatgagaataaaacttttttaagtaaacaaacaaaatttctatatattcttcttccccacacaaattttctctctcatcaacttacaacaaagttttggagacaattaatgtgtgaaacataactccaaaagtaatataacaacaaaatacattggaggatgaagttactaaccttttagacacttccgatttgtatataatcactaaaaaaatttcacaagtaattttggcatgacctcccctctttctttgagaaattttgaagcttgctcgggctggaggaggaagaagacatatataaaggggggaccaaccggggctaaagatcgccaggatctttagtcccggttgataacaccaaccgggactaaatatcacgtatgtccgttgtagccaccaaccgggactaaagatcatgtttagtcccggtttttaatggatcctggactattatgaatttcgaccgaccgaccaaaaatggtttctccacccgtgtaagcttagagcacaaatgtgatccagataaaatatgtatattgtttatgtggattacacttgttcaaaccaatatttttcatgtgaatttgaatatatggataggcctcataaaaatatgcacgatatctccatattgtgtaaccgagcctgtgccatatgtccagattcgtagttttaggatgggtctaatctcgttctaggtttgctacatattaggacggagggagtataatagagctgtatacagaggttgctaactgataaggtatgtacataatataaagcaattattaagtaaatgacatggacatcaacaaacttagataaataatttttagctgtaatttaatttgtaaaagcaactaaagtaatcgcacagcgacacacacaaaaaacataatcacagtataacataacacatagcataaactgaggctgaaatagtcagctcaatgcaacaactatatatggagttaagcctcgtatacgacgtgttctaaagtccgttttgaagcgaattattagtcgcacgtaaaaggagaaatatgattaacatataattaattaatcattaattattaaaaaataaaaagtagatttgttttattttttaaaattacttttatatagagaattttgatgaaacgtaccagcttgataaaaaacgtacgaagtaggctatccaaaaacagtttatttgcgtggctagctcttgcaatcattttagctgcctattgctcaatttgaaacgaagaaaatcgcaatgattccgcgtttgcccttggtcagcgatccacatgcatatatattaggtacaagctgtcaattaaccttatgccccacgtatagacaacagggacacatgtgtgcattttcttttgctgaaaacataggtcgcgaagatcaagtcaacgtgtttcggttagcagtcgttttttccctatgcaaccaagtggtcacctctcacgattaaatggcgcgcctgtgctcgatcgctcccttgcaagagaaggtgcagccccggcttctcttgctcctttttccctttggagcctttctccagctcgatcagttcaaactgcgccactctttaccaacctacgttgctaaatccagtaaagccactctcacgttttgttttgcctcctctttttttttctgaattgagttctttttaccaggaaatggtattttgtatttgttatttgggattgaaattttcggaaatttttgttctttacaagttctgtgcaacgaaattcttccggccaaaagtttcctttttttgttttgtaaattaatagttcttcccctagatattagtttttttgtgaaatttcggaagtttcagtcctaaggaaatttttttttctttcatagtaccgtgttggagttgttccaaattcacttcaagatattggccgggcttctgacgaagcggagcggaggcccaagccggagggtatatatgccctttgctagggtttcgtggagacttgattctcttgtaagccgccataggcgtgtaacccaaaactcttgagatagtgagattgttgctggctggtgcccgtggttttttcccctttcgcattaaaggggttttccacgttaaatcgtgtgtctccgctgtgattgtttttcgtttactttgtatttctatacgtcgttcataacaagtggtatcagagctttggttgctgttagggttcatgacgacgtcgatgaagttcgatcttccgctgctgaactacgacacgcggttctcgctatggcaagtcaagatgcgggggattctggcgcagactcatgactatgatgaggcactggataacttcggcaagaggagggccgagtggactgctgaggagatccgcaaggatcagaaggcgctcgccctaattcagttgcatcttcataatgatattttgcaggagtgtttgacagagaaaacttctgcagaactatggctgaagctggaatcgatctgtatgtccaaggatctaaccagtaagatgcagatgaagatgaagctgttcactctgaagatgaaggaggaggattcggtgatcacccacatggctgaattcaagaagatcgtggccgacctagtgtcgatggaggtgaagtatgatgatgaggacttaggtcttctactgttatgttctttgccaaattcatatgcaaatttccgtgacaccatacttttgagccgtgatgaactaaccctaaaggaagtttatgatgctctccaaaacaaggagaagatgaaaattatggtgcagaatgacgggtcgtcgtcctcaaagggcgaagctttgcatgtgagaggcagaactgaaaacagaacctcaaatgaaaagaactacgataggagaggccgttcaaagtccaagccgcctggtaataaaaagttctgtgtttattgcaagctgaaaaatcataatattgatgagtgcaagaaggtccaggctaaggaaaggaaaaacaaaaaggatggtaaggtctctgttgcttctgctgctgcttctgatgatgattctggtgattgtctggtagtatttgctggttgtgttgctggtcatgatgaatggattcttgattccgcatgttcgtttcatatttgcactaaaagaaattggtttagttcttacaagcctgtgcagaaaggggatgttgtgcggatgggagatgataacccatgtgctatcgtggggattggatcagttcagatcaagactgatgatggcatgacacgcacgctgaaaaatgtgaggtatataccagggatgtccagaaatcttatttcattgagcacgcttgatgcagaaggttacaaatattccggttcagatggcgttctaaaggtatcaaaaggttctcttgtttgtttgaaaggtgatgttaattctgcaaagttatatgtccttagagggtgtactttaactggttctgattccgctgctgctgctattactaatgatgaacctagtaagactaacctttggcacatgcgtttgggacatatgagtcaccttggtatgacagaattgatgaagagaaacctgctgaagggctgcacttcgagtaagatcaagttttgtgagcattgtattttcggcaagcataaaagggtacagttcaacacttctgttcacaccaccaaaggtatcttgattatgttcatgctgatttatgggggtccttctaagaagccctcacttggtggtgctcgttatatgcttacaattattgatgattactctagaaaggtttggccttattttttgaaacataaagatgatacctttactgcttttaagaactggaaagtaatgattgaaaggcaaactgaaaggaaggtaaaattgcttcgtactgataatggtggagaattttgttcgcatgcctttaatgattattgcagacaggaaggcattgttaggcatcacaccataccccatactccacaacagaatggtgtggccgaacgtatgaacaggaccattatatccagggcccgttgtatgctgtctcatgcaaggatgaacaagcgtttctgggctgaagctgcaagtactgcctgttatttgataaacaggtctccttctattccactaaataagaaaactcctattgaggtatggtctggtacgcctgctgattattcacagttaaaagtttttggatgcactgcttatgctcatgttgacaatggaaaattagagcctagagctgttaagtgtcttttccttggttatggttcgggagtcaaaggctataaattgtggaatcctgaaactgggaagacttttatgagcaggagtgttgtattcaatgaatctgtgatgtttactaacagtttgccctcagaacatgttccagaaaaagagttgcagcgtatgcacatgcaggtggagcatgttgatgatgatacaggtgttcaggtggagcctgttcatgagcaggatgaccataataatgatgttgctgatgatgatgctcatgatgatgttcagcaaactcctcctattttgcagctagaggaggaattacctattgctcaacgcaagtcaaaaaggacaacaaaacctcccaaacgtcttattgaagagtgtaatttgtcttactatgctttgagttgtgctgaacaggtggagaatgttcatgagccagcaacctataaagaagctgttcgttgtggtgatagtgagaattggatttctgctatgcatgaggagatgcagtctcttgagaagaacagtacatgggaggttgtacccttgcctaagaaaaagaagaccatcagttgcaagtggatcttcaagagaaaggagggtttatcttcaagcgagcctccaaagtataaggcaaggttagttgctagaggttacagtcaaattccgggtgttgactataatgatgtgttctctccagtggtaaaacacagttcaattcgtacttttcttagtattgttgcttcacatgatcttgagcttgagcagttagatgtgaagactgcgtttttgcatggagagcttgaggaggacatatacatggaccaaccggaagggttcatagtgcctggcaaggaaaaatatgtgtgcaagttgaagcgatccttgtatggtttgaaacagtcccctcgtcagtggaacaagaggtttgattcatttatgttgtcacacagttttaaaagatctaaatatgatagctgtgtttacatcaagcatgttaatggatcacctatatatttgctgttatatgttgatgatatgctgattgctgccaagagtaagattgaaatcactaagttaaagaagctgttgagtagtgagtttgatatgaaagatcttggtagtgctaagaaaattcttggtatggaaattagtagagacagaaaatctggtttgctatttcttagtcaacataattatatcaagaaagttcttcagcgtttcaacatgcaaaatgctaaggctgttagtacccctattgcaccccactttaagttgtcagctgctcagtgtcctagtatagatgcagagattgagtacatgtcaagggttccttattctagtgctgttgggtctttgatgtatgccatggtttgctctcgtccagatttgtcatatgctatgagtcttgttagtagatatatgtctaatcctggcaaagaacattggagggcagttcagtggattttcaggtacctcagaggcacaacatattcatgtttgaagtttggaagaactgataagggccttattggatatgtggattctgattatgctgctgatctggacaggcgaagatcacttactggttatgtgtttactattggcagttgtgctgtgagttggagggctactttacagtctgttgttgctttgtctactactgaggcagaatatatggctatttgtgaagcatgcaaagagttgatttggctaaaaggtttgtacgctgagctcagtggagttgaatcttgcataagtttgcattgtgatagtgaaagtgcaatttacctcactaaagatcagatgttccatgagagaactaagcacatagatatcaagtatcattttgtgcgtgatgtgattgaagaaggtaagctgaaggtatgcaagattagtactcatgataatcctgctgatatgatgacaaagcctattcctgttgctaagtttgagttgtgctcaagcttagttggtttaattgaatagtccaagagactattgttggcaccagtggttttctatctttgttgttcaagatgattggttgatttatgatacaagaagaatttgtcttaaggtggagtttgttggagttgttccaaattcacttcaagatattggccgggcttctgacgaagcggagcggaggcccaagccggaggcttgggccggtatatatgccctttgctagggtttcgtagagacttgattctcttgtaagccgccataggcgtgtaacccaaaactcttgagatagtgagattgttgctggctggtgcccgtggttttttcccctttcgcattaaaggggttttccacgttaaatcgtgtgtctccgctgtgattgtttttcgtttactttgtatttctatacgtcgttcataacataccgaaccctggtttacctgttaccagtgaaatatatagaagttggactttcggctgacgttacagattgtctgtaggcgggaaaagtaacatcaaaggcacacctgctaggagagacatatcattatggagtttacattccatttgatagaagaaattaccaataaattttctgacaagcaaaaaattggtgagggtgggtatggaaaagtttacaaggtatgttctataagttcaactttttggttttctattttgcaataggatatcattcgacgcctaaaccatgttaaataaaaacaaccctagactataggaggtattaaccactgactattactccatctaacaaaataatataagcatatcaactttgatacgtctagaagtttacctgattgaaaaagataatgtcgagtgatgtaacaataaatacagatagggtgtttttagttccacgccaaaattggaagtttaactaaaattgaaagtttgaagaaaaaagttgaaagtttatgtgtgtcgaaaagctttgatgtgatggaaaagttgaaagtttgaagaaaaaattgggaactaaacaagagctaagtagcatagatctatgaatattttttatttgtggacaaatttaaaacactataaatataatacttatggacgtgtcgctcaagctcgagtcgagcttggtttagatacgagcttgggctcgagctcagctcactaaagcctcgagctttgtcgagcttaactaatgtggcagtattagatttgtagtactatcgtttttaaacattatataaccaatagtagtagtagcattaaatggaggcatgaagctgggttgcatgcatgcttgtactagtagggccgagtttagatgcaaaatttttcttcaaactttcaactttttcatcacatcaaaactttcctacatacataaacttttaacttttccgtaacatcattctaatttcaataaaacttctaattttaacacaccctagtactagtagaggctaggtactagtagtactagcagagactagggcctgcctccacgccatgctctgcttttcttcagctttttcttgggagatgaatcaagtactactactctactagtagactagcactgcttctagctgttgcatggaaaatttgaaagaactggagggagagtaatgccagctcaaaagaaacggagagaactctaggctcgacgagctattcgagctcggctcgtgaagctcgtgagtttgaagctaagcttgagcttagttcgaattaatgacgaatcgagctcaagacgagtctatagcgagccgagctgctcgtgagccttgagcttttttacatccctagcgcacagtagcgcgttaatcttaaagcgagacctctcaattttccaatttcatttgttacttttttgtcacagtcccccctactttctattatctaaaactcaaataaaattttctcttaaaatatttatccaatttataatccggttacacaaatgtgtttgttgcaattaaatatttataacacaattttacatgattatattataataaaaaggaaaaaaagtatgaattattactcccgaactatcgcggtcgaccgaattaccctctaaacccaaaaaccagtcatcatttaccctgaattttcaatactggacaaataccccccctgacccaatctagagcggttttgtctaacgtggtgcacgcgtggcaatccagttagcattttatttaattaaaaaatgtgggacccacctgttatactcctcttccactcctcctctctctcttgtctctctcgctcttcctctctctagcgcagcgtgcatgacgaggacgggcggtgggcatgggcggttggcgaggacagcgcggggaagggcgatgggcgtgggcggtcggcgaggacggtgtggacgtcggcgctcagggcggcacgcacggcacggcggcaggcaggcgtttggcgccgtggtccggaagggagcaacggcggtgagggacacggaggcggcgaccgcgtgggacacggaggtggcgaccgcgcgggacacagaggcagcggcggcgaactccacctccgcctccagccgctgcctgcgccacaggccgccgcccccatcccgagccccacctccagctgcatccaccatcgcccgccatccttatcccgagccccgcttccagcctccttcgccaccagccaccgcccccatcccgagcaccatctcgacggcgaagaagactggaccttcccctctgcgtcccgcgccaccgtttctccctcccagaggtggagttaattcgctgctgccgcctctgtgtcccgcgccgttgctgctccctcccagactgcggtgaaccaaccgcttgtcgttcgagtcccatcgcatgatgccgatgcgcagccggcggaggagatatcgacacgccgtactccgtctccttcagcgtgctgccgtcgccttcggggatacagctcggcgcgtccagctgccgctggcgcagatgctgaggcagcaggcgaggttccactcggagccgaccttgacggtgatcaggggacgagccgacgacgaggcggcgccggtgccccggagcgacagcacgcgggaccggcggttcgaccagttcaagaccttctccggctacctcgagcgccagttctccagtccagcctccgcgggatgctgccgtaggagttgccgatatcgagacggcagactcgaagatctccgaggaggaggtcgacggcggcgaggtgcccaccgttgaccgctacttcgccgcgctcgagggccccgagctcgacaccctccgagtacgtacacaatcaaccacgtcgcttctaaaccttagctagctcaaaatttcttgccattgtaatgactaatatgaggacgacgacgatgtcggcgtgagttcgtgcaagcgatagaggtgccggtgcttcccgaggacgagagccagccagacgatgagcagccaggcgatgctgtggaagacggtggcgtcggatccctccacggcgttcctccacaacagcctcgacgtcaacaacgtcctgtggtggttgtccgtcgctctcatgggcctcgtctcggccatctacctcgccgaatgcctgcctgccgccgtgcacgccgccgtctatgccgttcttgccgaccgcccacgcccacagcccgtccccgcgccgccgtgcgtgcagcgcgagagaaaggaagagcaagagagagagagagaaaagagagagagagaggagggaaagaggagtatgacaggttggtcctatatttttttaataaataaaatacttactggattgccatgtctacgtcacgttggaaaaaaccgctctggattggcttgagggagggtaatttgtccggtgttgaaagttcagggtgaacgatgactagttgttaggtttagggggtaattcggtcgaccacgatagttggggggaaattcgtactttttttctaataaaaaatatttatgttgtaaattacttttattatatatgtaagttacttttatcacatatataaattacttttggatttgattaaattatattttagacattcaatgaacaatttactctttggatagactgatgtttttactcctacaatagatttacttttagtgtcatgacaagatactttcaatttgatttaagttacctctataatatttctatgatatatataaattagttttaggctttattaaatttacttttatatgtctaagaaataatttaatgaaatctaaaagtaatttagatatattataaaagtaatttgtaatattatataaaaatgtaatcttgtgagatattgttataaatatttaattgttatgaacacaacggtaattagatcgtagatcggatgagtaattttaaaaaaaattatttgaagcatagatggtagaaatatattttctacatgcttgatggactagtactatagctaggtaagattctttaagttattttatgccgtcactgattacgactaaaacgagcctctcgatttagattttacaaatacttatattgtatatacgtggacaaagacaaagggagtaacaccgttcaatttttctctccttggcctaaactactgtggtgttttgtgcggcattccaatttacaaagtattttagtatgttgataaactccacctggtagtcacagtcttgtatcacatctcctcccttcctcctctctctttgtacgccacatcttctccatctgcttgcgcctggtcggaccacatgatgaggaccttgatcatgatttttgataggtattaataactcttgattttgtgaaaattgacaccaacgatccggttttcaatcaacacaatctgaaccttgcaatcacagcaccatatcttctctggttatcaatcgtttgttgctcgattgatcttgttgagaaggttaatccctaaatgggaattgaagaacacaaggtagattgcaagttaatcgcatatgaatgattaagcacatgaatttagagttcaacaactgaactagcgaaactgcaatggcaaaaatatgagctcatccataagacatcttggatgggcaatagggcgagcgagtgtgacaagatacagaacaggcgcaagtaaatagctcactgacatgtggaaactatgcaatagtatgcatcagtattaaatattaatgggtgtttttttctatatatggatgataatttcgtgattaaaacataatttgtatgaaaaaatgaacagggagtacataatgggaaggagattgctgtgaagaaacttaatttgttgccgggactcaatgatacggtattcaaaaatgaatctcttaaccttatgtctgtccagcatcaaaatattgtgaaattaattggctactgctatgaaacgaaaaataaagttgttgaatataatggcaaacttacttatgctgaaataagtgagcgagttatctgcttcgaatatttgaagcgtggaaacctagcaaattttatttctggtacgtaccatctaattaattaatttagtagtgtgcaaagaaatgattacatgtttaagtctcggtgaaaacaccttttacattttgcagatgaatctggtggtggacttgactggaccacgaggtacagaataattaaaggggcttgcgagggattaaattatcttcacaatggacaagaaaagcctatttaccatctggacttaaagcccgaaaatatattgttagatgagaacatggcaccgaaaattgcagattttggcttgtccagactctttgaatcgacaaaaacacatataacgaaaactgtgaatggaacaaggtaagcagacaattcgtatgtagccctcttacctcgagaattcaataagaactgcggataacttatcattattgctcaatgcttatttttccagatatatatattagattgggtatgtaagacaagtttttttccacaaatccgccgactacaatttgggctagctatcaatttaaaacacaaaacgtcaaaatagtactcacacgactatttcttgcgaaaaatcatatgacttaaattattgctgatttgacagtgcaagagatgatggttatgaaccagccgtattgatatattattttgtgcggtagtgtatttaggagcaaaatacgtttccgtaacaaattccacaatgtttatggtatcatgcagaggatacatgccaccagaattcatagaccaaggaaaaatcactaagaagtttgacgtattcagtttgggcgtcataattatacagataatcgctggaattgacggctacagacagtgttgtgacatgtcgtccacccaagaatttgttgattatgtaagaaatttcttttatgtctacaccattgaaactaatattcatttcaaacattttgtgatacattccgtaagtgctttaattttctatgagcgtgtttgaaaattatgtctttcgcaggtatatgcaaaatggaacaaaagagtgcagggaatatcgaggtatgcatcgcgcgaagcagacatgctcgcagtgagacaatgtattgaattatcgttaagatgtgtggaggccaaccgagacaaaaggcctgcgataaatgatataatccatcaactgaacgagttagatgctgagattgaaaacatgtttatgcgtcagcccaagtcacttttgggccaggtacgacgactatggactaattctgtttttcctacctgacttattgagcatctttcaggctttcattcatgcactttacattttgcagttcatatgaaaaatgttagaaaagaaagcatatatacttaacaagttcactatagcgtacgtgtctttagtgacagttgcatgttccatttgatttgccgtttcaaatagggataaatacgtccatattacaaccttttacaatcttgtttgcctgaaaaacactcttcaatgacgaaattgattgttttattataataacgccacatatattgaaattggacaaatacgctgtatggcaatacaaatatgttttaatagttattttcataattctaaaatctaatgctttttacaaataattaaaggggctacaatatggacttaggctgtgttcgattgttcaggttgggaacccatcccctttgcacggaagttgaagcggtccattagcacgtaattaattaagtttcagttaatttttttccaaaaatggattaatttaattttttaagcaactttcttataaaaactttttgcaaaaaacgcactatttaacagtttgaaaagcgtgcgcgtggaaaacgagggagatggggttgggaacttgatgcaactaaagcagccttaccctttgtaaattttagcatgtccccacctttctaccaatattgtactttgtaatcatttatggattgttgtattgaaagttaagcaccttattggtaattaattgcctttagatttgtttgatttgaccaatttaaaaataagacgactaagagactatgtagggagtatcatgcatgttcttttctattaattatttttattttacaattaatatctagggatttatgagatcgaccaagatatacaaggattatcagtttatcaccaacacatggatagtgtattccactcggaaatggatagaagagaatgtcccatgggaacatatcatgtgcacacaattttcccatagacactccgtgcataccaattagcaaatatcataaaaaattctaaaaaataaacatttactcctaatagtattttacatatcttcaaagtctcatattcaatttcattatattttacccgtaacaaaaaaagtgaaaaatctcacagttttaaaggtaagaatctgtcagctttttgttacgactaaaatataacaaatttgaaaataagatttcatacataggtgtaatactattggaagtatatgtctaatttttatataattttcgatgatatttgctagttagtgtgtacgtgaagcttgtgtgtataggatatgttccatgccccctcactattacatgatatctgaatagctatggaaaaattgacaggacattatagattaataagtgataaatcactatacaaacttccccaattaaattcgacctttagaagcgtaacaaacattcaagtttaactcaaactagtatagtataggtgtgctcatagctagttttgttttattaagtacaagaagttgaatttaaacttgcatgtgtttttatggttgtgaaatgatatatcacatattaatctatcttgtcatttttttaaaaaaaaaatactctctccaggttgataatagttgttgtttaaggcaacttaaaaaaatttaaccactattttacattataatttatatataaatataaataaatatatgattttattgaagtatttttttaagaccaacctatacatgtggtgtagagaaatattttagaaataatttatagtcaatgaattgaaaagtttggcatcacccttaacataaacacaactaagtattattaacccgagagagtatatgcacatttgtatgatatgtgaagaaacggagaggacatccgtcaaccgattaaaagagtttcccaatccagactatataagtctagttttttttcattaataaattccaatctgctgcccaactgcctcgttcaattaattcttactaatgaacttcatcctcgcagaaaagctctgaatccaaatatgttgggcttgatcctgtccgcgagcttcgattccccttcgaggtaaagaaggatatatcatgctgtctgcagctaacaaaccagacggattacttcatcgcgtttaatacaaaggcaaaccaaaagaagtatagcacacaaccaaacaaaggaaccattgcaccatggtccagttgctatgtcactgtaaccatgaaagcacaggagacggcacccccgtatttgcagtgccatgacatgttcgttgtgcagagcactagagtgaatgaggacctcgaacctgaaactgaagatatcactgaagaattgttcaagaaaacaatgggtaaggtcgtggatgaggagaagctgccgatcgtttatgtggcgttgccccaggcagaaagctagctgtttcacctgccagtcattgaataaaatcaacgaaaatagcctgaaatatgtattccgattgagcattttatttgcgtgttcagggttaatgtttgatgtttgcactcgttttcttacggtttaaaagttggttgaaaccaaatgtaggatttgctactacatttatatatccacgatgtaataagttctttaatttgtgctcaaactcgcagaagtcaccatcagaacagcttatttatttaggtaatttggaaccatatgccattataattttttaaagtttgagatatgccatcggtatctcaatgacatgtaggacccacatgagtcaatgacatgtgggtcaggatgacatatcttaaattttacaaaattataatggcatggttataattttccctatttatttatttaggaagaggattttgatccctccaggggatatcccctcgttgtttgtatatcagtcaaatggttatgataaaatttgaaaaaaaaaattgagaaggtgtattaacatgtgatatatcactccacaaacatgcaagtaaaaattcaacttctacatcttacaaaaaaaaaacaaattttactctaaatatacggtaactagctgcggttttactctgatccgccacacccgtcctcgggagtggcgctggagcgaccggtagggtgctcgagcaacgatggtgggcggtaacagcaagcgacgagggtggcagatccggcggcgccgccctcgggaggggcagatccgccatcctagggagcagctgtggcgaagacaagggctggtggtggatccaacggagcctccctcgagatgggcagatccactgccctagggatcagcggcttcggcaacaacgagggtgggcagcgatggcaagtggcgagggcggccgatacagcagcgccgccctcgggagtggctgtggagggctagggtttcggatttttttttcaaattttaattctttttgccgtatttattttcacgtgcggtttgtgttgcctgcatgcaaaaatccaactttcgcaaaccttttggtgcatgatggtcacccgtccgcatgcaaaaatcacttttttttagaattacacagtacaacgcagacactcacaacgcacacacactcacccctatgaacacatgcacgcaaaccctacccctatgagcatcttcgaagactgggccgacaaattctggagagattgacgaagtcaccacaggcgccttactgttgacgggtacgtcgcctaccactgaaagcacaacgccgttaaatcctgaaaaattcgctcccatggggagtcgaacctaggacctcaggtgctactgaggctcttgtaactactaggcttggtcgcatggaaaaacgatttctatagtagtgatgtttgtttcttgtgaacttatttaccaaaaagccccatttagtttgcaattgggttggaggattgtctcgtaaagaatatcgagtgtcagcgacaaatgtttggcatggaagaagagggaaaaagtacaatggaggtttgctccactttaatttaatttgctggtccgtggatgaactgtcacggtggtgaagggaatttatctccaagaagtgcagtgcttatgtgaaattggaattttctttgagataatgtggacatggatttatatatatggagaatgataggacaagagcgtgaaagcaagaacaaaaaattaagttaagttattttttaaacgaaacagacactactatgtaccggaacgatcacgtctgcaaaaaatcatttttcagggaatgttgacgggcggcgtacaaaaatgcattttcataagagactccttaagaggtctgactgtgaaagtagacttatttttctagcgagactcttaaacggctatattggaaaatgtatttttgcagaagaatctcttaaaggtccacctagaagtctaacttaattcctcctttctttctcagcacttcaagtctcaccttctctctcatatctcacctcctatcctccttatattatctctcattcctctctctcttcaccgagttcccctcctgagcggccagcggccagctcggcgacctcgaggtggtgggcagcagtgggcttggtggcagtgatggtgactatggtgccatgacaggccgatccgccaccgcctgccccgtgacggaagtatccgccgtcgccggccgtgtgacgggtgccaaatccgcaccaccatcgggctgcgaaggggaaatggaggtgtgtggagggcggccttggcgacaacaacgagggcggacaatggcgatggcgacgatgacgagtggtggcggactgcggtctgcagcgatgacattgccagcagatgggtcctagctagggtttcaagtcttgattttttttttggatttttattattgcgtgcggatgatataagcacccacacatgattttcacacacgggtgcaccaactgcatggaaaagtagcaattttcgtaaacacttctgggcagacgtgcagctcaaccccacgcaaaataggttttgatagtacagaaaaatgcttgttttaagtagtgagacacttaagttgtcctagtacatggagtacgatatgttgttttgagttaatggattacgcgtatatcaagatttatgagttgataatttatcaagatttatgaagatttttgagttgatatacttcagtattacttgataatttgttctaagctatctttgaatacataacatataattcatcctataaacaattatccataatatgcccaaacaattactggtttactagctcaagggtaatgtcacgccccgaaccagtcccgaccggaactagcccgtgacgttccaaattaacctgttaatcgataccagtcccaggaaacagtgctggtatcacagggagacagaatatcacagcaacagaggtctctttattatagagtagaggtacagtcatgttgggctgcggacagatcccgagctcacaactgcattacaaaaggggaagcggaagccaagactgggaccaaacatcacaggcgcgacttgggaactaggccgaaaccctaaaactcatcgtagccggcttgctcctggaagaactcctcatgagctggatccgcttcatcttcttcagcaactggggggagattatttatatagagcaagggtgagtacgggggtactcagcaagccagggaaaataagtgtttaatgcaggctttaaggagaggctggtgtttttgcaattgattttatttgaaaccttttctgaaacaactaagtgagtgcttctcaaacgacacggatgagacagtgcgtctcgtccggtcggagtatgtgcaatgtatcagtctttagattttgaaacaaggttggcacccggccaacagcttttcaaacggccacccgggccaacaacttttcaaacggccacccgggccagcaactttcaaacggccacccgggccaacaactttcaaacatcgaaccccttttcacaacagccatatcacaagcagtagacaaacaaaactacgctaggaatcacctcacatccgcccatgaccgtgggcacggctgttcgaacagtttgttaacctctgcagagggggtacactttacccacacgacattactaacccggatcacccagcccgaggggatcagccacgtcgggagacctccaggctttcatgacaaggcattttcaaagccgacacaggtttaccatatgccgacgagaggggtcccagaccaacaacaggttaggtcccagaccatactgtgccaggaagcccaggggtcctccccgacaccaccccggcgaatccacatgtctctcggcatcaaggctcccctgataagctagttactcagccaggggtgtcccattccacccatgtggtcgtacttgtcttatgtttggatgaaattccaaggaaacggtccttaagtgcaagagcaggaaaccgtacacccagtacgttccccggtccgcggttttggaaattcatttagttcgcaagcaccgacccaggtgtcgggttttccaagtcttttgtaaaactccagttttacccaagttgttactcagattttaagtttgaaggcgaccgtcgatactcgcacagagtgcacgaatatcgaggcgcaactggatggttacaaggggacatggtgtagtaattaacaaaggaaggatcaaatgcaacaaattaggtaggtctgccagtctgccttgcagacgggacaacaggtttagtgcgatcctatcaatgcataatatttttcaagcaacataattaaatttcaaatataggctcaagatgttcaaaggtggcttgccttgctcgagatctggagcttgatcctcgaaatcctcgcactgcgggtcttcgggctccgaaactacacgcgaaacgggacaactcaacaaacggcgaaaataaagccctattaatgacctctaagcgtgccattagatagatcttgagatttgaggaattttggaagttgaacggagtcaaacggacttacggttgggaagatattgaatttctaagattattggatttttggtctaaaggaaaaatgatttaactaaatcctttttggaaaagaaaaagaaaagaaaatgaaagagggagggattatagacttttcctcgggcgactagggcgcggcccaagggaaaaggagcggaccggccgagctaaatgggccggccggcccaaggcggcccaagtgcgcgcgcgcgggaggggaggagagagagggccggtggaccgggctcactgtgcgcggtcccgggtgggacccgcttgtcaacggctcggctcaccgtgcggagggagcacgtggcgcacgcgcgcgggcgggcgcgcgcgggcggcgggcccatacgcagcctcacggctcgaggtggaacgcgcgcacgggaggggctgaccggggtcggcccgtcccgacctcggctgagctggcgccgacgtggcgcctacgtggctgccacgcgggccggcgggaggtagatgacgacgccggccggaacggacggcggacaacagcggcgagcggcggagcgaaccacggcgataccggcgaaagcgagcacaccgggtggttgcacgagacgaggggagacgagccaatggctcggattcgccggaggaagcttgacgtcggcgaatcgcggcggcggcaaccggcggggagggaagagggaaacggcgatgaggtcacgaggggccgattcccggcggtgagagcatctacgcggtttcgggaactcgatgctagcgtcggattgggcggagctacgccgagtgaggctggcgacgagcgggtgctacggagctcgagcggcgacggcggcgagcacacggcgagcgacggcaacggccggggcggcgccagctagctatggggaggctactcgtgctactaccgaaaactaagggggagagatggagcgaggaggaagaacggagggagcactaccgcgaagaggaggggcgctgtgacgagaggccgacggcgcgggagtaatctctccagcctcgggccgaggaagaggaaggagagggcgcggccgaagtccccttccgcgtcctagtgcgcaccggctcctccggcacacacgcgacggctgcgatcggcgagagggacggcaatggcgcgggcgagaaacagagaagattgggaggggaaaaagggaagggcgggcgcctgggtttataggggcggcaatgtcggtttggaaaccgactttggcggtcaaaggagagggtagcgctcggcggtcgcggccaaagcggtgacagggaggagggaggaggatgacgctggcgggagggaaaaaggggaaaagagggagagaaaagggggcttgtccccttgcctcttcgggaaaagaaggagggagcgggggcgttgcggcagagggaggaggggttctctgcctccgtcccttggaggctagcgcgggagtggcggggccgaggcgatgacgacggcgatgacggcgggcggtttggagcggcgcgacgacatgggcgacaggcgtgggctggcgcggcagagggtgacggcggcggcgaccaggcg

SEQ ID NO: 4904 - DNA, 6293 bp, Oryza sativa
catcggaaacttattttgacgaaattatagtcgtggccttgcatgcatgattagctgatccttgtcttcattatttcaagtgtttgtgaaaccaatcgaccattaaatcaagagcttgctcagcttttttgacctcgaatgggttgctggcgttatatctgcaagcaaatccatggttcactccttggaagaccttggcaaagtaatcaatctgcaacaattaatgaacaaaaggttatttctaatgttcatttttgctaatgaataatatatttctttgcaaagatttattattgaaatatttgatgaatgtttcaaagaaaaatatattcttcttgcaaaaaaggagagaaaggaataggtataggatcaaagccacagtgccccaaatgatggcctagcttttgtggattagattttgggtgagttattttcctcgtttctcttatgcaactcacttgtttactgcgactatattttttaaaaccacaaaacagtgtcttttaaagaaaactttatatatataagtttctttaaaatttaaataaatatgttttaattttttaatagttaatatttaattaatcatgtaataatggtatttctcggttctcgtttacaatgtgctagtaatctttcagtttttatgctattgtataatctgcttctgctctaacttttgccagatgttgaccagccattagagccagcattccctcaaaaatatagccagcatgcatgatcctttatcatctcatcatccgtggaaaattctcttgtgtgtctacagtttcatttcctttcagaaaatagacctagtgtttcagtttaagtgttctgtctcttccggtctattgaattcctgtgcttcatgtatatgtgcaaattatcttatctgaaaaaaaacaaaaagaataacaattgcaaggcaaatggacctatatatgctgatgcatttgctatatatatcaactgtaaacgaaactggtaataggggaactcacccgatcagttctatgtcgcaaggcctgaacatactggtacactagttttggtggtgtcagtgtgtcgttctgagctccaatgatctcgatggggcatttgacctctgcgtgaaatgtcacggcgaactttggaataagaaaacaatggctagctatatattcctgtgcaacctagctagatcagatgatacatgcatatttcagcaaaagcaacaaagaaaatatatatatatatatatatatatatatatatatatatatatatatatatcacctttaatgtcatcgacagtcaccaatccaggatgggtggtgacaatcgcttcaacctcgttggtttttgctacctccacggcaaacttccctgccagttaaaacttgcctttgagagactttaatatgaatcagatctctgcttgttcaatgtggagaggagatcacgaaggttcagagtgtatccttacaatgcgaatctggacagactcatgtccagattcgttgaactagaaaacatctcatcaatattagattgggatttttttgggatggagggagtatgttgttactcgtgactgcaaacattttttggtcgagccctaggcactagatagtaatagcagatcaactgcctagcaacctcaggcggctgcccaggctcattgctgaatccattgaaattctatattagacagattgaaacagagtttttatagcaaataagtttacttgggctctttttatttttaagatacaccactgatagatgtagtagtataattataaatgcacaaattaatgtgcttcttctttatgttgattaatatcactcaccaccccaacagtaacctccaactccaataacagatatccctttctttcttagatcagaaaagattgctttagcatcttcagctgcttttacctgcaggatcaattcatatatactggtcaaaaatcaacttattgagtccttgattagcatctagctagtataggttaagtactttggatatagttttgcttaatttgcggcttaatttgtgcatcctgataggtgcaggagagaattttcatctgaacgatcacgattactaggtaattaatgttctagggaatataaaatcaaattgcataagacggtgaaacgaattaccggagaatgtttgctgaaccattccgtaaggttcaggtctagtgtgtaaggatctccgtggaagaaatcaggtacagcgacataatatcctgcttgaccaactttgtcagcaattttcctgtaattttcagcatcattatcacacatatgcttttaaggtgttttcggatctactactggatcacaattcacgatatattcagtttaactcaatacaacaaaacaacacaattatatcgtcctatgggtactaatcgaacaaaacacatcactgataagggttttcccaccatacacacccacgccctccacacaacaagaagcggcactgataacaacacattagtgccggctacgacaataaccgacgatgattagtgggcagacaattagtaccagcctgtacaattagccagcactaataacaccctaatcagtgccggttggtgtactaaaacggcactaacatcacaatcagtgctgatatgtgctaaaccggcactgataaagatggcctcaaaacagttcaccaaacccccttagagcacccgcaatggtaaagtaaggtgctatctataaaacatgtacacctcaacaatagactagattaatagtaaaccacttcaatggtatgtctacatgggtatctatagctctctaatccattgcctcgtttttctctatagactatctccatgttagtagatagctttgctctctctcttcatttaatctcttccaagtaggaaaatatgctgacatggatctcttatagagagcttatagataaccattgtgggtgcccttataattatgtacaagcttgagtagaagtgtagagcatgcagggaaccctgttgctagacgggttgagattgcagttttttttagaagaaatgggaattttcaaagctcttcttcgctctatatttattttgtatgtctcgcacacaattaattattcacatagagctttattatgtgaaaagcattgcattttttgtcctctctctgcaagatagataaaattacgatgttttgcacataatttctccttcaggaacaagtacttatatctcatgggttgaagaggtatatatctccttgcgacgcatatatattacaaatgggttgaaggaaatgcttatagtgaaatatattagtttgattttttttatgacatgctaaatggttcgaacaaaaaaaattgggcacgcgtaaattaatacaagagcgtacaataatctggaacttcaagacaactttgccggcttcgtcgttagggacatttctcaaaagacatgttcattgatcgagggatcgcctcgtactatactacaaagtaaacagaagggcaatcatttctacaagacatagatttgtcaagttgttcaacaaaaaaaatagctgttggtttcttgtaacgacaaaaaaacacgacttgtaatgacgtatatgtgatgtaatgtttaatgatttataattaatgattatacatgacgtattattgttgtaattaattgaatgttattaaaatttatgctggcaaaagtaaaatatggataggcacaatattctttttttttaaaaaaaattcagaatgaggtgctcctggaaccatctgtgtcggttcgggaatccaatccgatattttttagataatggaatagaatcccgacctttcctcaacgagagaaacccaaactggtatatgtttggatatatatgaggctgatcaatcggcacggataacaatttaaaatggacggagggtacacaatattgttgatattatgttgattttatcccaagtaacaaactcactatagaaaaacgaagagagttgacagttgacgaaagatcatatccttttttaaaaagtaagaacatagaagatcaccagttctccacgctattgatttgtaaaattcagtctctttccaaggtagttgttcgtttgtcgatttcctttcgatattgttgtcgggaaaaaaattatggaggaaacgagaacaactatgaaagatgatcgtgacaacgatgtcgaccggcaatggaagaacaagacaaagagataaagaaaataaggacgaagtgtaccttagcaaaggcgcttcaaatcctgaagaaaccaactcgatcaacaacgatgcgtgcaggagcaaatattataaacggttaatcaaatagagataaatggcagtgactgatcagtaggctactcatgaattacggctagggatgaaaatggtacggaaaccacctttaacgttttcgttccattttttttcaaaattagaaacggaatcagaaactccggatacgaaaacggaatcaaatacgaaaatgaagcaaatacaaatcggagcaaatatggtatagatatttattggaatttaaaaagctcttaaactgaacttctcaaatcgacgaagagatgtagctaaatatttttttttctaaaacaacaaatcgatatttctatttttttatcaatagtaataatacaactagttgtacactttacttttttaagaaaagaaactatattcatctataactataagtagtatgacatggactaataaaaactaaaaaaaatcattaggcaaaagaaatctaaactactagacaacaaaaaatatttctatttaattaagcacctataaatctaaatatcaagagaagatagctaaagctaattagttgtacataagaaatactctgttcccgattccgagagaaaatttgaattcaatttcagaaagtttccgatgatagcagccttatcatattcgtttctgtttaaaaaaaaagaatctgaattcgttcccgtttctgaaagttccaaaaaaaattccgaacggcactttctgtttccaaaaacatatacagaatcctgcaactttccgaatcattttcatccctaatcatgatagggtttgaatggaacaaaattatttgaaatttaaacattttcttgaccgaatttgaataaactttactaaattcatacaaacaaaaaatatttgaaatttttgggcgaaataatttagtctttttactttcttggggggttccgaaattttgaaaatttaaaacctaggctgtgtttagttcgtgtgccaaaactttttaagtatacgaacatacatttgaagtattaaacatagactaataacaaaacaaattacagattccgcctgtaaattgcgagacgaatctattaagcataattaatccgccattagcaaatgtttactgtagcatcacattgtcaaatcatagcgtaattaggctcaaaagattcgtctcacgatttacatgcaaactgtgtaattggttttttttgtccacatttaatgctccatgtatgtatccaaacatttgatgtgacggaaaagttgaaagttcgaagaaaaaagtttgaatctaaacacggccctaaattttaaaccctgaatcgtaatcctagacatgcactcaccgaaaacgtcggaggcaaggaggacaaccttggtggaatggacggcaccagtgacataggcctcgaagcctgccaggtcatggacgaccacgccggcctcacctccgccggctgtcaagtccggcaggttgtcgaggcactgggagtgcggtggagcagcagccaccgctgcggcggcggcggcgaggcagagcaacaacgcccatgccatggttttcatgctctaccgagagaccttgggcttttttttttccttacgtggctttaatcgatcggtagtaatactaagagagtagctcgttgcctaactatatataggcaaacgggatggacttgtggtcttgtggaatcgtgagcttaactcgatcgcttggtcataagagctatacggctccatcgtttcacttattcgggaaataagcgaaatggcgtatttgcaaacgaaaaataatttgtaaataaaacttttatatatatgtgttcttagcgatctagaagtaaaggctgaaaaataaacttcaatgaaaaaaccctaaaaccaactccaaatttaaagttgaaaatttaaatttttgctaatatataagcataagcatagtttatatttttttcaatttgacaatgtagacgtgcttttctattaagctga

SEQ ID NO: 4905 - DNA, 5150 bp, Oryza sativa
tttttacggaagatggaaaccttttctttgcacgttttttcctttttccagtatggacgacggaactttttttcccactaacattgttttttttttttggacaacggtttatacagatgattttttttaatcgggcagaaacttttttcacactttttttttttgcttcttttacatgcggaaacctttttttcgcgtggtttttatcggtacggacaacggaaatgtcttctactttttaagtagtagagattagctgtaggaggatagaatatgaaacaattccaatatatatatgtcgctatgctgctgattatctccatgtggggataacatattgaaaaccctaagaaattactctcaaaactagcacagtggcctgcacagattgcgcggctagtatcattatattttctctcatataatagcatacatgtttcctcattatattattcaaatatattaaaatgacaacataattttaaattttgcaataactttacaaaactactaatgggtaatatttatattatattttatatacgtgttagttattaattatttttaatatcaaactttagttatttgtaaattatatatattcctatatggactctagacttatcttttaatattttctttttttttaattccgaattttctgtaaattgtatttctatatagactctatgctcttcttccaatattatttatttttatttttaaatttttattatttctaattgtatttatatgtggactctaaactcatcttttagtattctttaatttttaatttcgaattttagttacttctaaattgtactcctatattgattttaaactcttcttcccatgtttttcttaatttggaattttagttatttgtaaattgtatctttatacgaactctaaactctacttttaattttattatgtttattccaaattttagttagttttaaattcctatatggactctatactctacttctaatattccttattttttaattccaaatttctatttttttcttaattgtatttctatatggactctatactctacttctaatattccttatttttaattctgaatttcagttatttcctaattgtatttctatatggactctatactctacttctaatattccttatttttaattctgaatttcagttatttcctaattgtatttctatatggactctatactctacttctaatattccttattttaattccgaatttcagttatttcctaattgtatttctatatggactatatactctacttctaatattccttatttttaattcagaatttcagttatttcctaattgtatttctatatggactctagtctactcttctaatattccttattttttaattccgaaattcaactatttctaaattgtatttctatatggactctagtctcctcttctatattccttattttttaattccgaatttcagctatttctaaattgtatttttatatggattctactttttctttttctccgattaatgtgagaatttctaggccatgagagccaacgtagaggctcctttttctattcatttaataatataatagatagatgtgtattatataggaataataggacgttagagtatcttggcatatatatcgatatttactactctctttgtttcatatttttagttgttttactcttttcttactcaaagttctttagttttgaccaaatttatagaaaaagttagcaacacctacaatactaaattagtttcattaaatttaacattaaatatattttggtaatatgttaatttgttttgtattaaaaatattagtatattcttctataaatttgattaaacttaaaatagtttcactgagaaaaatatcaaatgacttataatatggaacagagggagtagtacataatgattctcgatacaggagtggcctgtcgccatccaagtcttatactgataaatcatgcagatatataatcagtaatattgaatattatgtgtgacttaatttctcgcaagtcacaaataactggagatcactataaaaaagacagagagagttgaccaaaaaccatatccgatcccttcaaaataaccatagtcacctttctattgttgtaacttgcatgacaattgaatgctaatgttcatgcaagtgtacgatgcatgactggatcgtaccaaaatcataacaagtttatcgtacatacagcaatttccctattatacaaacgaagaagaagattgtacctcagcaatggcgcttcgaatcctgaagtagagacccacaattaacaaccacgcaaccactcacatgcaacagcaagaattcaagattaattaatggttagtaataaatgaatccacaatatatcatcaaagaatatttcaaagacagataagctggcagctcaggcaggcatgcactaaccgaagatgtcggtggccaagaggatggtccgcctggaatggacggcgccggtgacgtaggcctcgaatcctccaagatcgtggacgaccacgccggcctcgccgccgccaccggccgtcgtcaggtccggcgggttgtcgagacactgcgagtgcggcggagcggcggcgccgacggcggccgctgcgaggaagaggatggtcgggtagagcaacgctggtgccatggttttccaactatcgagttttgacgatacatatgaggcatcgaatcgatagttgctggggcatttgtagtttgtttatggcctttagccttaggttaggtagcacattgccctcagtttcttgtttaatgtcacacccagttcccgctgcctgttgacattttgaattgaatttaaggtgagaaaaatttttttgtgtgcctttcgttatattgatcagtttttaattaatcaatcccatgttcaatgttttttttcactgttaattaaattaaatattcctaaattttcattttgtttcctttaaaaaattttagcaacattaactttgtatcatagaaattagattaaatttcacaaaactgtatgtattttgatcaaactatcacaaaactacagattgattgtattatatcagaaactacagatttaacatagatttatcacaaaactacaacttttgtaacctcaattgttctacgctataaactctaaaatttgtagttctttgataatttcatcactaaatatgtagttttttaatgaagttttaaatctgtagttttgtaatatccttggtgttaaatctgtagttttgtgatacctatatttaaatatgtagttttgtgatagtttgatcaaattatttgtagttttgtaaaacttactctaaaatttataccatgaaagaataagtattggtcaaagtttgtcccaacaaaataaagtgtacccttatttttttcaaacagaggtagcatttctctctctcaaaatgattattatctctacgtttgtaatttgtttcttataaaaaagatcatctctgcctcctaacacaaagttaaaaatctcactagggatatttttttcttcttgattttaattgtcaaagggtgtgaaaatgttcaagtgattgaaatttttaaacatgataataattgaaattaaattttaatgtttagtaggaataatttcaaccatattttaagttcattagaaaaattgaaattttagtttaaaaaatcttgtaaaaatataaaaagaaatggtgaatgggcaaattcacctccctcataaatttgttctaatttaatcaagtactttcagaaaaaatatatttcagtttcaattctgaaggcaaaatcacacgaagattagataatttgggtacttttgacctttttattctattttgaaagaagctcatcaaaaagaatatatatgatcttctcaaaatgaatagtgcaattatgaaaaaataaaacttgttcatcaagtagttcgacctcccgcattcgttcatactcttttcataaccgaataatttgaggcaatgtgagcaaaacgtggaggcctgagaaagattaagtgaaaacttagggacaatcaaacaaggaccatctctttgaaatttggagattttaaatttcaacttgagaatacgtgcccttttctatgaggctgaattccttccacgcatataggtttacatcagtctatgacagtccacaagcccagcggttatgagttcaacatcatgtttaatttatagtagttgaccttgttgattctataaatcggtagtaagaaggggtatcacgagatctaaaatgagtaagtaaagggacacaaatttagaaaggttgaggcattctcgatgagaagtattaccctattcatatttagatattgtatccgtctggtgttgtattgatatgacgatcgagttttggccatgttatttaagggctccatgtccatcttatataggtacggaggcaggattacaaagagaaatggttattgggtcatttcttccctcataaaatttgtgaattttactacctacgcaatcatcaattattgtgcaaagtcaaagcgaagaacttggaagctgcaggcctatggccaaattgctggactttttggtagtgcatccggttcgccaaaagttaatgcttggtttatcgtcgatgtatccatcaatataacagtgcacgcatgcgcacatgggagttcgatcagtaagcatatgtgcccggattgttgacacttaaccaaacacgccctaattattctcaagaaacattgcactggtgtttcatgggagacagagagaggaggcattgatgatctatagccaatttgatggccaggagcatggatgcaaatattttaaataattgtcacttgtggtgcatgataaaacccactagtaatttagtttttatcatgataaaaaccaattggtggtgatgttcttttatgccagttttatacaaactgacactgataataaggggttaagatatcttgttctgaaatagtggaggacacacctgtgttgcttcatttatttgtgggaaccatggattgctcctgttgctagctccagggttcaaaatttcgtaacaaaatttccgaaatttcggtcctattggaacccccatacgat

SEQ ID NO: 4906 - DNA, 1265 bp, Oryza sativa
gcggtaagatttgatgtcttaggtcctcccggggtggtcctttttataccgcaggtcagttggtctcaagtagaactcggagacatcggaccccacacgatacagtaacgacccagttctgtctgagtaggactccttctatctgtggattccgcatctatctcgtgacgaatttccttaacgtacataggaaatatccgtataggcgcgggtataccgtatcagtatagaacgtgtatccaagggtagagggtatatcttatccataaccctgacacttttcatgataatcactactaaacgatagattttcatggacgttacccccttttatttccatgcagttcttaagtggaactgcacggaaaaataggggaaccggggctgggctgttgcccgtatgggaaaatcgattttctcgtgcggtcctcctaaacggaccgcacgggaaaatgagccgattttcccgtgcgtatctattaagagagccgcacgcgaaaatagtattccctattttccctcccacccatttcaaaatttttcctcatttatctcttttaatttctcctcacatccctcccctcttatctctcttctctctcctcctctctctttcacgcctctcctctcgtctccttttggcgcgcgggcgatggcaacgacaacggcggtcggcgtcggcctcagctccacacgacggcggtgcaggcgcgggatccggcgggcggcggtcatccccgcacagatccggtgagcggccggccttccccacgcgggatccgctcccctcccctccccttccttccctccctagatctggcggaggggaggggcttctgtggcggtgcagccggacgggagggtggatccggcgggcagcggcatggaggggagcgcggatccgacgggcggcggcgcggaggcctccgccgatgaggaggaggaggaggaagcggcgccgctgccatgcgccgacgtggaggcgcccgtcgcggctgctggtggaggcggcgcggcggccgccgctggcgttgaagaggaggaggcggcagccgggagcggcgccgctctccccacctcatgcggccgccgacgacgacgaggagaaggcggccaggagcggcaccgccctccccacgccaggatccgtcatccggctgtggcggctgcactccgcacggatctcgcggcgacacagtcccccgcctggagccggccagcggtgacggcggggagtggcggatctagggttagggttcggtaat

SEQ ID NO: 4907 - DNA, 1426 bp, Oryza sativa
cacagatgtcaaatgccccattgaaatccttggagctgagaatgacgctgtaacaccaccaagattagtgtaccagtttgttaatgccttgcgccaaagacctgaggtaagttcctgttgattttcattggcacttgatgccaaatgcatcagcatagtcccacggtagacacacacgagaaaaatctcccactgatgatgagaaattgaaagatcatgctggctctatttttctttttgaggcaatattggatctagctaattagtaacattaatgaaaagtccaaacactagcacattgtcaataaacaagtttacaattgtttcttaaacacaaccactcaatgatctttaagaaaagaaacaagttatgaagagcctcttatggattgcatctttgttgcaggttgattactttgccaggatctttccaggagtggctcatggctttgcttgcagatataacgccagcaacccgtttgctgtcagaactgctgaacaatctcttgccttaatgcttgactggtttgagaaacacttgaaatgacaatagctaatcatgcatgtaatgcaaggccagtgcaattgtttatttccatcaaaatacattgctagtgtccatgtatatcctggtgttaagtgaaacttatataaataagcactagtgtaaagtgaaagtatgtgttgaatatggtgcgaagtgaaacaaagtgtactttatgaagtgcaaaatgcaaactctttttgttccgaagcgaccattagcatggcatattaaaacatctgtttgtaggagaacaaaaataatgtgtgcctcagttgccattttaactagtcgatatgttcaatcaaatgttgtatgctactcatcttaagcacagcatatattgggtacctcttgactgtttcttatggccacaaattagacagatgaaagtcgtgcttccaagaaattgctggcccttaaataggatggggacttctcctgaagctgtagaggaaacaaggaattctgattccaaccaaaatggatgggtgatgaaccatttgcgtgcaaaacacagaaaacattcccagtatttcatctcctattgtcctaagtcaacaggcaaaagatgacaaatcatccagccaggttgaacagttaaaaaaactttttttgtttgaaaaaaagctaagatttaatgtcctccagggagttaggcatacctggtctcaccggaagccagtggcgaggttgctgtagatctagccagagctgtgtatcctgcctccgccggatcgtggggatggcatcttcagatgagcatatctccacctcatcctatatatgtgcgctgccacatccagtgccaccccttgggttccatcgaggaggtcaagggagattcatgtgccttaagcttttgacaagggtgaggggcag

SEQ ID NO: 4908 - DNA, 10189 bp, Oryza sativa
ttttagagttttgttttgtaatgttcaaatatcatttttgagattttgcttgtgtactttaacttttgctattgcatatgttcaccttttccattaatatacatccttgaaaatcctggattcaccatcacaccacaaaaatgtaaggccaaaaacaatctacaaatggagggaataaaacaacaaattcctcaattttctacatgtaaatatcaatagatttgcttcaagatccccaaacttttcctcggaataaagagttctactccgaccattttcaaattgttgtcattctgattttattctaagtcaaatatttctacctttgaccagcaatccataaaaaaaaaatatagttgaacaacatccgaattatatatcatgaaagtaattctcacggtgaatttagaaaaataaatcttatgaccgttaaactatatgattttctataaactgatggccaaatatatatttgacatatgacaaaactagaacgacaagtaacttaaaattgagggagtaaaagcgaggcattttctgatatagttttcttcttccaagaaaatagatatatagtttttttttccttccaagaaaatagatttagtcctggcaattaacacgcaccactcctagctgttgttgctttcgattccaaaagtctccacagcaagtagtggtggtgtgagttgtgacgagataagagaagtaacctaagctctctttacatctaccgatgttttacatctaccgatgttttttaggtgtcacatcggatgtttgactggatgtcgaaaggggttttcagacacgaatgaaaaaactaatttcataacttggctggaaaccgcgagacgaatcctttgagcctaattaatccgttattagcacatatgggttactgtagcacttatggctaatcatggactaattaggctcaaaagattcgtctcgcgatttccccctaactgtgcaggtagtttttcttttaatctatatttcatgctatatgtatgtgtctaaagattcgatacgatgtttttggaaaaaaaactctttaaactcttttggggaactaaaccaggcctgaatatattggtcttgtggtcctgtgttctagtgtgtgtggctccccagcacaagccttggatcctactcttctcgacctcagtgtcaggtctcattcatttgtgatgaaacaccatcccttctggactctactgtcagtgccgccgtccttccatctattctgattcgatggccgtggataagcttgatttctctgtccttttttttccttgtttatttatctatctgtcaactctcatccccctttcggaaagatgattttcacatgaacacgagtttgtgtgttcaacgctatagatggataatatatataccattgtggttttattcgtggtcgtgtgtgttttatcgtgtactgatcgaagcacggtaatatagcgtacgtgtaaagtgtaatgtaaagtgtaatgtgtgtgttagctttcgctttactgtatgaagaagtattctatgccattgatgtttttttcacacgcagaaatattttcttccaagtggaggggttctttcagtttttattatttatttttgtgaatgaaaattttgactccaacaaaatccttttatttatataaatctggggcgaagttgactcctgtttattcagagagagagatagaacggatcaaaaggttagtctggaatcatgtttctgtcattactaattcttaattcctcattaattcctagaaggacacatttgcaacatcatactacttaattcagttttatgcattcctagaaacttctttaccatctatattacaccctttgtcccaaattataatgcttatatttttttcacagtcttcagtgatatattttgactattattttattttatgttacgttcccaatgagtatgaaattagcatcatatgaaaataatttgaaatgaatataaaactaatgatataacatgtataatacttaacatatatatagttagtatggttattagttaaaagttatcaaattagatttttcagaagatcacgccctgtaatttagaacggagggagtaatagtcgaaaatgcgcatcaacaacttatatgattggtgtgagtccaaaagtaggccaagacatattggggtatttttaccattgcctttctgttatttctgttaggttagcatgtccatgatgcaatccatgggattggcattgcttgcaagttaactaggaacccataatttgttcacaaagttggggatgaatcggtggcaccgaaccatcaccaatgcctacaacgaatttcccggtaaatcctagctagctagataggaacagagtgattactagagtagactgtcaacctctctagtctctaccaaataataaagaaaaaaaaatgaggagatagtgatggtgtagtgggtatataattcgactcaccaagtttcaattcccgatgttgtgtgcaaatagaggtgggaaggtaatacttccgttatataaaagtaataaggcatggtcattaaaagaacataataacactacactggacaaggtcacctgtgacgggcccaaaccctcacctttgacggctttgagcttggtcagtgatcagtggtcactggtgagtccaatcacctttgacgggtgaaggaccgtgactgatgacagtcacctctgacgggctagaactcttccgcccgtcagaggtaagtgtctgcgctaacccatgccattttgtaacccgtcactggtatggttacctgtgacggctttttcaatatgaaccgtcagtgatgaggtacatccagacaaaaaaaatttctaaatattggctagcaaatcgctagccaatatttagaaattatatttcagcagcagtaaacagaagcatcacaaaatatatccatcacaaattagccaaaatataacctaaatttctcatcaacaatatatccatcacccataacagtaagggacaaatccatcacacacatgcacaaatccatcacacacattcacaaatccatcacacattcacaaaatccgtgccactgccgctccaagaatcaccgaatctagaaattagagaagggggaggaggatggggatggatgcggcgccgctgccactcacctcctcctcgccaccgcacgtcgtcgagccctcctcaccgctgcgtcgagccgctgcaccgccgcgcgccgttgagccctcctcgccgctgccgctgcaagaacaaccggcggcggcgggcgggcggattcgtgtcccccaacctcgtggaggctagatccgacacccagcagtcgggggacggcggccgtggcgcccggcggtcggggaggggggcgaaggaggcggcgacctggatctggcgtggtggaggcaggaaggaggaggctacccggatctggcgtggtgcaggcgggaaggaggcggcgacccggaggcggtgggcgaaggagctgacgacggggcggcggagagacggcggcggcgaccatgaggctgagggcgaaggaggcggcgaccttcggaggtgggcgaaggaggccgccgcctccgcctctggtccccgccgatggacgatggacggcgccgcgccgctgctccccgagacaagccccaagagccggagagggcgaagaggcggacgtcggtcaccacgacgcggcccccgcacccgccggcgccggtgccgtctccgcctccgacacaggtcgatgaagagagaaagggttgagagggagagagagatggggggagtggttgagatggataaggatgagccggtagtagaggataaggatgagccgggatgagaggggagggttatgagaaagatttttttttatcatctttgacgggcacataaaatttgacccgtcacaggtgactttatctcacctttgacgagttttgtttttggaccgtcacaggtgactagttacctgtgacgggctaaatatttttggcccgtcacatgtaattttacctcacctttgacgggtttcatttttgaaccgtcacctcctgatggctcaccgatgacggcatcctgtaggacccgtcaaaggtgaccctcatcactgaccagcacttatgcccgtcacagatatgccgtcacaggtgcaaggatctggcgtagtgtaagaaaataaacctcgttgataacttcatttgggtggaccgggtcaatatctcaaattgaaaatatgcaaaaattcagcagcgccatatcgtcactagtcttgagcccgtacatctgcgttgaaactgaactatttcacgtggaattttctgctttgtaaattaagaatgggtctcaatttttgaacttcttatgtcaggattatgactatctttataaagaaaaccaagagccgtgaattgcagcacaaccaaatcattgcaaagcatgcgctatttctagcatcagggctgctatctagtcaacaagccagccaattaacctgtagaatatccaaccaaagataggcgcctaccatttcttgcgaagttcagaagatacttcataaagtatattacaacaccgactttccaatatgaaaataaacacaattatcctcgtacattcaggcgtctactcagcgctatcagcttttgacgtgagcctaccaatgcagtcatgtctccttgtgctgcctttttcaattcaacgtggcctaattttatgggcctacaagctcacaagcaacgttcctttgtatgaagtatgcatcattgatcattggaaagggagaaaatttgttttatattatctatcttattattcattttctttattttctttttacatggaatgcgtgcactgttggaaatttggtcataattcggcatattttaatccaaaataacaagataataaacatgatatttacaataggatttgatccagtgatagtggtgaatgtaatcaacatgagcatgcttaacgttgaataagaatcaacaatcacataatgacacaatgttgacattgcgattaacattaacagtaaaacttctaattgaaataatgtaataaggttataccccaagaatggtcctccgctggagtttgaggcagtattgcctccgttggtgttgacgggagtctccttctccttgtctccagtgttcgacatgttggtgaagatgaagtagatgttgacgaacagtgagtagtcgcgccttgcgctccccaaaaacctgatcgcccgcccgtctgtgcaaacgtcgcagcaacgcgtggtttcggaggcctactctcccaacgcgtgtgcacacactcgtcgggatgggattaccgtagcaacaacagctttggaaaatggatgaaagtgtgtcttcttcttctcgcgggagatcaaatccattctcattttataagaggaatggaagatgaagagtaagagtcatgaaataggaagaggaatggagcaactaattgtcatcaactagccatgaaccatcctccactacacaaccatcaaccaacaatcaattaagagtaattgatgtaagttaccaatggaataggaagaggaatagagcaactaattgtcatcaactagccatgaaccatcctccactacacaaccatcaaccatccatcaattaggactaattgatataagttaccaattccttaatcaaatggattaattctcaaaactcttcatcccattgatatcccatagaagaatgaattcacatgaattcctagcataatgagccttggaatttatttgatttaattgatttaaatggattaattacccaattaaatctaacaatccccaccaaatttcaaggctcatgagaatgctctctattccatagcagcttttatataccagtgtttcggtgaagactgttaagttgaactttcacctagaaaaggagctacacctgaccacaactgaacaatgtactatgccttgaattgtcagtcttgtgcagttaggtttcactcaattccataactgatactaggcaaccattagtattccctcgggttggagcttataagtcatactccaggcctttcatgagtatctagagatcacccaaatctcatagactgtgactagcagtcgaactcatataggtttgttccttctaagatgttctgcaggtcaacatctctgcttggaaaagccactcggatcacattaagacataagccatcctaccatgcaggaaagaagagaagcacatcatgaaaatgagcccttttcaagggtctcttctctcagtcacacaatagtttgtttcaccatccaaattcacgggatctccgatcataatggacaggtttccactattatgcaaccttaggtgggtatcaagcccatttccctcgatgcactgtctatcacattacgtggtagccccttggtaaactgatctgccagatttctagccgtttggacatagtccaatgctatcactccggagtttttctgctttctgacagatttcagtcttctcttgatgtgtctagatgacttcatgttgtcctttgaactgttcactttaataatcactgtttgattatcgcagttcattaggatagctggcactggtttttcaaccaccggcaaatccatcaggagttcacgaagccactcggcctcaactgtcgcagtatctagtgctgtaagttctgcttccattgttgacctcgttaagatggtctgcttgcaagacttccaggaaacagtgccacctccaagtgtgaacacatatccacttgtggcttttatctcatcagcatcagatatccagtttgagtcactatacccttcttgtacttttggatacccggtatagtgaattccatagctcatagtaccctttagatagcgcattactctttccagagcctgccaatgatcatctcccggatttgagacaaaccggctcagcttgcttacagcaaatgagatgtcaggcctcgttgcgctagccaagtacatcaatgaaccaatgatttgagagtatctcagctgatcccttgctattcttcggtttttccttaatagcacgctgggatcataaggagtaggagctggcttgcagtcactatatccaaagcgactcaaaaccttgtccacatagtgggattgcacaagtgtaatcccaccctcatctcctctttgtagtttgatgttaagaataacatcagcctctcccaaatctttcatttcaaaactcttggacagatagtctttgacctcctcaatcacattaaggctggtcccaaagatcagtatgtcatcgacatataagcacaagatcaccccttctcccccaccatagcgatagtatacacatttgtcagcttcgttcacaacaaagcctgcagatgtaagcgtggtgtcaaacttctcatgccattgcttaggtgcttgcttgaggccatacaaggatttcaatagtttacacaccattccctcctgaccttctagtacatacccgtctggttgatccatatagatctcctcctccagctctccgttcaggaaagctgtcttaacgtccatctgatggacgagaagaccatgagaggctgccagagcaagtagtactcgaatcgtagtcaagcaagcaactggtgagtatgtgtcgaagaagtcctcgccttcctttcgggtataacccttggccacaagccttgccttgtacttttcgattgtaccatcaagcctaagctttttcttgaaaacccatttgcatcctacgggcttgcacccatatggacgctcaacgacttcccaagtaccattagacataatcgagtccatttcactgcgtactgcttccttccagtagtcagcgtcaggagatgaatatgcctcttctatggttcttggggtgtcatccacgaggtatacaatgtagtcatctccaaaggattttgcaaccctttgtctcttactcttgcgagtatctacaatgttgtcctcctcaggattttcctcaggcgtttgatcattgtgttctatcggtgcaaagtgctcatggggcatgacagtttctttactagaagtgctaggtgtatatttcataggaaattcattctcaaagaatgtagcatctctggactcaagaattgtaccaacatgcatgtcgggtactccagagtttactattaagaatctataacccacactgtggatagcataaccaagaaacacacaatcaacagtttttggtccaagtttccgctttttggctataggtacatttaccttggccaaacagccccatgttcgtaggtatgagagatttaatttcttcctttcccattcctcgaatggtgttatttccttatgcttcattggaattttattcaggacatgacacgcagtcaaaactgcctcaccccaccattccttggaaagccccgcagtgtctaacatggcattcaccatctcagttagagtacggttctttctttcggccaccccatttgattggggtgaatagggaggcgtcatctcatgaataattccaaactcttcgcaaaaggatgcaaactcattggaaaaatactccccacctctatcagacctcaaccgtttgattttcctttcaagttggttttctacctcagctttatagattttaaagaaatgcaatgcctcatcctttgttttcaataaatacacatagcaaaatctagtgcaatcatctatcagtgtcatgaaatatttctttccccctttagtcaacacgccgttcatttcacacaaatcggaatgaacaagttctagaggtgccaaattcctcgcctcagatgccttgtgaggcttgcgaggttgtttcgattgaacacaagtatggcacttggaaccttttaccaaagtgaattttagaattaaactcatgttagctaagcgcgtcatacaactgaaattcacatgacagagtcgcgaatgccacacattagactcatcattctcgctaatatggttcacagcattatgattattacacatgtcattcaaagaaaagcggaacaagcctccgctgtcataaccttttccaacaaaagtcccatatttagatacgacacatttattggactcaaacacaagtctaaaaccttctctacacaatagagagccgctaactagattcttctttattgaagggacatgctgcacgttcttcagctgcacggtctttcccgaagtaaacttcagatcgaccgtaccaacaccatgaacagccgcaagcgacccgtttcccatcaacaaggaggaacctctcccgacctgataagaagaaaatagagaaatgtcagcacatacatgaatattagcaccagtgtccacccaccaatcaggtgaatgaaaaacagagagaactgtaggtaatattttactgtaccccgatgttcctccgccctcgctaatgatcatgttggcagacttcctgtctttgcgctcaggacagtccttggcccaatgcccagacttgccacacacaaagcagtctccctttgcctttcccttgcttttcttcttaaaattggttgcagccttgggtttgacatcaggcttgactttcttgtagttgtgggatgcatgagggttcttcttctgtaccatattggcactagaacctccctcaacctttttgccccggacgtcctttgccctcgccttctcctcaacacccaaagagccaatgagatcaggaacactgaactcttgtctcttgtgctttagagaagtggcaaagtccgaccaagaaggcggtagtttggcaataatgccacctgccacaaacttgtccggcaactcacagttgttgttctcaagttccttagccggcatctgaatctcatgagcttgttcaactacagaacggtcatcgaccatcttgtagtcatagaactgctccataccatacagctcactgccggcgtcagaaactccgaacttggcctcaagtgcatcccacatttccttcccaaaaggcatgtgcatgtacacgtccactatgttgtcagcgagtacactgatcaatgctccacggaacaggcaatccgaagcctcgaagttagcctcttcctcaggagaaagaggtggttcacttcgtttgccccgtgaaacatagaagca

SEQ ID NO: 4909 - DNA, 1100 bp, Oryza sativa
cattttcggtagtggctttgctgctgcactgaaaccacatgcttttgatggttcaaactataagagatggaaagcacgtgcactattgtggtagacagcgatgcagtgcttctatgtttcacggggcaaacgaagtgaaccacctctttctcctgaggaagaggctaagttcgaggcttcggattgcctgttccgtggagcattgatcagtgtactcgctgacaacatagtggacgtgtacatgcacatgccttctgggaaggacatgtgggatgcactcgaggccaagttcggagtctctgacgccggcagtgagctgtatgtcatggagcagttctatgactacaagatggtcgatgaccgttctgtagtagaacaagctcatgagattcagatgctggctaaggaacttgagaacaacaactgtgagttgccggacaagtttgtggcgggtggcattattgccaaactaccaccttcttggtcggactttgccacttctctaaagcacaagagacaagagttcagtgttcctgatctcattggctctttgggtgttgaggagaaggcgagggcaaaggacatccggggcaaaaaggttgaggaaggttctagtgccaatatggtacagaagaagaaccctcatgcatcccacaacaacaaaaaagtcaagcctgatgtcaaacccaaggctgcaaccaattttaagaagaaaggcaagggaaaggcaaaaggagactgctttgtgtgtggcaagtctgggcattgggccaaggactgtcctgagcgcaaagacaggaagtctgccaacatgatcattagcgagggcggaggaacatcggggtacggtaaaatattacctacagttctctctgtttttcattcacctgattggtgggtggatactggtgctaatattcatgtatgtgctgacatttctctgttttcttcttatcaggtcgggagaggttcctccttgttgatggaaacgggtcgcttgcggctgttcatggtgttggtacggtcgatctgaagtttacttcgggaaagaccgtgcagctgaagaacgtgcagcatgtcccttcaataaagaagaatct

SEQ ID NO: 4910 - DNA, 3452 bp, Oryza sativa
tatagtaagaatcctataaaaaatttgtttacgtcaaaaaggcttaatatgaaaattctatctttttttaaagtttggtaccatatcaaacttcttttttgtcgacgtttgatgtctcgactacggtatttggacagtatggggatcgtcggtgctagggcatacgcgagaccgaggtaaaagagatggagacagggatttttatacaggttcgggcccctgaattgtcaggtaataaccctacatcctgttggccggagccggagttgctttttattcaccataatcacaccagtacaatatgtggggtagcctatctaattgttgtcgacatggcggtctgaaggtctgactcgtagtcgacaacagggtagccttcctccttaaatccgtgtccggcgagatcagagatagcgctttcgtatctcctgacggtatccggagacaccgtaggggaatagccatgcctatccctgaagtcgatatccggcggcgtgtcttggcgtatgtaggcttgtgtgttgtggcttctggtggacgtgtgttgattgtcatgggtgtcttccatggtctcctcaccctctcctcctaggggggcttgtatttatacccataggtatccccttgtccaagtagaactaaggaaaccaatatggatacaatccgagtagtccttgtcgtttccatgtataactctggttgtctttccttatccggaactccctcgaggtcagtttccgtataagacatggtatgtggtggatcctgccgaaatttagtcaactactattaggtatgtgttatccataaccctgacaattttaaagagttagttttttttttcatatttagtggtggtcctatttttaagggtctgtttagatcctccaaaatggcaaaagctatgccgttttggagcactttttgccattttagatataaacactagtagcaaaagttggcaatttggcatttggcatttgctagtgtttacacccaaatttggcacctaggattaaaatagggaaattgccaaagtttggacgatctgccggttttcctctgagagggccggtctgaccgccgtatgtcggctggtcagaccgccgctagtgggccggtctgaccggtagagtccgagtcagactgttttcatcgagtctcgggtttccttgcttgggaagtcatgtttcgtgtttccatctgtttctagcccgagttgaacgtggaggagggcatgtaaagggcaagaccaacccctatataagggacaaggccggttcaattgtaagagatcaatcaactatcaatcaatcgaatcgttcttttacttttgcttctagttctagtttagtttgtccatctttgtcgatttgcgccggtccgccgccgctgtgagtgcgacacctctttgtaggtttgtcctgaaaaccttctgtttttcccacgagacgggtagttatctatcgttctatctagatcggctccgctagccggtttagtttatcaaaatccatcttagtttaacttttgctagattgaggtggttggcgactctaagattaccgcaaagcgttaggtgctgtgactgtgcttgtcaactttgtcaaaaaagttgccaacagctagtccatggtagcaaattttgccaaaaagtgctccgggaccacaccctctctctttctctctctctttagtgctaaaatggcaaaactttaagatgcatctaaacactaactagtacttttgcaatgtcaaatcttttgccaccaaaacttttgccatatatttgctattccaaatagatctaaacagaccctaaatgcatttttcttaagagatcatccatgaaaatcgatttttagatgatttcctttatgagaaccacagataaaaatcactggatctttaactgtaaaaatcatgatttttgtaagcctttccttaggaaagccacccgcaaaaacgaatttttgtggacctgccaaaaaaaaggtttttataggtggtcaatgactctgaggtgtaactattttcacatgcactatttcttttggactgcttgagaaaataaatagtgtagcgtcaaaaaaaaatgatgttttatagtgtatatatcggccggatgagaatagagatcagctggactgatatctctgcacgttaataaaaactgcagctaatctcgtccatccattttgatcactacgggttcagatccaagttgacagtacatatatgtaatatcaacaggcctctagttaattaagtaattagtataaaaatgaaaatatgaagatggttatctggccagtggccttccagtacacaactacacattagcaacagctagtggaaatactcaaataatactgctatgcccaggaaacactagtaattactacctccgtccctcatataaagtcatataaaggatattcactatttttaaaatactaatgtttgaccactcgtcttatttaaataatttgtgcaaatataaaaaagaaaagttgggcttaaaatactttagatgataataaagtaagtcataaataaaataaataataattttaaattttttttaataagacgattggtcaaacagtacaagtaaaatgttaaaatcccttatacgagttgacggagggagtaattaaatactgtcgccgttttcacgtcgctaccgttttaatttgtctgcaatataacgaattaatccggctatctgcgatatagccaatatatcatatctatgcgttatcttgttggaacgtacaggatatggccatccatgcgatatggccaaaaactctatgtacggttttgttacatcttaatcttctccgtcgtggccgatagagaccacacgtattacaagctaatcacaaatctagggatagctatattatatatttgtttatgacccatatttttcaccccaaattagtaagataagattcttttttacattgtaaatttaaaacttatacatatactacatattaaattacattatttacatattgttattttttttctaatatacgagtataaaatgttggaaatatagtcattaatcggcatattttaatccaagaaaaagaaacaatgatcatggcataagtagtgtagggtgatcttaacataaccagtagcatactatgcgcatcatgaatgtcgagaacaggaacataccagtaacgcgataacatgctagaggcatcatgtagaacaggaacaagcacatagtataggagaagattataccccgagaatggccctccgctggatggtgaggcagaattgcctccgttgttgtagtcgttcacggcacctcctcctggcgcaccagctccggatccagatccagctcctgtcggcggcggcgtaccaccttcgtcaacagagggcggagcaactccagacatggcgatgagcagtcgtgcgga

SEQ ID NO: 4911 - DNA, 31715 bp, Oryza sativa
actaaagaagggcaaaaccgtcttttatcccgctagttaacatcgtcaagtgtaaaaactaacagaagtgctacatagggaagggaaattttagaagtgcctggatagggaactttttaagtttaggtgctatagagggaagagcaactttttttgatgctagatagggaattttctctaataaatttgagatgatggaacatatacaacacatcaaacttctgtagttttttatcaagttgattcaaacttctctacctaagtttattttagatgagctaagaatagtaatatgaaaaggaattgaactttgatatgtgtcgaggaaaaggaaaatctatgaattttgcctgtgatcttctgtgtagtactaagcggctgaagcataccataccagtctttcataatttaatattaatataaatatataatttaaaaagggagaatcaacatttagctattggcagtcaaaattatagaatcttgaaatttgtgaattgcattatacaaggtccatgcttcagagatggtactttgtaaaaagaatccttaaattatgaggcatagcctggtaacactttgaactgtgcactgcaacttccatctatgcaaacacacaaatcttaccgctgtattttttccaagctataaaataatattagcttgttcattaatttatagcaggtgcaggcagcttttaaggttagttatgttgatatataggtaactataaatcgagttatgttgttgtacatgatgaaatcccaaattctaaagagagtcgtatttgaagtttattgatgttagagccttaagagtcattttttattggaaacaatccagcaacttaaaatactacctccgactttttctcacatgtttgaccattcgtcttattcaaaaattttatacaaatgtatatgatataaatcacacttaaaatactatgaatgataaaacaactcataacaaaataaattataattacgtaaattttttaaacaagacgaatggtcaaacatgtgagaaaaagtcaacggcgtcatctattaaaaaacggagggagtatcctacatggcgcaaaagtacacaccttttatggattagtattacagattataacttatatacgtataggaaaattagcattacttgaaacatataatttacatatacttttaatctttattgtcttagaggcatatgcccaggtggcaacaacagcagagggcaataatagaatatgcaattcctatgacatgtagcatataatgcagaaaacatttttgaagataaaatcatacgatggcacgtgaggaggaggcaacagcagcatatatagggaaatgacaggaagtgcaattcatatgacatgtagcatataatgcagaatttatttttttagataaaatcataggatggcacgtgaggaggctagactcctcctcctcatcgtcgctgcggccgctagcgaagaccaacgcacagcaataagcttcttcaggccatgaccggtcggcgtctggccgtcggcggcggcgccagacatggcatgcatgcgtgcaagttagggactacatgaaatcgatttgcaggctctattcatatgtaacatctgcatgaaacccaactgaaattaaactaccaaacattttatcattagacgcaaacggaattgatcgccctatcgcataaatccgatcaacccaattccagggcatccacccaaactgctgattaatctaccgactgatatgagatcatacaaatcaaaagaaatcaggagattgccaagtactcctatttagcttacctcgaaattgatgtcgtggaggtggggatggaagtggatgcggatggtggatcgacttgatcagcgacggcagtggatgcatggggatggcggcgtcgatgggagtggaggtagtgacggcgatggacggtgatggcggcgatttttggaagagaatagcgagagcgatgtttgcgctattgtgggagagagatatcggaagaggaagagacggcgattttttcggagaagagatggggagcggaagaggcgcgagctttccagagagaaggcggccggcgtattttttttttcacatttactcacgcgtgggaatagattagatatacttacgcaggggagtatccccgaataatgctgcgccacgtggcgtttgtctctggccgggaacgtgcatggaattcgtatatagagatacggaccaagaaaattacattagcataataatccgtgtgtaacacatattatatttttttcctttttaacccgatacctacacctatcaaattcgatacgtgagtatcacccccgatacttgagtatcagagccaatacctatagataggggtgggaaaaaaaaaccgaaccgaactaaccgaaaccgaaaaattcggtcatcagttgtaactaaccgaattttatacggttttttcggtcatatccttcagttaaccgaactaaccgaatcaatatgaaggcccaatacagcccaatagcccattagcgagaaaaccctaatcccccgtccccacctctccttcccactcctcccgtcctccccaggcccccacctgcgccgcgctcgcgcctgcttctctccgctttctccgctttctcctcacatcgcacatctccgctttcttctcctcgcgccgtgccacagccgctaccttctcctcgcggcgtgtcgccgccttctcctcctcgcgctgtgccaccgccttttcctgctgaatcgccgccgatctgcacatcctcgactccgacgaaccctcaactcatggtggcgccgcctcctctccgacaggtgctgtggaggtcactcatagctcctagatccagcgccgcatcccgtcgtcaaggtcctcatgccaccggcgaagcccacctccacgtgttgctcgcgccccttcaactcctcttcggttagcatgcacttttgtggggtttttttttcgatctaaaattgtggatggtctgtgttttattcatctcaagaatctcggtcgagaccgagaccgaaaaaaccgagaccgaattgtccggtcttcaattttatcgaggaccgatcggtcttgactttctgatgaccgaaatttcatccaggaccgaagaccgagaccgaattgctcggtcagaccgaatgcccacccctacctatagatatcagatccgatacatgagtattaaatccgatacatatagatatcagatccaggacctgagtatttgtcacaccccaatccggcaccgccgcacaacggcacctgacaggagcgtgtcgtagaaaaaacggcgcgaaccgcttccttacgaaaccgcgatctcggtaccagtcccaggacatagtgctggtacccacggtgacaaatatgaatcatagcaatccttaaaataaatagaggacttatttaccttaacttaggttgcagctcagacagcccgagaatgcaaccgacgacacggacgaggcgaacaccaacaacagcagcagcagcggaaccaacggactaacacccaacaccacaggcgacggctgggaaccaggacgaaaccctaatcttcacttcactttatcttctcttcagggcggaggaactatatatatatatttatatagagcaagagtgagtactttcgtactcagcaagtcacgggaacttaggtgtttgatgcaagcttggaggagaggcaaggttgttttacaaatcttttatttgaagatattttgaaatcactaagtgatttatttctttctatgtttgggcgaaaagagacttgcgtctcgattcgactttatgagatgcttttcaacagctcatttagtaacgtaccgacctcccgggtcagatcattacttctcggctcccagagcttttttcattttctcggactcccagagtccagctgcccagcagcacaacaatccgcttccactcgggaagcctagtctatgatgcccgcagacatcccgaatcacacagattcgtttctgaccactcaggtcatccatctgccacataggctgattctggttacgattcccacaccacaacaacttttcacaaagcacaggcaaacaaatctacgcaacgggaaccacctcacatccgcccatgaccgtgggcacggctgttcgaacagtttgttaacctctgcagaggggtacactttacccacaagacacgaacttactccagacactggccggtgtcagaggttcgcgacaaagcctttctcaagccgacccagggatacctcatgccacatagaaggatcaaatcctcacataaacataggccattttaggcgtgcacaaatcaaactccaaccacctcgatcggtaatctggcaagcttcgcgttcttgccttaccaggaacccggtttggctccaaccgaccccgccccggcgttcccaactattggcatgcgaggtttccctgaaccgactagctacttagccagggtgtcccattccaccttgtggttgcactttgattatgttcgatgagtttcccacaggaatcggtccttatatgcgaatacgggacagtgccacataggcacaacccccgcatcgcgagttttcacaattcattttattttcaaacacaccgacaccacatgtcgggttttgaaggcttcacaaacccatttcccaagttttcgacaagcaatggtgtatgtgggatatttggtatacgcgctcagagagcacgaataccgaggtaccacaagggtggagcgacaaggaatcagggtaatacgacctacggaaattagtgcgactactgggtaggtccgtcggtttggcacgcaaaccgaggccaagcaagttaagtgtgtgattctaataatgcaagttacaaacaaaataataatgattttccaattataggagcaattggtcaaagggtgacttgccttgctcaaagtcttcacgaagcttcacgaatcttcaagaaaacccgcgatcgacgaaaatccggtaaccgcaactatacgcaaacaactgaaaacctaagcaaaagaccaaaagagggatcctatttagactaattagtagtgccattaaatagatctcaattttacggaattactggaagtggaacggaggcaatcggacgaacggatagagggatatgaattttggaagtttaaaggaatttttctggacaaggagacgatttgtcggaattttctggaatacgagagatagtttatggaatttatagaaataatattctcaagaatattattgacatccactgacatacgggctcgaggggacgaattattggaatctccggattaagaggatgggtttatggaatttggaatataggaaatgatttattgaatttctagaaaagagaaatatgtgtggagtattgaaaaagatattcccaagaatatctttgactcattgacacgtggggccaataagaaggtgagagagagaggagcaattggagggagtaattgtggacttttagctcttgggtgatggacactgggcttggacaaagggagtgtatgtggactttgtttgtcttacttatcaggctgaggaggagggtggctactgggccaagcccaagagcaagagagagggggcggctgctgactgggcgtcggctgacttggtcaagtggggccgacggctgaggtggcgccaacgtggacgtcacgtcggatggggaagggagaggaggccgggcggctcatcggacggctcacggcgtgcggcgggatccggcgaacggcggcaagccggaggggcggctagcactggcggcaggaggaggagaaggggaactcattccacggctcggatcaggaagacgacgcgcgacgacggccggcggcggcggccaatctcgccgacacgccaacgtggccgcacgcgagaagagcgaagggcacgcgggctcgggcttcaccgaaccggtatggggttgcgacgcgcacgcggtgacgcgggacctgatggtcaccggcgacgcacgcgcggtggcgttatgcggcggcggaaggggcgacacggcgcggaggcaaaggagaaggccggtggcctagggacagtcagggggagctcaaggggatctccgggagcgtggcggcgagaggaatcggctcgagaggtgccgacggcggtcgattgcggcggcggcaatcaccggcgagcaaaaggggaaaacacaacgagacgacgaggattcgattcaaaggggtgggagcatctccggggttcaaggaatccgtttctggtgtcggatggggcggagaagcactgaggagggccggcgacgagcagcggcctccgggagcggacggtaatggcggtgaggccatgccgggcgacggcggtgctagggaatggtttggggaggtcctagggagctcaaggacggtgttggcgagggtggtcgacgagctggggcccgacgacggcgcgcgactgcgcgcggcggcggaaacagagcaacggcgaggcgcgcggcgcatcgtgcggcaggctatggcgtgcggcggcgggcgcggcatagcgagcggtaggaggaaagggttcggcggggagctcaccgacaagaggaagcggcgtcggcggatcggagggagtcgtggtgaggtggtcgcgatggtgggacggaacggcaccgggtgggcgcggccggggaggaagagaggagaggtggcgcccggagctcctcgtcacgcgcccacgcacgcaccggttcctccggtgctcggcggcggacggcgacgacgagatcgagtcgagcggcaacagggcggcgacggttgttcggctacaatggcgcggtggggggcgaaaacgagagagatggaggggaggggctcggctgtggttttataggcgcgggatgtggagcttcgaggggaaggaaccgagcacgggcgatcaaggagaggcggtggcggactcgcggtcaagttgtgacagaggcggtcacgggtggcaaaggaggtgacggtgtggatgcgttgggcggcgaaggcggtggatcgagcggcggaaaatcgaaccgcgggagcgggaggattagcacgggctggcgcggtcaagttgggggtggcgagctggcgctggcgtctgcgtctctgcctccgagcgcttgcggccaaggagtggaggcatggcgtcgttgcttgggagggaaaaagagagggaggacggtggaaagggggggctttaccatgccggtttgggaaaaaggaggtgggagagggagaggagagcgcgtgaggcagagagacgtgctgcctccacgtcttggacgcacgcgcgcacagggtgggggcgagcggcagggcggcatgggcggccgtgcggcgcaggcggccagggctgatgcggcggcgaccgggcggtctgccacgcgcgggcgagcgcgggaaagagcgaaggcggtggcgggttttgggcggcgacggcgggaatcggcgccgggaggggagagagcagagagagagagcgaagacgggagagagaaagaacgagagagcgagagagctctctctcggctcacatgcgtgcaacgcacgtgcgaggggggttaagatgatgggctgggaggggagatgggccgggggagaaaacggcccacaaaaaatccgagggaggcaaaatagactttttcggaggggattgattcgaagagaatttgaacttggaatttgacttagattttggaattgggatctcgatgagaggaaggagtagacggaggattcaagatggggttttggatattttggatctggggaagtatttggcgatgattcaaagagagggatagaatttcagagtttgatttggagacttgagtcggaagaggaatttcgagggggcaaatttgtgatggtgacgagagggatcaaggacggatttgaattgagatcttggcacaacttagactcgcacacaaagaacgaaaattttcgcaattaggatttttgccgaattagtttttaacgcctcacgaaaagcggagcgttacagattggtgtaacatcccggcctagggattaataggattaatagaatactcatatcaacaagttgcaacttcttttccggaagccaatctccaaagaactccagggttaagcgtgcttggcctggagcaatttgggatgggtgaccgaccgggaaattctttccgggtgcacacgagtgaggacaaagtgtgcttccgggtgcacacgagtgaggacaaagtgtgcagaaaagacatgtgttggtctgtgagggcagtctatgacctatgaaagctatcagatgtaagcgggcccggcctaggggaggcgggacgttacagtattaaacccgatacctatagatatcagatccggtacctgagtatcaaacccgatacctatagatatatgactcatatgtaccatacctagtatttgggtatcatgtatgatacaatctaatacctgagtattacgtatgatacatacatgtatcttgtatggtatctggtacttgcgaggcatatataaatcaggcattgtgggagcccaacgtgtactagtcaatctcaataccagatataatagtgtatcatcaaatattatcaagacaaaaaaatctttttatttttcacaaaccttgctccgtgactcgggaggcatattgctctgccaagacatccggccatgcctacccaagctcaattaatactccctccgggttgataatacttgtcgttttggacaagggtgaggtcaaactttagaatctttgattatgaatcattttcaaaatatttgtctttcaaatatagtgactacatgtatagattagtcttaaaaagtactttaataagatcatatatttgttaatacttttttacatattatgatagaaaataatggtcaaagttgtttttttaagaccttgcctttatccaaaacgataagtattatcaacccggagggagtatatcacaactcagagtgctcaactcagcagctctcctgagacctggtcattgagactaaattaatatgcaggtagaatggtccaagctggtgcacttgcactagtggaaacacggaatagctcacttttggtgtggagcggcatgtgcgacttgggttcggaaatggtagttgggagcgatggagcgctagatcgatgcaggggaggtgatgtcagtacttatcctgttgaaacagaatcccgttgtctagccgtttttatttttaaagggttaattggattcataccattacaaatttatctattaaaaaaaataccattacaattcatttatctaaggtgaaggcgtcaaagtcctcctcccgcttcttcttcgcctcctcgggctcgtcgcggcagcgttgctgcgttggcgtgcagggtggcggcgtcgggggcggcgttctcgtcgtcgacggagacagggatggagcccgtcgtgtcttcggcagtggccgcggcgagctgggtcctgcgccttgctggaggtgaaggcatcgaagtcctcatgccgcctcttcttcgcctccttgggctcgttgcgcgcgtcgcgacggcgttggcgttctgggaggcgtcctcgtcgtcgatagagactggccgtgcgtcttcggtggtggccgcggcgagggagtcgtcgtcgccggcgagagctcgtgcctggtcaatcctccgcgcatgcctccacgtcctccggtgggaggggccaccaacgtcgaagagaggaggaggcacacctgaccggatcaccggagtagcttcagctcggcggcgttgcgggtaaggattggtgagtggaagaggtcagtgcagccagggaggaggtagtcgtcgggcaggccgagtggatccaccaactccgccatcgacactcccagtcccagtcccagtagcgccaccaacgatgtcgtcgcccactccgccgccggcgtagtgccaccaacgacgtcgtcgtccactccgtcactgccggcgactgccccgccatcgccagagaaggtgagcaacgacgaggacgtaggtggaggaacgacgtgcgacctgtacgacggggagtgggtgcgcgacggcgacgaggaggcgcggccgctgcacgcgccgggtcgtgcccctaggccgacgacgaggcgaacgcctgcgcgtcgaacggccggccggacgcgccgcctacacacggtggcgttgggcgccgcgccggtgccgcctccctaggtagtactagcaagcacccggccaccgcttggctccgtgccctcctcatcctccagccacccatgggccatggttgatccaatctcgctaggtttgtatgttcaacgtgacggatttcctggcgaggctgtgcgcggccatcggctgatgctcattggcgactccatgaaccggaaccagttcgagtccctgctcaccgccgccgtcgccgccacaactagcccgctgcccatggctgcttgttcagcagaacaaacaagtttcgttcctctattacttcagcttgcgaatgcaacttgttttctcagaaaccatctcctcattttgagaaaacatctgctcctactcagagaagaagatgggagaaagaaggaagaagacggaaaagtaagaaatagatggaaaacgtgacagtagtggcatggttctatttttgtaaaattctaatgacacgactacgaatagataaatcgtaatgttattttttattacacaaatttgcaatggcatgaatccaattaaccctttttaaaagttgcaaggagaataaataggagccgcggcacaccaggtaagcaaataaaggataggcaaagcagccaggggtgacggcagatgcgtataaaattgaaaacccgattatgataagattcatttttaaaatcttaagcaacgagatgactatttagcaaaattttaagaaaattattttttaataaaaagttagttaattttaaataggtgctagctagccgtataattacgcagggcacatctagtcagttatgctaatgaaactaggttttgtgccaatatatataatgtagcccatgtgtaataccggcttcaagtggaatgacggtggtaaacccagcatgcatgctttgacctggaagatgtaaagtttcgttcatccatataggaagtgctataatctcaacaactatgtttcttttttttttttgagaaacaacaactatgtttcttgaaagtgttttaccttatgtcaaccttaataaattcgatcggggcacttcttcaccaccgatccggtgaaaaaaataatgctacctccgtttctccgttttttaatatatagcaccattaactttttaacattcttttttattaatttattttgcaaatataaaaaaaataattcatacttaaagaacatttaataataaattaagtcacaataaaatatatgataattacataaaatttttaaacaagataaatgatcaaactatctcaaaaagttaaaagttaatgatgtcgtatattaaaaaggaaagagtaacaaccgttttggaagacttgtcgtttgattacactgcaacctcgtgcaacaaaatatatctagaatgcaatgtacaatcgatacacaggcgagagagaatttaaattcagaacttgaatttgcccgtggagacggccctggccctgtcgctgagctccttctcgatgtggcgccacagcttgtcgatcatgtccgtgcgggtctcctcgtccagggtggtgtcgaagtagacctccccgatcgcatccatctccttgaaccgatcgtcgtacccgctcgcgatgatgtacttgtccgtgaactcgcgccacagctcgttgtgctccaacgactcctcctcctctgctttcttgatcgcatcttcctcatcatcatcatcatcatctgaatcgtcggcgtactccggtcggtgatgacagccacaggtggtagaggaatcacggtggtcggaggaggagtcgccgccgccgccgccgccggcgggatgaagattcgtctcgggatcatagcgggaggccgatccgaggacgatgaagtaaggatcgatgcacttctcagcgaacctgcggcacttctcttcttcatcctcatcatcatcttcttcttcctctgcgtcgcccaacttgacgtccgatcggtggctactactacgacctctctcgccggcactggcgccggaggagtcgccgtcgccgtcgccggcggcggcgggatcaaggttctcctcgagatcacggcgggagggttcgaggacgaagtgggtctggacgatgtcccagaggtcgaacttgaggtcgatgatggcgcatgacaggtagaacctcatcctccgttgtgcctctggggacagcgactgtgacggccactgtttctcgccgccgtcgtcaccggcgaccttgagagcatcggcggctacatctccctcggcggccattgctggatcgggtttcttggctcctcgagttaagcgaagaatcaaatcaaaactaatacgtactaaatcgtacgtgcaactgctgtgtacgtggtgcctggaatagttggcttggtagcaaataaatagggaggaacaacaactccgaaccggattagcaacgcaaaatgcagcttaatttccgagtaattaattgtttctggatttatcaaagccttcgatacgtacagtatccgagtcggagaagctagcatcgccatcattgagaaaacaaataaataaaaataataattagagatattgcatcgatcgatacgaatccgatactagcttagatagacggcccactaacccctcatacaacggattgacggcccacaagatagatagccatccgtattgagtgagatgagagatcagaagatcaccgccttcttcgccgcacgccggagctcagtcggagaagccgccttcctcatcaattcctcgccggatgtcttctctgcaccgcttgctcgatgctgatccctcttgcacctgaattggtcggagctatgcgcgtggagggaattttcttggtcgtcgtggacggtttgcgggagactctaaggccctacttggggaagcttgttccagctgcagcttttctcaaaagctgcttctgctagaagctgccccaaacagtccacagcttctgagaatctatagttacagattctaaaaaatgaactaaaaagtcagaagctggagaagctgggttttaaagcttttccagattctcagaagctggctaccaaacagctgcttctcagaatctaaagccctccaaacaggccctaaggccattcccaacccaatgactaggatgttgtccatagcattaaataagctgtcacctaaaatgaaaaataatgtgacaagtgaataaataaggaaagagaaggaaaccatgtcttgcatgagacatggtttctacgcaacattcaagacatcatgtgagataagtagcattaaattcaagtatagaataatgatgtttgcattggaagagtagtgtagtacagtttttgatgatgtggagtttatggaaactatgtatagtgtcttgggttggaaatggcctaagggcaagtttcatgggggagctgggtgccacgtctaatttaaaccatgtcatcttcttattaattaagaggtaacaaatacaacatgtcacctctagtacacaaaccccaatattagtttactctcacattatcttacatttttcttggagattgtgtagaggttgccccttgcatgagggctggtttattctctcttctaacttctctcttccaactcatcacctaatcctatttggcaaatttagaggcaacatgtagaggcttatagtacttgccctaacagttactcctacaacttcttttaaaatctccggagggccccattcgtttataaagaaacacagtataactactaaaaataattagccgtaaacgtaacacttatgtcaaatctagagttgacttaaatccagataaactagttcaacctcaaataacctaaccggttatttgagctatcgcacaatcaatcccaatgtttgcaatgttttgctttgatctaacaaaaaccctgtgcgatgagataattactgtgatatgccagtttttctggccccaacgagaaaatgaaaataaactacaccggttatcctgggatctctcttgtgcagccgcaagtcgaaaggtgggctgggttatagagaattgcatctgttctggccatgctgtgctcaagttctcacggcgaaatactaccgtgtggcaaacttctgaatgctagggacgggccggggatttcggggatgtttagattcagtggtgtaaagttttggcatgtcatatcggatattatatagggtgttatatggggtgttgagacactaataaaaaaactaattatagaatccgtcagtaaatcgcgagacgaatttattaagtctaattaatccgtcattagtaaatgtttacagtagcactacattgtcaaatcatggagcaattaggcttaaaagattcgtctcgcaaattagtcgcaatatgtgcatttatttattttttagcctatatttaatactttatgcatgtgttcaaatgttcaatgcgaaagggtgtaaaattttaaagtgagatctaaatatacccttcatatccctggagattggagaagtattgtacgaggcttgaaagctctgaatgagtactgatttggggagttggtgatgccaatcagattgacatttggaaggatacatggataccggctggcattactcgtaggcctgtcacgcagcagagcgggatgatctttgtggagattatgggtatcccatatctacatggcgacggtatttggattgggtaccggatacttaatgtagatagaatatcttatctgtatctcgggtttgtttcttaacttgtatatcaaggaaacaccctgagacttagtcggttacgattgtattttacctatatcttcatattccgttaggaatatagattatcttttgtaatccggactccttcccatatataaggggggtccgggcgcctctaggggtagatgctgatttttcccgaatcataccatcaataatacactcggcggattcatccccggacaggagtagggtattacttcttttataagaaggcctgaacctgtataaatcttttgtctccaaacccatacactttccgagcttgatagccacccccttttattattgccgaaatctagtttcgacagttggcgcgccaggtaggggtagcgtcaagcctttcgccgattagtgcgatgggttccgtcaccggcatcgacgacctcgtcttcccaccagggcagacgtttcggttcggcagcctcgacttcgtcaccaacaacttcggcaagatttctctccttgactcggaatcagaccagtcgggagagaatcgacttccagtcccgtttggattcccaaacgcggctgaaagttacttcaagaccatctcgatcgagtcggcttcaaaccacccggccgagatcgcattttctccaacgacgccagatcaagatgatggggcttacccaccgatcctgatgaagctccccgacgatctagcggccgtcttcaccacgacagcgtcttcatcccgtaggcctaggcggaagtcggcttcaacaccgatttcgcctagcttcagggaagtcggcgtcatcctccaaccactcggcacggtttcgacggatcagctggatgactacaacagctctcccaccgtcgactcacgtcctactgacatcgtggagtacgacgaatttagttctcgctacaacgacttcgacgacttcaacgacttcgacggaagcctagatgacaattacacccctctctactttggcgttttcatggccaataatgagacggaggagcaacgccaagcccgggagactgaagaacgtcgccgactggaggaggagcatcaagtacaagaacaagaacggctacggcgtgagcagcaggaccgtgagcggatcgccaaggaggctgaagatcgacgtcagcgagctttggaagcagggcgccgagcgcgtgatctcatcggccaacaagatgtcgaagggacaccggttttccgcacccctcaacagaatgcggttgccgcgatcacccttctcgacaccctcctcaaccaaaacgagctcaatcgttccgaccacgtcgtcaacatcttgaaccagacgaagaccatgatcgcagcatcggtcccagttaactccgaaagcgtccacacgccgactggcagccgagttccccacttccgatctcatgactaccatcatccaagcctcagcatcactggagcaggatccaatcgcaggagcaggggccacgacgagcggtctgttcactcgcctcccgaacttcatagggagcgccgagtggaacggcctcactcaccacctcgtcgccgccccatcgatcttcgcgacacaatcatacagcgccgagcagctcgaggctaccatcactcgccggatcgccgcgacgacgaccttgatggagtagcggccttcaccgacgatctgcgtcgagtggattggccagccggcttcaaaccgactggaatagagaagtatgacggcaccactaaccccgaatcgtggcttaccgtctacggtctcgcaatccgcgcagcaggaggagacaacaaggccatggcgaattatctaccagtggctttagcggattccgcccgatcttggctccatggattgccccgtggtacaattggatcttgggccgaactacgcgaccacttcatcgccaacttccaaggcaccttcgagcgtcccggcacacaatatgatctttacaacgtcattcagaagcccggagaatctcttcgagattacatccggcgattttctgaacaacgtaacaagatctccgacatcaccgacgacgtcatcatcgccgcattcaccaaagggattcgccacgaagaattggtcggcaagttcgggcgcaagcctcccaggacagtcaagctcatgtttgaaaaagccaacgagtacgccaaagctgaagacgccgtcaccgcatcgaagcagtcgggtcccagttggaagccgaaaaatacgccggctacgggaggaggtggaagtaacaatcataaggaccgcaagcgtaagcctgaggaacttgttgcaaccgccgctcactcttctcgacagcgttcgcgcgtcaacaccttcgacaagatcatgaactcccaatgcccgcatcatccaaactccaatcacgtggccaaagagtgcttcatctacaagcagttcgcggagcagtacaccaagtctactcggaagaactccgacgaggaacaaagcacgtcaaggaagaaggacgacggcgacaccccggctggatttcaagaccaccgcaaggagctcaaccatattttcggcggccccatggcttatgagtctaaaaggaaacaaaagctgaccgaacgggagatcaatgctgtccagcccgacacgccccaatatcttcgatggtcagagatcgcaatcaggtttgaccgctcggatcaccctgaccgagtggtccacccggggcggtaccccctggtactagacccagtggttcgtaatgtcaagcttcgcagaaccctcattgatggtggcagtgcactcaatatcctcttcgccaagaccctggatgatatgcagatccctcgctccgagttgaaaccaagcaatgcgccttttcatggagtaattccaggattatctgcaactccactcggccagatcaccctcccagtcacttttggcactcgggaaaatttccgcacagagaatatcagctttgaagtcgccgatttcgagacagcataccatgccatactcggacgcccggcgttagccaagttcatggccgtcccgcactacacttacatgatgatgaagatgcctggtccccgtggagtcctatccctacggagcgacatcaagcaagccgtcacatgcgacaaggagagttgcgacatggcccaaacccgcgagatggcgtctgcccgagaggaaatccgactggctgcaaccacggtgagcgaaggagaagtgcccgctgccaagacttcaaaaagtggggaaaccgaagccgcgactaaaaagattcccttagatccttctgatcctaccaaaactgctgtaataggcgccgagttagactgtaaataggaaagcgcgctcatcacctttcttcaaaataataaagatatctttgcgtggaaaccttcggatatgcccggtattcccagagaggtgattgagcactccttacatgtcaaagaagacgccaagcctattaaacaacgactccgccgatttgcacaagacaggaaggacgcgatcaaggaggagttaaccaagctgttagcagcaggcttcatcaaagaagtccttcatcccgactggctggcaaacccggttctagttcggaagaaaacagggcaatggcgcatgtgtgttgattataccgacctcaacaaatcttgccctaaagatcctttcgggttgcctcgcattgaccaggtagttgactcaaccgccggctgcgagctcctcagttttttggattgctactcggggtatcatcagatccgactgaaggaatccgactgcttgaagacttcattcatcacgccttttggggcatactgctacgtcaccatgccgtttggactaaaaaacgcaggagcaacctatcagcgcatgatccagagatgcttttcaacacagatcggccgcaacgttgaagcctatgtggatgacgtagtcgtcaagaccaagcaaaaggatgatctgatcttggatctagaagagaccttcgcgagcatccgcgccttcaggatgaaattaaaccctgaaaagtgcaccttcggagtaccgtcagggaagctgcttggttttatggtgtctcataggggcatccaagccaacccggagaaagttaccgctatcctcaacatgaaaccgccaagcacccagaaagatgttcagaagctgactggatgcatggcggcgctcagccgattcgtttcaagacttggcgagcgggggatgcccttcttcaagctactgaagaaaacagataatttccaatggggacccgaagcacagaaggccttcgaagatttcaaacaactcctcaccaagccaccggtcttagcttcaccacacccgcaggagccgttgttgctgtatgtatcagccacctcccaggtcgtgagcacagtcttggttgtcgagcgtgaggaagaaggccatgtccagaaagttcagcgaccaatctacttcgtcagcgaggtcctggccgactccaaaacgaggtaccctcaggttcagaagctgttatatggtattttaattactaccaggaagctgtctcattactttcaaggtcactcggtaacggtggtcacatcatttccactcggcgatgtactgcacaaccgcgaagcaaatgggcggattgctaagtgggctttggagttgatgtctttggacatatcattcaagcctcgtacttcaatcaagtctcaagcgttagctgattttgtcgccgagtggaccgagtgccaagaggaagcccccgtggagaaaatggagcactggaccatgcattttgacgggtcaaaaagactttcgggcactggagctggagtggttttaatttccccgactggagaaagattaagttatgtgctttggatacatttttcggcgtcccacaatgtcgccgagtatgaggccctccttcatggattacggattgcaatttctctggggataaagcgtctgattgtccgaggtgattcacagctggttgtcaaccaagttatgaaagagtggtcctgcattgatgacaacatgatggcatatcgacaagaggtacgcaaactggaggataagttcgacggactcgagcttagtcacgttcttcgacacaacaatgaagctgccgacagacttgcaaactttggatccaagcgcgaggcggcaccatctgacgttttcgtcgaacacctttactcgccgacagtacctcataaagatgctactcaagttgcggacacccatgacatcgctatggttgaagccgactggcgagagcctttcatacgatttttaacttctcaagagctccctcaagataaagatgaagccgagcggatttcaaggcggagcaaactttatgttatgcacgaatctgagctatacaagaaaagcccttcaggaattctgcaacgctgcgtatctttagaggaagggagacaattgctgaaagacatacattctgggatatgcggaaaccatgctgctgcgcgcaccattgtcggcaaagcttaccggcagggttttttctggcctactgcagtgtccgatgccgacaaaattgtgcgcacatgtgaaggttgccaattttttgccagacaaattcacttaccagctcaagagttgcaaactatcccgctgtcttggccgtttgcggtttgggggctcgacatggttggcccgtttaaaaaggcagtcggcggttatacgcacctcttcgtggccattgacaaattttccaagtggatcgaagctaagcctgttgtcacgattacagcagataatgctcgagatttcttcatcaacatcgtgcatagatttggagtgcccaatcggataatcactgataatggcacacaattcaccggcggagttttcaaagacttttgtgaagattttggaatcaagatttgctatgcctcagtagcacacccaatgagtaatggacaggtcgaaagggctaacggcatgatacttcaagggattaaagctcgagtttttgaccggctaaaaccctatgccggcaaatgggtgtcacagttaccatcagtactttggtctttgcgtactacgcccagtcgggccacaggccagtcaccttttttccttgtctatggggcagaagcaatgttgccgagtgaagtcgaattcgaatctttgcgcttccgtaatttccgtgaagaacgctatgaagaagaccgagtggacgacttgcaccgactggaagaggtccgcgaagcagctttgattcagtcagctcggtacttacaagggttgcgacgttatcataatcgcaatgttcgatctcgtgcctttctagtcggcgacctggttttacggaaaattcaaaccacacgagatcggcacaagttatctcctctatgggaagggccatttattatctctgaagttacccggccaggttcatatcgactcaagcgcgaagacggcactctcgtcgacaactcttggaacattgaacatcttcgtcgtttctacgcttaactttatcattgtatttccctattttgactgtcaaacatcaagttttctccttgaagttgtcagtcgggggctatcatcataataatggagtgtgatttttatcaattcagtttgcttacttggtttatcattgccttgtttggtttttctacttagtttgcgaggactgaaagtttttaatagcttctttgggttttaggctcaacaaagcttagcaaaaacttttaagaaatcaaaaactttgcaagaatcatcaagcacagcataaatatgccagtattgtacaaattgagcctccatgtattacatttacacttagtcagaatcagtcctttcatcatcagagttattatcgctcggctgaaggtcgttgttgcggaattgttctacaacatcacttgcaatcttgtcagccgcactctgagcattactgataagatcaagagcagcttcttcacttgtcccgtctgcaaatccatcaatggtgtcgacttcaattctcgggtacaaggattttgtcatcgccaaggccatgccagctcccatacttccagctttcttgatatttttgaaatatacttccggagcaacactcagcttgtcaaatatttcggttgcgtcgagtgcactcggaccaccattattgaggaacatggcttggataattggtgcagcggcattggcgacgttatcccttgctccttcaagcctcttgatcttaccaaccaggacgtcaaattgggcttgcgattttattttgcgatctacaaaacacatttatgatgaggatttattgcattataaagagagaagctcagattgtctgctagcggtaccttcaacttccttcaaggctgagtccctttgcgcagccagttctgtcttgtctctctccagggcttcaatttgcttcgccatctgctccatcctggcggcttgcgctgtttgaaattcagatggttgaggatacagttatgccagtttaaaccgataaaacggatctagggattaccttttgatgaaccactcagctcatagtttgaatcctggagctgagcgattcggtcccttaactccttctccgtcctcttggcgtgctccttggcctcatgtagctggtccctaaccgcttcaagagttcccaaatgaggaaccagcttttccaaagttgtggtcttggcctcattgcgaagatggattctctgcatgatggatcatggttcagttctgctaaaaagaaaaacaaagttaccgaaggctgtcgctcggaagacttacatttacaatacgagtggcctctccaagcgctttcttcagctggcacacttcttcatcttctttttgacggtttatgactataccggcggcttgtgagttctcgtcccaccatttaatcaagataggaggacgagagtcgtcggtcgcctttatgcgagggatttcttctccgtcatcacctgatggtcctgatgtgtttccaagacattagacggatacactgaggttatttaaatcgccgttgtatgaaaagacaactaacctgaagatgtacctagctgagcgtgaggtgatctttgttctttgcctggagatccagctatcgagtcattaccagcttctggcccttgggaagctgtcgtctgcgcttctacttcagggatttcttgatcagggcctgcgtccgactggtttccagtcgggggctcttgagttgttgctgcttcagttgttgccgactggtttccagtcggcggctggtcactcggattggcctggtcacccgaagcatgggcgccggtcggctggcttttggcagtcggctggctttcggcagttggctcggggtctttggatatattttgctctgccatggctggatcggggtcttttccagatggatctatatcagatggtttcctgcaaagtattctttcagaatttagcatcattttcatgagagagcttaccaaagtgaaatcataccgagaggtcttatacctggaagatgttctaatttttagcattgcgcggccggccagtttcttcctgggcatggtgcgctttgggggtttattaggcgagcccttatccccagatttatcatcgtcgccttcatcgtcatcaagcaccagtttcctcttgcgaggacccgtctgaccagttgatttggaggtctgaggttgcggatctggtctgatcgttggccctctacctccctgagcagtgtgttggcgaggagaccggcgctgagtgactggtggatctgacttcatcagtgcatattcctgaacaagatgcttccatagttagtcaattcagcatgaagacaaaattatgttctgatcatggtttgaagatttccgatacatacctgcggaggcggattgaacgcattatatggcactactggcagctgatgagagtagctgactacaattgcatttgagaagattttatacatcctctccttcatgattttgaaatccagggagtctggttcttcacggttgggatcatgtttgccgtcgaactcgaatgctgtgcgggatctttccttgattggcgctagtcggcatttgatgaaatgccgagtgatctgttctccctgtaagccttgttctttaagatttaacatacgatccaacaactccaaggcttgtactgcttcatctccgattggaagagagttccaagtatcttggtacattggaggaagacaagagtacccgggaagagcaggttcaggattctgaacatagaaccagtttgcatgccatcctttgttcgaagtcttgaagggcattgagaaatatttttggctcagagttccccttagttggaatcctgcccccccgactacacatggtttgttcttgtttggttggggcttgaggaagaagatccgacggaatagggcaaagtgaggtttgatccccaaaaaggcttcacaagcatggacgaaattggcgatatgcactatggaatttgggtttaggtgatgcaagctgattccatagaaattcaagatcccgcggaaaaattttgaggtcggaagagcaaagccgccgtagaagaaatgcgagaagaccacaatctcatgagtatccggagacgggaaagcctcaccgtgcgctggtcgccacccgatgatctccttggcagggagaacgccgtgcgccaccatctccttaagattctcttctgttacgtcggatgacgcccattgaccttcgaagctttctctctcttccgccattggtttcactcaaatgtgttgatttgatttgagggatggcttgggagaggtgagggattgaggcggtggatcacgggaaggattttgatgcacttttcggaggtggatttggccggagttgtgaaccctagttcgccggcgcagctttgcactgtagcggggagtggggaaaatggcgagagttccggcggggaagacgaagcgtcgcttggatatcggattttttcagttaagggtatcggaggtgctaatgggcctaggcctgaacagtacttcagcccaataattttaacagcgtggcccattgtgttccttagggacttaggcatattttgctttggcaatattatgcgcacaacagtgttgcccaatgctgatcaaatcctttttatgcggtcatataattctttggaattattgcaatgcaaattaaaaaggtgcccgacagaaaggcgttatgctgtttttgagcttttttaggctacaaaagctgtttgggttaactaggaatgacttgtttttactatagtcatttccttggcgtgttatatgcctgttttcatggtaaatagtcatggcctaggctatttgacttatttattaccataatctttataatgcttgatgggtaatctttagagtttttatattcggatgcctatcaagtgtgttcgttcgtgaaccttttagagtgtaaaccactcggatttcttttattgtggctaaaaagcagtcggctagcatgcctatttaggcgccgcgtatgcttttgtcatatgatgcacaattgtgttattattttgtctttcaactatatgtttagtttgttaactaatcacatagttgggggctacacctaattaggtgcatctattcgatgcaccatattctttatcttttcgccctttacagtccactcggcaggttttggcttgaggagtttgaagtactcggattatcatccttgagaaggctacgatggtcgactgcaaaggactcgggggctactgtggagattatgggtatcccatatctacatggcgacggtatttggattgggtaccggatacttaatgtagatagaatatcttatctgtatctcgggtttgtttcttaacttgtatatcaaggaaacaccctgagacttagtcggttacgattgtattttacctatatcttcatattccgttaggaatatagattatcttttgtaatccggactccttcccatatataaggggggtccgggcgcctctaggggtagatgctgatttttcccgaatcataccatcaataatacactcggcggattcatccccggacaggagtagggtattacttcttttataagaaggcctgaacctgtataaatcttttgtctccaaacccatacactttccgagcttgatagccacccccttttattattgccgaaatctagtttcgacaatcttgaacaaagttgcagacctcattgatccaaccactggtgattgggacatgtccttagtgaaaaaaaaattgggaaggaaataggaggaatatcctggcaaatccactgaaaagagaaatggatgattttgtggcatgtcatttcaacacaagaggtatcttctggtgaagtcagcctaccatgtgattagttttttttagcagttttagatctattaggtactttagggtttgtctttcatcatgtctatggagttagcattgtctaggctctttttctattttttttaatccctttgttgatgtctctctcgctgtcgtggttatcattgaagacctcgaaacacatgtctatcaggttgtccatgattcaatcggtggcgttggcttcaggttttggatcactaatttgtttggtaacgttggttcgcagatgtctgatgcgaaaactaccaaaggattgagagatggtagccggtgtacacatttgtattgtcattgtcctaaatatgggataccccattgacatgtaattacctcggcaagaccaccgtatatcaagtcatctatgaaaacaaatctcatacatatggataagatctatattatataggaaggaatcccagataagtaaagaaaatacaaattcatgcttaagtccgactagtactataggactagataaggttttccttccacatactttgtacttgtaagagattgatggcaacaccggttaataggagtgtggtaattacccatatcgggagcctaaacctaattaaaaatccatgtctcccttaatattgctacaccttcatttacatcctcataccccaaccccgcctacgtcctcaaaatataatgtatgtgtaccaatccctgtggatgcatataattttggaaaaagtacgaattaccccccgaactatcgtggtcgaccgaattacccctctaaaccataaaaccggacatcattcactcctaactttgcaaacctttcaaataacccccctgctctatccacgacggttttgatcctacgtggcagtccagtcagcaattcatttataaaaaaaaggtgggtcccacctgtcattttcttaccatcactatctctcttctctctcttttccaatctctctcactctctctctctctctcttctccatagagagcgacggcggaggcagcagcgaggcgagcgcggcggcggcggctgaggaggcgaggcagcgtggcagggcggcgcagggggcgggcgcgagcggcggcgacgtcgcagcgtacagcatcagccttcaacgtgcccatggtcgtcagcccgcaggccgtcggcggcgggaagtgccccgtcctcggctgcgtcgtcgacctcaactgcgagtgcctgccggggcagcggttctccgacgatgccgcctgccgcggcccgccggagtacttcaagggccgccaccagctagaacgctcgcgcgcttgctcgcttctccgccgagacgacgacgagaaatcccatgcctaatgctgattaatcaattaaactgtggctttgtgcatgttaattactagtacatcttaattaatcttaattagcatcatagattcacaatcacttccagaacaattcgctaatcgtggtctcggccaccgtgtgccgccgtcctcactgtcgcatcccacgccgccaccgccgccgccgccgccttcgcatcccaggtgccgtgctcgccaagagagatggagagagagtgagagaggggaagaggagagagactcgccgagagagagggagagggagagagtgagagaggggaagaggagagagtatatatgacaggtgggctcaccgtgtttaaaaaaaagaaaatgctgactgggttgccatgcgtacgccactgtttggagagaattttagctagaatctccccgcccaggaaaataaaatgtgcggacgtgccagtgtactaagtacacaaaaataaaatggacaaaggaaaatgtattttattataattctcaaggaattactaaaatacaaaatccttagtcaaatgtgctccacagcccatcggcgaggtggatctgacttggcgattgtgttctcatggttcccggggtctcggaaaacacccggttaattactctggtgggttaaacccgcgagacacctccgattaagctgcgctgtcgtcattggtcttcgcttcacgttctcccatgcatgattgtgatggtggtgatgatgtagatgtgtgtaggcgccggcagcagtccacggcctcatcggtccgtgcgtcggtgttggtgatgtcgccttcacatagactccgcccgctctgccgttcagcctcgtcggtggaggtaaagatggtgcttgtaatggagactagcatggcattggtcgtcggtagagatgccaagcttgtcgtcactggcgatggggtagcatcgcccttctagtctccacagcactggccgaccatcgtcatggtacaagagttagccttctgatcgctgcagcacatacttagtattgagcggtttttaggggatgttaggggcgcagcctagcctgagaacgataagacgcgttccaggaactgggtggccctcttgtatatgcgccgacaatcggagccaaaacccaaattatgttgggtcgcctccgatcgtagtggcttgacttgggagtactgcgccgtcagtcttcgcttcacattctcccatgcatgatggtgatggtggagtagatgtgtgcgggcgccgacagtggtccacggcctcgtcggtccgtgcgcaggtgttggtgacgtagtcttcatatagactccgcccgccctgccgttcagcctcatcggtcttgaacaacgtgttggtgtatattgttgttgaagatatgcatggaattgtgtagctcagatgactcgatgctatagtaattgcgtcggaattagattataaaggtaggaatgatcaacacggatgatagccgaattagtcatggcttgaaggtttagtacggagcaggatcattttaacttctcaccatgtgcggtagcatgcatgcacatttttatttgcttgcttgtcataatgtacagtagcatgcatatacatgcattcgtacagtgcgcatgcacaatacaagcatctgagtaatttcagcgcggcggctgcaaacgacgtgatagcctccggggaatgatgaccttcggatggcttggtcggcagctcctcggcagcatagtgacgctggcagcgaagccgatgaagagcatgtgcggaaatatgcagtgccggttaggatgatattcaatagacgttggcggcgacctgtagaggctacaacgagcgtgggtgacgcagggcgtcaccggccgattagtagagtctcagtgggacatccgtgcccagcaagggcgcatcatgacaggtgccggcaacaggggtccgacgatacccatcgcgaacttgtggatgatatattaacgacttccggatatcgacaactagcaccttggcgacctggcaatggccttctccggcgggcagcggatgatgatggggactagcgttagctggcaacgcctcgccatctatggatttaggcggctcagcggtgtccacggcaactccagcgagatggtttgggacacagctagagctgatgatgccttgcaggcaccgagtagtggcgctccggccggcgttctcttcaagcagcaagacaatgtgtgtagaggatagcagctttgatgagggcgagcggaagtcaacgatgttgcggagaagaggccgcgaccggcaaggcgacgacgtccgatccagcgtctcgacgacatcacatcgccaggtaaagacgtcatgggatagaggttgcggccggcgaggcaaggacgtcgcggcagcaggtagctgtgccaccggtgaccggcgtctccgacgagagggagcaacgcgatctccggctggcggtgcctccgacaagcggagaggacgctatatccagcgggccgggcagcaccggaaactcgcctcgtcgccatcttgtgcatgcatgatgatctgaacagaaagagaaggaaaacaaaagaaaactaagaagttaaactcatggcgatggctgagtacgctgctccggcgatcgtctcctcctccgcgcgcctcctcgccagacgccgaggcactgcggccaacgtcaccggccgccgagcgcacaagttcccgccggatgccgagatacggcagctgatgtcgccggccgcagagcacgcgtgttcccgccggacgccgagatactccggccaagacgacgtgcgcgatggttgccgatgagcagcccgtgtccgctccttgtccttgtgcttctctgtgtttctctcctgtgtctatatgtatgtctctctatggactactgccaaggctgggcacggcgcagcgcctgccggcggcggcggcgtgaactgcaggccggccctcggctcgtgcctctgtactctctctgctgctgccccccctgtaaaatgaaatgaacatccttttgtataggggtgaaaacggtacggaaacggacggaaacaacctttatcgttttcgtttccatatttttttcggaatcggaatcggaatcggaaaccccggaaacgaaaacggaaacgaatattatcgaaaccgaaaacagagcgaaaacgaaccggtgtggatacggtaacgaaaatttatcggaatacagaaacccctcaaactgagcttcaaacttttgtgaagttcaattctcaagttttaacagtcaacaattcattataaaacacaattatatgaagtctaattggtaagtctcaacaacaaaatatattcttctataacttcatataatttgtataacaaatattctaaaaaaattacagcaaaataccatggtataaggtataaagtatacactattagcccgtagcccgtagcccgcagcctctctctccctccacgggccggcttccccttcccctcctccctcttcgggccgccggcccagcccttttgctcctccctcgccgagaagtctataatgcctccttcctctcaattcaaatattttttagggtagtaaataatttcaaatgaaaaaaatgtcaataacaaagttgtataacttatcaagatcaacaacttttgttttggtcattttgctatatgactttgtttcaataatttgaatttgaatttcaaattatgacaacttcaaacaacatttttaaatactaaatgatttcaaatgaaaaagtcatcaacaacaaagttgtataactcatcaatatctacaacttttgttttgatcattttgctatatgactttgtttctataatttgaatttgaatttcaaattataacaacttcagacaatattttcaagtactaaatgatttcaactaaaaaagtcatcaacaataaagttgtataactcatcaatatctataacttttattttggtcatttcttcatccgataaagtgatagtaatattattcacaaattttacatata

SEQ ID NO: 4912 - DNA, 3698 bp, Oryza sativa
caagcatgatttatacagaagagaacggagcgagcccccagcattagaccgtagttggcctgacatcggaagcactcgcacaatagatattgtttaaaaaacatgctctaggtaaacataataaattatagatctgacaatatcgtatagattggaaaaataggtacgataaattgtatataaattaccgcgtacctgtgtagatatatgccaaatatatctacgaaattagtagatcaattaaattattcaacctactaattgccttactgtgtatgcttggtgaggaatagtaactccttaattgatccgattgtgtgtatggtactgttccccatgtaagcatgaaccttgtattttggtcctttaattgatctgtttgccacgtcgttggaacggccaaccaggatgctgcctagagattggattctagtgcgagcataagagaactcctccaatccgacttagaatttacacccatgtacatatcaatctggctctagatttcagctccacggcgctcgttttgttggtggagataagccgagttcggtttgaacttagccagccgatgtctcacaccagtcgatgccgcacaccatggaggaatcggtgtcggattgctcttggatgccaccgacacagtagcactcctcggcgatgatggttctgatctagtcggaagatgtcttggacaggttggatctccccacagccgaagtcgtcgagtagcttgttgtcggagagtccatctcttaaacccatctcgtcgaaatcctgaagcaccaaaatccccctacctggcgcgccactgtcgacgtttgatgtctcgactacggtatttggacagtatagggatcgtcggtgctagggtatacgcgagactgaggtaaaagagatagagacatggatttttatacaggttcgggcccatgaattatcaggtaataaccctacatcctgttggccggagccggagttgctttttattcaccataatcacaccagtacaatatgtgaggtagtctatctaactgttgtcgacatggcggttgaaggtctgactcgtagtcgacaacagggtagccttcctccttaaatccgtgtccggcgagatcagagatagcgctttcgtatctcctgacggtatccggagacaccgtaggggaatagccatgcctatccctgaagtcgatatccggcggcgtgtcttggcgtatgtaggcttgtgtgttgtggcttctggtggacgtgtgttgattgtcatgggtgtcttccatggtctcctcaccctctcctcctaggggggcttgtatttatacccataggtgtccccttgtccaagtagaactagggaaaccaatatggatacaatccgagtagtccttgtcgtttccatgtagaactctggttgtatttccttatccggaactccctcgaggtcagtttccgtataagacatggtatgtggtggatcctgcctagatttagtcaactactattaggtatgtggtatccataaccctgatagtagcccccgacttcgatgcaaatgaacgaattcatattctcaaccgcgcgtagacattggagtaactgttatcgagctcatgtgaccgttctcggtgagtttagagataacgttggacttcctttgtcagcctcgtgcgggcaccgaaagggtttgtctaagtcaatctctgatgtcgaccgagaaagtatagagcgtacgactaagtctcacgtcttgctgtaatcgagaatttggattgaagtcaagaaattttatctcggcgggtacaccatttcttcattctctattccttgtcgagatccagcaaccgttctcgagcgatcgagaaggcgtagagtctgcgacggagccttgtcaacattggtcgtactcgccttagtcgatcttggtgtagaaccatagagacatggagtcttccacaatatcaaatagaattttcctgaaaccaatactcagaaaagaatatcaaatagaaatagcccccaagcgaatgctcaaagggtgacatgttataatatgtatggtaaattgaaaataaattaaatttactgatcaatgttttgtgtatgagcgtcttctctcttaccgacttcgatcagtcagtagagtcatacactctccctagcccccagccttgtcgtcggagaaccgttctaggaggataaggctcttggacccttgacctgccttggttgaataaacactgatcctagcccccagccgtgaagttggaaaagtcaatttccgattacacggcttggttaatacgcacggcgagaactctaacacgaccagatcttacatggtcctttgtctctgaaggatccgacaaggccttatcggctctgggcgtccccagacgaggatcccttaggttcctcggaggccttgtcaagacggcgtaaagggacagtaggataggtttcaacgctaggtgtcatcgtggtaagggatctctgggtaaaacattgggcgatattgtgtacctgctatcaacttggttgaaatagaggtagtaggagagtcgctacaccgctggtcgaggaccaggcagtagtcgtaactcgaccacttaaagtgaaagtagtgggagagaagctacgtagctggtcgaggaccaggcagtagttgtaattcgaccacttggagtggaagtagtggaaggaacgctacgtagctggtcgaggaccaggcagtagtcgtgactcgaccacttagagtggaagtggtgggaggaacgttatgtagctggtcggggaccaggcagtagtcgtgacttgaccacttaaagtggaagttgtgggagagacgctacatcactggtcgaggaccaggcagtagccgtaactcgaccactgaaagtggaagtagtcgaggaacgctacatcgctggtcgaggaccaggcagtagccgtaactcgaccactgaaagcagaagtggtgggagaaaagctacgtcgctagtcgaggaccaggcagtagtcgtaactcgaccacttgcagtggaaatagtgggagagacgctacatcgctggtcgaggaccaggcagtcgtcgtaactcgactatataaagtggaagtggtgggagaaacgctacgttgctggtcgaggaccaggcagtagtcgtaactcgaccacttgcagtggaaatagtgggagaaacgctacttcgttggtcgaggaccaggcagtagtcgtaactcgaccacttaaagcggaattggtgggagaaacgctacgtcgctggtcgaggaccaggcagtagtcgtaactcgaccacttgcagtggaaatagtgggaaaaacgctacatcactggtcgaggaccaggcagtagtcgtaactcgaccactagaagcaaatgtacgagagatcactacgatcaactggttgaaaaccggtgagtaggtgtccctcgatcatttggagtcgtggtgcgaggaccgctacgctggcgtagtcatacctcgaccatctgaagttaaggtgcgagagattgctacatactgatgcgagaaccagtgagcgagcagaattatctctcgaacaccaatggaagttgcggtgcgagagattgctgcgtactggtgcgagaaccagtgagcgagcggaattatctctcgaacaccaatggaagttgtggtgcgagagattgctgcgtact

SEQ ID NO: 4913 - DNA, 9447 bp, Oryza sativa
agggaaggcgaatctgttattggaattggaggttattgttggggtggtaagcgaaactaaccagcaaaagaaaaatgtctttacatatcatacaccagtacattaggattgcactataatttttttcgtaaattcctagttaattagattgcacagctagatttagttcatattatagtctcagcacaagttcaactggcagcaaagtttgctgtggaggtggccaaaaccaatgaagttgaagcgattgtcatctctcatccttcagaggtgattgctgatgatatgaaaggtgaacttaacttgttttgatttgatgcttaattggttgcactacatatacatgaattatctagtcattttatgtaagttgtatccaagaagcctctgttttgtttactaaattcacattgaacgcaggtgtcaaatgccccattgaaatccttggaggtcagaatgaccctataacaccaccaagtttggtggaccagtttgtgaatgtgttgcgtcaaacaactgaggtgagtttttttttttttgagaacaactgaggtgagttgctgttgggtttcattggcacttgatgccaaatgatctttaaattttgtaaaaaaaaattacaaaatagaaagcacaagaataactgaaacagagtttattcaccccccctccccaagaaaaaaaaagaaacagtaaacagagaagagataaatctcccagtgatgatgagatattaaaagatcatgccggcactaattggaagtcaacatttggaaagttgtttttgagaagaacatttgggaaatttacaataactaaagtctaaacactagtacattgcaattaaagttccatacatgtacatggccataaattcggaaaatatcctatatcttcttgacttgttctatatttgcaagaagaccctaattttttcttcaacacaaccactcaataatgtttaagaaaagaagcaaattaaaaagtgcctctaatggattgcatctttgttgcaggttgattactttgccaggatctttccaggcgtgtctcatggctttgcttgcagatataacgccagcaaccagtttgctgtcaatactgctgaacaggctcttgccttaatgcttgactggtttgagaaatacttgaaatgacaatatagatattctattaaaaaaatgacaatatagatagttatttgtgaaaatgcagaaaatcgcacttattcattttcatctaaataaattgccggtgtccatgtataagtataaccagccatgtcaatgtgattaattggctatgattttctctgaattgagcttgtcgatgtattaactgctgaattgatcttcaaattcagcggtgggaattcaacccaacgcacatgcatgtattctcaagttcaaagttaaaactaatcttcaaatttgaacgttggaacaaatgcaagctgaaagaggggacttctgcagttggagcttagaaagttggaggtgaaggcgttgttttattttatttattttagatatctgaggttttcattaagcaaataaaagcatctatatgttcgacaccaaaatgtacaatcaaccaaaaaacacactcagacacacactacaaaaagaaatcagagtagcaaaagaccttacacaactatatcttgacttaaagaaactcaagtaagactaacatatataataaacacgccatcccaatggcgtaataatttcactttggtttttgagataaaaagtaaaagctatacttttttttcttacagaactcttacaaatgctgatgtgacataccgtgattaatctagattcaaagcgccgttactgaggtataacttttgtttttccgccgtcatcctcctctctttccagtttcccttttctctagaaaattaaactgagtaaattgctgtcaataaccgtagggaaaagaaattgacgcatgaacatgctatggaagctaggatactgattaaatttctagaaaataatagagtggcacacttttttttcaattaaatggaagatgcacaagcgcacaaacctccacaaggtttcgttcaattcattttgacaaagcctgtaatttttgttcgtgtacagtggtggggacttaggataaatactgtgtgaccttgagaagctaaagctatataaaaaaaatagaacaggtttttttcccgatgattaaaaaacatgcttgatgtttgtcagtttctttttatatcaaacattaacttttggacattgtcatggttcgaggtaaactatggtatcctttgctaattcaatgctggtattaacctttttcttactgatcgaaagtgagaattcgtttctgtaacgcatgaattcatttcatttttcaattgagcaccatcaccaaaatgtttaaatggtctaaaatttttgggcaataagaaaataatattacatttggttactcattatttatgatattattttctttatcattttccccaatatttatgcgatttcaacacatatgattcgataccgccattttgtatggagcgagcgtgacaagataacaatctacatgaggtcatgagtcattgtcactattcactggaatacatgtgtaaggtgccacaattttgagtgggtagattttcccgttgtaacgcacaagcattttactataagacataaactcacaaaaccttacttttggtatgtgctttcttatcatcctcgctttccgattatccttcatcgctaaactcgacttgctttgaaagcttttgacgcacaagtttgcacttgtggttcttccttttatcttcaaaagataagccgttgttgtccttgttatctttctcatcctccttgatagatttcttgagcttgggacacgtagaattgatccgaatgtggttcaactcactacgctccaaacatcaaattggaccacgctgaaacgacaactagaaataattcgaaaggacagcatgacaaataattggagatgacaatgacaaatagttagggagtactcccccatttcatattataagttgtttgacttttttcttggttaaaattctttaaatttgattaagtttatagtaaaaattagcagcatgtacattgctacaatatttgttttgtattgaaaatgttactatttttttctacgaactcggtcaaagttaaaagaagtttgattaaaaaaaatcaaaccaattataatataaagtgtaatagtttatattatacgtaatacaaagtgtaatagtttcactttgttttttttacaagaaaaaaggggcgcaggattgcagcgtgcagctgactctaccggttaaaggcatgtacaaaagcccaagcatcatctctcactcatcagtatgcaaattaaccatatggcaactgcttcgttgagcctcctgatcctctgcctcgccgcgctcgccgcggcggccggcgccgccgccgcggctgctccgccgcgcttgcagtgctttgagcacccgccggacatgaaggccgccggcggcggcgaggccggcgtggtagtccacgacctggcgggctacgaggcctacgtcaccggcgccgcccactccgaccgggccgtcgtcctcgcctccgacgtctacggttagtacgcacatatgattgcctgagctagctaattaattaagcactgatcagttatcactacttccatttcttcattccataatgatgattatggactgatgaaccgctaatttaattttaattgctgctgcatgtgtgattgttaatttggttcaactcctcaggtttccaagcgccgttactgaggtaaattttctttgtcatcctcctctttttctagttttcttttctagcacaaatcatattatttttttattaaaatataatcgtgtgagatcttgctgtaaatatttaattataacaaatacaacggtacgatcagatcgtttatatgataaataatttatgaaaaaaatagtttaaagatacgagaaggaggctaaaataaaatatatggaaatgagatataaagtgtgtagctttgcatgcgtatggatagacacctcttgcactagccaaaaatgcaacaatgtagtaggggagagcatctaatttttcaccataaaatcgagtgtcccatttgtagccacatcgcaatcgcacagaaagaaaattgacacatgaaccgctatagaaagagactgatttaatttctatatagaaagtaatggcgtggaaaatgttcattttttatggtaaactgtttttatttcaattaaatggaagatgcaccaacacgcttgcacaagtttctcattccaattaaattctttttgacaaatcctacttttttttttcttgtacaagtcagaagcaaacacactcacgcacatacagagacacacctatgttggtgagtcctatgagtatctccaacatactatccaaattatacgaattagactttttaaacactcatatagccaactcttcatctaatttgtcaagtcaaattcattactcacttcaacatcctctaagtctgtgacaatgggtcccatatgttgaccttcccacccttcttcacccatcctctctattcttctcttcttcttctctccactccctccacaccgctgccgctccccctttctccacgctgcggccacttcctcggccgagagcagcagccagcagaaccgggaggagctgggagcctaggagcagctgccggcgatggcagagaggatgaaggggaagggaagggtgcctcgagatggccaccctccgtgtcaccaccgcggcattccctggtgcatcagctgctcgtccctagcttcctccacgtcgccgctctgtggggtgacacgtgacggagggagggtgggacggtgatggcgataagggcataaagcaacggtgacgaggatgaacgaaggcggagacggtgcgggggaggaggcagtggaggccgtgggtgcggatgccgcggagcaactgctagtccgttaccatggccacaatggcggctggtctagctggcagagggatgaattaaggagcgatggaggtgggcgctggtctaggcggcgacggggtcagggttggtggtggtctcgggggcagcaacagatggtggtggtggtggtggtggtcatcacctgcggcagcaggaatcggtgtggggcggggcagggcagcagtgggaaccggcggggacggtacttggaagaagtccggtgaggcggcggacctcgtgcgcggctacgacctctttggctggtcagtaggatacttggccacggctgcagtcggctcctaggacgacagtgttgctctggttgatggaggtagagagagaacgtgggaggaggaaaatagacgatagtattgagtgccatatttggccagctagattttttttagataagccatctagacggagagtcttttggagcacttttttttttttgctatgttggctaaaatttagcttgaagagttggatggagagtctcttggagatgctctaaggctgaattcagtgttgaaggttaggaacccttcacctccggcatataaaatggagcggcgaattagcatgtaattaattaagtagtagctaaaaaaacttaaagaatttattaatatgatttttaaagtaactttttatgtattttttttttgaaaaaaacaaatcgtttgacagtttggacaatatgcgcgtgaaaaacgagggattagcaattgggaaaatgttgttctgaacacaccctaagtccctaacacatgtatgtgtgtgtgtttttgctcttatgtgttttctctataacttcggaaaacagaacacatttgcgtgataataatgatgctgacaattacaggcaaatagctgataaagttggtgatgccggatattaattacgtcgtggtacctgatttgtttcatggagatccagcaaccacatctgtgaactttaccgaatggctcgagtctcactctccggtacaattcttctcgatcaccatcttaaaccatcgtttggataggccaaaatttcgaagtcataccccatacaaatggatggggcaactggtccattgaaacgaggctgaagtgatttgtcttacagtactcctgctccgaggaatactccatccgttcaaaaaaaaaaacgtaggatcggatttgtagtactggaaaatattaaatccgatcccaggttagttttttatgtaacgaagggagtaagtagttttggaacacgtgcagtcaatatgagctaattttaatcataaaaaaataaaatcgtttaaaatttaggttcactaccaggatgcgaaagtttcccgtgtgcctataacacccaggaaactaggtgaaacacccgggaaaaatcttcccgtgtgtcaacacccgggaatgctcacacgggagcgttgaagctttcccgacttggattcccgggtatcaagaaggcagcgctcaggaaagctctagacatcctgggtggttagagcagcacgggagaaaaatccaacgctcgggatgttcaacagaacggaaacggcaacagaatacttctcgggtgctggttcttttgcaacacccgggatgtttcagtactacagctcaacattcttcccgtgtgctaaccacacccaggaagtttcagtcctacagttcaccatcacacgggtagtagaaataataagcaatgaaatagaatcggtacaagcactcaaatattcagcaatgtaatacaatcagtgcaagtactaagcataaactgatctgtacaaatgttaataccagatatttgttttagttgcacacatacatattcaaacagccacaaccaatctatggaatacacacaaaagtaatgtttgctccttcacataggtagatttttttcgaacatcataagtaccagttcttgaataatatctgggagtccattggataggtaagaccaaaataacatgaactacatccaaaaatcattgttccagatcttgatgtttggatggatttctgtagcaatgaatcatggctggcaattggacgcacttgatctagatgatggctgaaaaattatagtgtgtcagaaggtgctgataaatattgtatagaatatattgccagataaatattgctatagcatattatgaaagtttaagagtgcacattgttagagattcatgcctagatggattaaaatcacaagcccaaagacaattaacagtacaaatgtcaagcatgccatttgtctaaccaagtggttcctacttgtcctgtacaaagagcccagttagcacaaaccaggaagaagatacataaagaactagattgaactatagctagcaactagatacatgcatcaaatgtagttagtcttacttcttaggtacctatatatgcattttacctatttagattaaactatgtgttatatcttaggcaactgtttacatattgaatgcattcagattatatgctttttcgaagatggaactatctggtaaaaaggtcattaatgttggtataagattgctcgcctaaatagacagtggggcatgttggtataagattgctcgcctaaatagacagtggggcatgttggggccgctggtcgtggaggcaaaacattagctttcatcgcagattgaagcgcctgaaatttatttacacatgacaatgcaaatagttaaatttatacatgttgatgaattttaaaattaataagtacatagaggaggcaaaactacaagttaccagctgtatcgcagatgttaagtaacatgtttcatgttggcaagccttaccatcaatgggttatttcatcaaatcaggacttgcaccatgcttttccttaacaactccaaaataagcttcctggatgataagttgggtgtttattcaaatgggaagagattaaaaagttgctgatcaaattttgtgcaagctagagtgcaactacttacaagcttacccttgacacggtcagtacaatagtcctctccatcttttccattcttccttgcttctgcataagcctcaaatatacccactggcctcttctccttcttctccttcatgaaacaaaataacaattggattattttaatctgtaaaatacatttcaagattttatgccaatatgtgaaaggtgatttaagttaccatgttcttttggaatcggtcaagtgaagcgctgccttgacggtgtgctggcccatccatcatttccctgtataccctaccttcacatgactcttttatccactcttcattacaccaatgcagttccgcacacaatttccatccttccggagtcttttgagcccaccaatacacaaattcagtgacaaaaaattcctcggattagtcaacgagtaaaaagaattcatactacaatgtccacttctgttgttctacgttcagcaaattaaaggcacaaacagtgcactttaatgaaaactagaatatctctctagtgttaagctgaaaaactaaaacaatggcaatacatcgctagtaatcagaagtacaagtcctaacaagtaaaaatctacacggccaagataactaaaatgagaagcataaaaggaagtaaatattagccatatcacaatgcattaaacatgtcaagtttttttaccttgcttatgatctggatgaccaaatcactctctgaacaaaaaaaagtgaacggatatggctgggtgggaacaacctgcaaatcatcaaaatcaagcacattatatgacagaaactgaatcttcattacatcgaacaaaactagagggaactaaactgaggaaaatcagaataaaacataaataccagtgaagccgaggagggtagaggaaggcctggagatggagtatggctcaacctggtggatgatggctgaggtggggatgagctgagtgggggaagaggaggtccaaaggggtgacggcggaggcggcgatggacggtggaggcggcgatggacggcggagacggtgggggaagaggaggattaggcagggaggtgggtggaggagttggtcggcgttggggtctggcgtgggggagttgcgtggaggagttggcctgcggcggtggagcggcggcggcttcgtgcgcaggacggtgacgccgcggagtcacgcgctggcggcgtagttagggatttctcagattggggatttctcgggagagagatggagtccgaaaaaaaaatcgggaaacaaggaataaaaaaaaaatcggcgctctggggggatggagaaaattgcatatctaccatcccataagaatggcttcgctagaataccattatgaaaacaggcttcgctggaataccatcctcaaccagagtgtcttcgccaaaataccatcctggacggaaatgcccctggctcttcttct

SEQ ID NO: 4914 - DNA, 49960 bp, Oryza sativa
ccggccgccggagtcgcgggctcgcggctcgcgggagcgccgtcgcccgtcgggagtgggaggccgggagagtgagtggagaagccagagaaagataggtttttttttttttgccaggcttttttttttttttgataggccaaggaaaatgaatatacatggtcttctcgttaggctcggttcgggaggaacctctcctccccgcacgtaaaataaagtctctcttattatatgattaattaagtatttattaatttttttaaaaaatagattaatatgattttttaaaacaactctcgtatagaaaatttttgaaaaaacacaccgtttagcagttcgaaaaacgtgcgcgcagaaaacgaggaagagggggttgggaactactactaccgaacgcatcctaagagcaggtacaatagtgggctataagggcaagtactataagcccctacatattgcccctaaatttaccacataagattagataatgaggtgtaagagagaagttagggcaagttttaaaaaagaggtggatgttgcatctaatcttgatcacatcatcaactgataaatgtagaggtaacatgtacaatatatcacatctatactaattctaatacactagccccaatgtttgtttgtccaatctactcttccctctctctccttttgtcttgaattttgtgtagtggttgcgcctcttgcatgagaggtggctgcttatctctctcatctcttctctcctccacctcactattttagctcatgtggtatctaggagattgtgcttggatgcccatagtacttgcccttagaagagagagaatgagccacccctcatgcaaggggcaaactctacacaatctctaagaaaaatgcaagatgatgtgagagtgaactaatattaggatttgtatgttagatgtgatatgttgtatgtgttacctcttaattaatgagaagatgatatggtctaaattagatgtgacatccacctccactataaaacttgccctaagccagctataaacatattttaaagagataaagaaagagggagaagtgcagcgggctacagatctgtagccagctgcagcacgagctctaagacacaatgtgtgtatgacaggtgggaccaggtattaatagtatagcaagcaactattgtatgaattggctattatattggctatagatgatttggagctagtagtggactatactattaaacttgctctaagccaaattctagggtagttccgacttcttagcctacctggacaaccctttagaccgactacattgacaagttgagggaactttggtgtgcttttttcttattcttatgtctttttttttctgtttgacttgtgattcagagtgcacgaagatgggggtactccttctgttccatataaaaaaaactaatatgttttgtgacttatgtggctcgtactattaggatgtgacatattcataataggtttgttttttagggacagagaggatatgttatggaataatgggataatgattacatcatcttgaaatataaaatataaagattcttactctaaatttagacaaactatcatcaagattcgaagttagaaatattttagtggtctggatatcaccgaatgcattgttttcaaacgtgttaggcaacttcggcttagttcttttttgcaaacattagcccataaattttccctcaaacctttctatacatatgaattttgcctcatccaaatagttttgagtcgtgagttcacttgtaattttccttcaaaatgattatggctgcttccaacctatgtttgcggtaaactgatatattccacgcaaaacaagacaggaggttagtgaatgattaattaagtattgacaattataaaatttaaaaatgagtatatttgattttttttaaataaacttacaagtaaaaaagattttgcaaaacacgcaccgtttaacaatttggaaaacgtgatcacgacaaatgatagagttgcaaaagctaaacgagctttcaaacagagcctatattgcccttatctcatacttgtatgctagcctatttgggaaaacaaaattctcaatgtgaaaaaaagactcatttgtaaaataaataaagatggtagaattatttgatcacaaatttgacaactgaaatttaaatctttaaataaatttcagaccaaaattgatggaatgcggacaatattaccaccaaaatttaaacccaaacaaaaaaatcatggtttttaatttcttggtgaaactcctgtatgtgtttaatcaaattcttcaaatttggctaaaagtttcaattttcaaacttggcatcaaataatttcgttccctttgattttattttaaagcaaaaccatattaagatttatattttcaaataagttgcctttaaggatgagagaagggcattttagagaaatctaactatcaactcacggacaaataggtatataagaaaacaaaataaaacttacgggtatataatggatgacgcaaaattcaagagcataaaaaaattgagaaaaagaaactcatgtgcatatagggatttttcccttctttttgagattatttattgggttatcgaaacggatatttgtccgacacattgaaaaatacattttttgcaaaaaaaaaaaaaaaaactttcttctactattaattcgttagggaaatttgttagattgagtcttatttaagttgtaattcgttcaataagatcaacaaggagaaatgaatctgatcaacaaggaaaaaactttcttcttcccaccggtgtgcccaccccctctgtgcatttctttctttctatctgtcgtctctgtgcctcgccggccgtggggactacggcctcgcccgcctgcgtgacactgtctcaaagcaaagaaaaaccaagcataataaaattttgccctaaatttgctggggctagtaatctgacaaataaggacagaacaaatcgtcaagtattacaaccgtttttttgacaaattggtccttgcaaaaaacttattttgaaactagtccctactaaaatctatatctagaaataggccgtcggctcagcgccagcgccaacgggactggcgctgacatcgcgccagcgtggcgggcgaggcgcgacgtggcagggcctcagcgccaatgcacttgacactgacaccttgcacaccctaaatagaccgatgtgctgcaatgagttaacaatgtcgctcgtggtgcaacggtaattttctttcttgctgtaccttaggactagggttcgaatcccaggtcagccatttttgtttttttttttaatcatcaatcaacgtgcgtacatattagtgatgatctccattttcgtttttgtcttcaaatcttcaatgtacttttttttgtttaaattaatttttattaaaaagaaatatcacatttagtacaaatttaaaaagtagaagaatggattaaaaaagtttagagacaacttttaaaagaaatatcacttttttataaaaaagaaattagaagaatggatttaaaaaaacttgagtttttttttaaaaaaaataaacaacaagttgagaactaagggtaagttttattctaaaatgtcacgtgttttaataaaattaaaacaacacttgaacttgtaaaagaaatatcacttttttaaaaaatatttaaaaggaataacacatttagtacatatttaaaaataaaagaatggacttaaaaatacctgagctttgaaaaagttaaaaccgcaagttgagaactaagtaaaaaaaaaagtttagtaaaaacataaaggagagggttcgaaccctggtcactgtaacgccacctttcaaatacctaccactgagctaagccaaacctaattgttgcttttgcttttgcttttatttagccagtataaaggccagcgccgctgtagaacatatattctgatatttatatttatatatatttaaaaaacagagagcatcattaatcatttatatgtactaatgtacgcacgtagattgaagatttgaagaaaaaaaaaagaacgaacaaggctgccgtgatagggagtcgaaccatggtgctagggtacacaagcaaatgatcataccattgcaccacaagtgcattgcttattaatggccgcgcatccttttaattagcctgtacaaggggtcagcgccaaatacattggcgctgaggccctgccacgtcgcgtctcgcccgccacgctggcgcgatgtcaacgccagtcccattggcgctgatacgaacaacctcagtgccaaagaggttggcgctgagccgacggcctatttctagatatagtttttggtatggactagtttcgaaataagttttctataaggaccaatttgtcaaaaaaaggggtattacaaggtcatatgcttcatgccttcattcacatacagcactgcaagctggtaaaaggaacgaattgtcgtggttctgccagttcattaagcattccagtgataaattcgagtcaaccacataaatccataagaaatgccttccactgaaaaatgtttgttttcctgtgtttacaaccagtcaaccaacatgctcttgtttgaaatttgtttcttttgtacaaaaagaatcagtaagccaaacccaaagactttaaaaagatactccctccgtttcaaaatatttgacgccgttgactttttagcatatgtttgaccattcgtcttattcaaaaaatttaagtaattattaattattttcctatcatttgattcattgttaaatatattttatgtagacatataattttacatattttataaaagttttttgaataagacgaacggtcaaatatgtgctaaaaagtcaacggtgtcaaatatttcgaaacggagggagtattatttaggggcatgtctcctctatcaaatttgcagcgcgttacacctagacaatactttgctccgatcagctacagctaaaatttgtggtagtcaggtttcagcacccatattgcatcatttgcacctccttgcaacgttgctgttggcttcagcaggttctcaaacagcagtatatccatggatagaatgtggttcttgttcttaaaaaaaagagttcttgacatgttcagctatgcccattgagcggaatgaaccaccatgcagttttatgaaggtgtagattggcagattaggacttcaggatgaacaagtatcttcctagtaggaggccttaaaacagttcagcagggaacagtgatttgcagacagagaatggtgctccaacagcaccacagcaccagctcgtccaatgatccaatccatgtagcaacagaaaaattgttactccatgataggcataaaccttaaaagcttcagcttctctttatgccgcctgtgaagcttctgcttcttctaggcgcagcttctgttaatcgttagcatgcattatgtccgcatgattgattgcactctgagaaaagtagaaaaaagggtattcttttcagaaacaaaaattgatccaaattatttgtgttagagatcataatttttttttcttacatgaatccctgagcacaaaaaagactcttcaaaatgttggatacttcgtccataccaggatgagctcagctcagtctcagaggttgtcggcgcagccaaagctgcacatagctgatcttattgcttcatttggaatcccggtattgacatcttcagacaattggctgaaaatatttgatgtttcagttcaatcattattgtcattgtcttgcagcgtgaacaaatccttcacatctctagctttaaaaaaaaaatcacctctgctaagagtatttcagtacttcgtttcacaggaaattcttgcatacctgctgatgataggctttctcctctatcgccacatctctaattttccccgtagtctgtaccacatataatttaagctggtaagtatggtattcaaatacaaatgcaaaggaaattggaattcaaacgcatagggggttcaaatgcaggcctccattgctgctgttgtaattaatcaacagaaaaataataatttgatcatacaaaatttcaaaaagcaaagcgctaatgtctagcgctgcctccacgggagacccgactgtatgtatgccgtatttgacatcttaacgtatttatatggatgcagcctaaccggcaggcgcctgccgtgccccgtaacgggaggggaccttatgactgctccatttttaatttttacagcagaaggtgtccgccaaaccgtggccacggtggggatcttaccgctgtatctagtcggtgtgggtgtctccggggaggcaacacaacagaatcaaccagagtttataaagaggtcgctctgtcgcaaaatcagcgaggtgggacaaaactaattgcgggatggattcagtgcgagccgaagcgcgtcgcgcagaccaagctaggagtagagacgaggcctacctgctctccacggaggcccggcggcaagggcgccgttgatctggccggagctgaagcttcgcgccgcaaggccgccgccgtcgccgatgccgcggagaccacggccgatggatgcgggtcctccaggagcagagatggcgcatccgcagctggctgcttgccgccggacgtcgggaagcgccgccatcggggaggagagggacggcaggacgggaagcgagatcgagccttccatataaggtgggccatgtggtaagattaccatgagtccagttcacgtcctccaggcccagttcacggctgggcagttttgcccccttttttttcttttttttttaatgttttccccaaggattgttgtttcttgtatgtgctcagattggtactggggttgtttggttagtactagtcattccgttccaaaataaatataccaatctagataagaatttgatataagctatgacaacgaatgcggacaggttatatcaaatcctattcaagattcgtttattttgtgattgataaagtatgctctatgtgtttcttttttttatgatcacatacactcgaccgtaattagttctaaatatgagcgcccatattaccgatgaatacgagcatttgtactaccactttgaacctaagtagacaagtattactgcaagaaacctacctacggtttgtttgttgtatcttcaaaattttaaaaatgcatcaatgaatttttaatgcgattatagagttaagcttaggaatctaattgatacaccctcgtctctacccctatacacaacctatttgtaccaccactgccacgagcttggggcgctaagatttggccaccctaacctcagccacgtgttgatgcaaaaaaacacatactggcctgggagatctatttagctccagtgtaggtccaaaggttatatgcggcgtgccagtcagtttgatcctacaattgacaagacatgtaaacaacatatcaaatagctgattggctgacaagccggtggagtaattccagtcgatagccgatgtcaatggggttttgagtaatcggctatatatcatatgtagataatgatgtaaagacaatcggctgatgataataaaatataaaaataatataatccaatagaaaccaatcggctaataataatatgagagtgtaagtacttatccgaaggttaaagcatacatcggctggaggtctgatgtcataaaatctaaacgattagataaacatccagataattcattggctgaaaccccgatgaaacccttattggcaatcaggaagcaggctagagattatggttctaaacacgacttagtatatcaaacttaacctatgcaacactaagtttgtaaagaaacacaatatctagactatcaagcccttagactgatttctcagggtggtagatgtctaagctaatttaatctagcaaggcgatttagtcgataccggtagaaaccctaaagcgagaaacaaccgatagagctaaatcaagatgctaatactagattaacagatataaatgataaattggtaggcaaatatatcattcaaaccagagcaatccaagaggtcgaatgtactgatgcagccatgaacgacgccaacgtagacgatacaattgcctggggcggcggaaaattggatttagcccttccccggagatcgaaaaccggtgcagccccgcgtcaggtgccaaattccgcagtgataaataaaaagtggaaaaggtaaaaggtggcgatgcgccaaattgtattgatcgtggagatagtttacaatgaccccgggtgtccatatttatacccatgggtagatactagtatttgtaggacaagaaagaaacttttgtaaagataaaaggaaactagcaaaatattcataattaatactccctccatctacttttaatagtcatatttcatcatagcacacaaactaaggataagtgattctacttatcatccatttaaacatgctactagtcattcctcgtaaacaagcgattcattaatatttacatttctcgatgcccatgtagccaatcctgtgtggaagaaggagagtcacgcattaaatccgagaaagtcattaagatgataggttgttggattgaaatatgtctatcaaaaataaatttttcagatttggaaatatgcctatcaaaagtagatagagggagtagataacttgccacgccgcatcctgattaatttccttaactgaatatagcatgaatccggctattgacaacgtgataattctcttagggacttaccaaatttcactgttataaaccaatgtaggtaagaatctgataaaagctatgacaacgaatgtggatagctatgataaccccctcccattcccccacacccccacctcagcgagttcaccggcggtgaactccgccgcctccggcgtccccccactccgccacctctgcaacgaactctccctgtcagcggcctctcccctctcctcgtcggcagcctctcccctctccctatcggcgcctctccacttctggcggtgcggagctcgatgctgggcggagcggcgatggcgacgacatcctctcccctctccccttccgcggccacgagctccggatctagcctagcgttgggcggcgagggcggaggtcgatcttggcggcgcaaatcgggtcgacgagctccccaacagcagcgtagagtgagaggctgcagccgcctggctcgaggcggcgagggtggagatggatctcagcggcgcaaatcgagtcgatgagttctccggcggtggcgcaaatcgagtccacaagctcccgacggtggcgcaaattgagtcgacgagctccccgatgatgttgcggagtgggaggttgcagccgccgtcgagctcatccgacggtcattgaggcctccgccatcgagctcatgtgtagtggctgtatgtggcgagggagtggcatggagaacggcttttacagctttacatgtgcccttttcatctttttcaggcgaggaactcgcctcttcgttgaggaatgaaaagctctgcgaaggtgtgagagcccacaccctctctccacggcatcacgaagtctacatggtggaacgaaggaacgctccagtgtggatgcctgagccaatgcaaaatactgtagttcctctgcattttactcttcaacgcagaggatctaaagtatttcagtaatactataatcttttttttcttctattggactcttcttaaattctacttttcaccgtaaactcaaaattggtaattttcacttcaaatttatattttttccattttgcatttgtggaatgaaatgctcactactacatgataatcagctcttgcttcgtttacagctgcagcaaacaatgattaatcggtgtcgtgaacatttaaagaaaaatcttcaaatcggggagaaaaaatgatcaaaagaaaaaaggaacagaactccagccgagggcgtctctacagacacaccatacttggtaataggacaggtgaaaatcacacgtggagctgcatcaagcaaatttttcattttactacggaacatcaagcaaaggaaaaacaactttcagaacatattttcccattaatttcaaagcaaaaagaaaaagggttatacaaactctgctgcagtctgggttctaatctgaactcgcaagaaaacagaggatatataaattggatttctgagaaaatatgcactgcatgtacaaatactgtttgccgtgactaacggtgttcgtatttgaaaagtattgattgctcacattgacaactgagacatcatcagcttgacagggcaaatacctgtagtttgctccacgcggtaacaaacgagcatgtaaaagcaaataagattattttttgtttcttcagccagccaaagttcctagcagctcattctccacatgctgacatgcaatggtgaggtgacatgcatctgtaaccatggccctctcaacttgtaacttgcacttcaaatggcacccccgcatatgtaaatgacctagttcacctatatttccatgagaaacatcaggatagcaaacctgtgtcacaatccagatgatgctgaggattgtcagcaacagcgcaacaaaatttgagcaatggttagggaactaaatatgagctgccatagatttgaaaagataagatagattcatacatttttaagcagttccgtgttcaagacaatctgctccagttagctatatatctctggtttcactatagctggagcctggccttcaataatgcactacaatttcacattttcacttgacttcagcaatagaaaccttactgcttggggtgtagtgtagcacatcgcagttacgccaatatttactccaactgccatggtctttgactacagagagatcaataaagtgctttttaatattaaaacaatttttgaaaaaaataattattatgtgagccaatcaaattatcatgttgtatttgtcaagtgtggaatgatgacgtgtttatgttttaaatgggtgcaaacatgtgacatttcttaatcttcattgctacaattcgccctaactagtaatatagtgtcgccatacatagcacactcaaagagcaacagttttgaaaaattattgttataaattgtgaaactgcctatttgattgttctatttcctctgtgcttggattggttaggatgtcattttctgatacattgccatcattcggttcaatttttcacccccagaccttcctgcacaactcattgcatgacttgtccaatgtgttatttgtcaccctggaaaattgaggacttacttgtactgacatgttgcttccataccgttacggtacggctacgcccagaaaaaaaaatcaagattactttcactttacatcagtagttgactaacttgatactttccctttcccaagtccaggtccaggtcaacgttcttgtgagttgtgattatccctgacgtggtgttttaattcatgtgcacataataggtggtttttgtgtcatgaatttatttccttacatgagaaccaaacagttcattttgcagagcccaaaggaagaacctcctctggccaaacaatgtccccttatattatccctctgtgcctgattctcttcatcatcaaagctagtcattccatgggagctcagatcaatgagacaaccattcctcaaggttctgaaatcaacacagctggcccccaaagttgggtctccccctcagggcgctttgcgtttggcttctatcccgaaggggagggattctccattggtgtgtggcttgtcactgatccatccaggttcatcttgtggacagccttcagaaatgatcccccggtttctggtggttcaattctgttaaccgctggtggttcacttcaatggattccacctaatcaaggattccaagggaaggtaatatctgccgcccctacttcggctacttctgctgctatcttggacaccggcaactttgtgttatatgacgccaaaaatcaggtcatatggtctacctttggtactccgacggacaccctgttaccagggcagaacttgcctcctggcaatcagctgttctcaagtgtctctaacaccaaccatgccacaggaaagtatcgcctttccaaccagccagatggcaaccttgtgatgtatccgataggcgcgatagatcctgatagtgcatactggaatactggtacttatgcacaaaactttcttctcactcttacactggatcccaacggcaccctatggctgttcgaccgaaatagtccatatagaatggtgttgtttctgactaatcagtcattgagtgcctccccagattcagagagttactaccatctgacattggatgctgatggcatactgcgactctactcgcatgtgtttttcaagcaaggaggagcgcccaaaacaaaggtcgaatggttggtgccaccgagcaatgatcgctgcagtgtgaaaggtgtttgtggtccaaatagcttctgccaagtaactagtagtggagaaaccagctgttcctgccttccagggtttgaattcttaagtgctaaccaaagcactcaaggttgctggagggcacagactggtggttgcaccgggaatagccctaatggtgacatcggactggtagccacaatggtcacggtgaagaacactagttggtcagataggtcatacaacgtcccacctcaatcaccaaccattgaagagtgtaaagcaatttgcatgtctgactgcgcctgcgagattgccatgtttgactcctactgctcaaaacagatgcttcctataaggtatggcaagagggttcctggtagcaacaccacgctatttgtgaaggtctactcctatgaaccaaaaaggactgcaagtgcaacttcaattgccatgttgacatctggcgctgccctcggcatgctctcacttgtactgctctcggtgtctgtaatgctatgcaagcgccggccatttttgaggtacacacgtgctccacaacatcatgaaactgaatttgatgaggagagcattggaatccgaccatactctttccatgatctagagctgtcaacagatggctttgctgaagagctaggaaggggtgcatatggcacagtgttcaaaggtgttctaacaaatagtgggaacaagggcattgcagtgaagaggcttgagaggatggcagaagatggggagcgagagttccaacgggaagtgcgtgcgatcgcacgaacacaccataggaacctggtgcgtttgttcgggttctgcaacgaaggtgcgcatcgccttcttgtctatgagtacatgccaaatggctcccttgccaatcttctcttcaagcgcgatgcaacactacctaactggagcaacagaattgcgattgcgctggatgtggctagggggttacaatacctgcatgaggagatagaggtgcctataattcactgcgacatcaagccagagaacatactgattgacagctcaggaatggcaaagatcgcagattttggcctggcaaagctgctgatagggaaccaaaccaagaccttcaccggtgtccggggcacgcgtggctatctcgcaccagagtggagcaagaacacagcgatcactgtgaaggtagacatctacagctttggcgtgatgcttctggagatcataagctgcaggaagagcatggcacttaagttggccggcgaggagtgcaacatctctgagtgggcctacgagtacatgttctcaggtgaaatgaaagaagtggcagccggcaaaggtgtcgacgaggttgagctggagcggatggtgaagatcggcatttggtgcactcaaaatgagccagtgacacggcctgtgatgaagagtgtcgttcagatgatggaaggaagtgtgaaagttcagcgtcctccaccaccagcatcattttcacagtcactacgctgaaatcatccagagtatttcatgtcctatactcctattgtcttaagtcagaaggcaaaggatgacaaatcatctagagtatgatcgaaattgtgcgtcttacggcaaaactgctagcagtaagggcatatcaaaacatcaatgtatctcctctgctacctatcttaatgtctagttgggtgtttattgtaagattctttcaagaaattaaacttctctcggctaaatacactgtttttggagtattatatatggagtaatcgaactatgcatccaaaggatggaatggtcaaattgcaattggttcgattaacccatgagtagcaatgagttcaacagaaaaaaaaatggacaaattgcaattggttggattaacccattagtagcaatgagttcaacagagaaaaaaatctaatgttacaaatttcaaaaagccaagcgctggtgtctagcgctgcctccaccgagagacccgactgtgtgcctctatagggcctcttttcggcagggggtcgcctgccgtggggatcttttcactgctccattttttttttttttgcagctggccggcagggggtcgcctgccgtggggatcttttttttttttttgcagctgaaatggtagggcggatacacgccctaccgctgcccattgcagtcggggtgggtgtccctggggtggcgatggagtagaatcaaatcgagctaataaacaggtcgtgttgtctcagaatgggcgatatggtacaaaactcataaccggatggattcagtcggagccaaagaacagcgcgcagagcgacctagggctaggagtagaggtgcgtggcatacctgctctccactccacgtcgagggcgccgtcgatctggccgtgctggtgaagtttcccgccgcccggccgtcgccgtcgccgtcgccgtcgccgctgacggccggatccagattctccggcagcatcaccagctggctgctcgccgccggtcttggggaagcggcggcgttgggggagagtgggagaggtcgggagcgagcgagaagccgagaaggcatatgcaggatgctgggccatgacctaaggacgatgagtccatccttctgacgacgcacgtggggctcgagccgaagctttcccaggcccagtttgctactaggctgatttatcttgttttgttttttttttagtttcattcgcgtccttcaaccacaaagaggtatatagcatccgtcaactgtcaaaatcggaacgagtatcatagttgtttaaatgacggtttcgactgatttgatgcctacctaaaatactcttatggacatataagtttaatagttgatttatatcattagaagtttcaaaaaaatataaaaacttttatgtggccaccttacacagtataaaagtttaagttttaattttttttcatttctactttttaaaaatataacttgttttttatatgatatataaaatattttttgtgttgttgtttttaatataaattatctttcatatgcaacataagatattatcttttgtgtaagctatttctatctgatataccatacaaaaatatttttttaaaaaaaaatatataaaaaatgaaacttatgtacatacttatctgttgtgtaaggaggccatataaaaaatttcatattttctgaaactttctaatgagatagagtagattctctcaactttatatacatatataaaaagtttatatgtatgtatgtaagtatatacatatgtacatataatatatattatgtatatacttttgatgtataaaaatacatatacatgtatacaaagtttgcatctaatttaaactttcaaatctttcaactcgaaaattttaaaaaattaattatgtatagattttaaaactttagattctaactttttaactttcaaattcaagttgaaaacttccaactcaccaattgattttattccttgttaaggacgtaggattgcaacgtcgatgcgacactaaacatgtcgtaggtgcgtctccttttgctacctacagtggcggagctagcgtgggggcggagggggcttgagcctcctctaccccgctggactccatagagttgtgagggaggagaagggggaaaagaggtagaggaagaagaaaatggggggagaggggggctggagggcgctcgatctccactttttttttctttttcttcggtttttctcttcatcatttctctttatttctttctcccattcttcctttctctttatttttttctcccattctttactctttttctagaaaaattaaaaataatttggtgaattgaagactagaacccatgatctcatggtttacaacaaactctctcaataaattcaccctatgaccctgtgtgatttgagatcagtgtttgttttctttgtatatctgttcaaattttgtgaacacaaacccactatgttactatatgaatcataccttgttcggtagtaacaatcgcatatgtgcagtaacacgacacgttactgcgagatttattaatagtttgaaacattaagtattaatagtttgaaacttatatttttctttaattggaatataatcatgtgatatcttgttataacgatttaattccaacaaatacaatggtggtggtggcggcaatggtcgccaaaacaactccggcggcagcggttacggaaattcgggtggcaacttctaccaacagcagcaggccggtcttcgtcctgccggcccgtggttctgcttcaatccatgggctgcgcaggcctctacatggcgccctcccagcaatcccggcaacagtgctggcctccttggcccgtatcctcaagctcacacagcttttgccggttcctatgtgtctccaccaactccaggatggcctccaatgccgcaagtccagcccaactgggaccaagctggtcttgttgctgctcttaatcaactatctgtgaacagtccaagtccatgggtgcttgacacaggagctacttcgcatatgtcctcgaccgacggtattctcgttacacgcctccctaactctcatacctttattaccattggtaatggtcatactattccggttatatgtcgtggtacttcttttctacctataggaactactaggtttgctcttaaaaacatccttgtcgctccctccttggttcgaaacttactttctgttcgtcaatttacccgcgacaacaaatgctcaattgaatttgacgagtttggtttctttgtgaaggaccttcaaacccagcgcgtgattcttcgttgcaatagtcgtggggacctctacactctacctactgccgtccctgccatcaccgcccacagcttcctcgccgagtcatccactttatggcatcgtcgccttggtcaccccagtccagccgcagtacaaactcttcataaattagctattctttcttgtactaggtctaataataagctttgtcatgcgtgtcagttaggaaaacacacgcgtcttcctttttctaggtctttgtctagtacttcttccccttttgagcttgttcattgcgatgtatggacctctccagttttgagtttgtctggttttaaatactatctagtggtgcttgatgatttcactcacttttgttggacttttcctcttcgtcataagtccgatgttcaccagcatctcgtcgagtttgttgcctatgtcaagacccagttcagcctacccattaaatgctttcaggccgataacggtaccgagtttgttaatcatgccacctcttctttttttgctagccgcggtatcgttcttcgcttgtcctgtcatacacttctccccaaaatggcaaagccgagcgtgttcttcgcacaatcaacaactccatccgcaccctacttatacaagcttccatgcctccttcctattgggccgaggctctagctactgccacatacctactcaaccggagaccttccacctctgttcgcaattctatcccataccagctcttgcataacaagcttcctgactattccaaccttcgagtctttggttgcctttgttatcccaatcttagtgccacgacacctcacaagctctcccctcgttcagcaccttgtgtctttcttggctacccggcttctcacaaggggtttcgatgcttggacatctctactcgtcgtctctatatttcccgccatgtggtttttgatgataagacgtttccctttgcggctattccccaggatgcctcgtcttttgattttcttttacagggtttctccaccgcggtagctccctcctctgaggttgagcgtccgcgattttcctcggtgactccctcccatgaggttgagcaaccgattcccgacgatgacacctcaggcaccgaacttttccagcttctgcctggacttcggtcttctgctgccggccgtcctcttgtcggcttgcctgttaacgctcgacttccgggcgggtgtgctaatggtgccgctaatggctcttcttcaagcaatccttctccggttatggatcctcctgctgcttctgtcgttcgaccagctccatctgagggaccaaatacatcgctgatttctccttatcggcacacctacgtgcgccgatcacagccggcacctgcagctattcatggcccgattcgctcctctcgagcgttccgtagtgctacagatcaacagcagcagacaggtcacaccatggtgactcgttctcagaccggccatctccgacctatccagcgtttcacttatacagccactcatgatgctgtttcgccggttccttccaactatcgcagtgccctggccgatccaaattggcgtgctgctatggctgacgagtacaaggctcttattgataataacacctggcgattggtacctcgtcctcctggtgccaatgtggttacaggaaaatggattttcaaacataagtttcattctgatggaactcttgctcgtcacaaggcacggtaggttgttcgcggctattctcaacagcatgggattgactatgatgagactttcagtccggttgttaagcctgctacgattcgtgttgttctcagtattgcagcatctcgttcttggcctatacatcagctggatgtcaagaatgcttctccatggcaacctcgaggagactgtgtattgtcaacaaccatctggatttgtagatccctctgcacctaatgctgtttgtttgctccagaagtcgctatatggattgaagcaggctcctcgtgcatggtaccagcggtttgcgacatatattcgtcagttgggtttcacatcctcagcttcggacacttctctctttgtttacaaagatggagacaatatcgcatatttgctgctgtatgttgatgacatcattctcacagcttcgtctgctactctacttcatcatattactgctcgtcttcactcggaatttgccatgacagatcttggtgacttacattttttcctgggtatttctgtcacacgatcttctgatggtttattcctttctcagcgacagtatgcagttgatttattgaagcgagctggtatgtctgaatgtcattctactgcgacaccaattgatgctcggtctaaattgtctgctacagatggtgctcctgtttctgatcctacagaatataggagtcttgctggtgctcttcagtatcttactctgactcgccctgagctcacttatgctgttcaacaggtgtgtctattcatgcacgatcctcgtgagcctcatcttgctcttatcaaaaggattttgcgttatattaagggcacacttcacattggtcttcaccttagaactacaccagttaactctctgacagcttactctgatgctgattgggctggatgtcctgattctcgtcgctccacatcaggatattgtgttttcctcggcgacaacttggtctcatggtcatctaagcgtcaaactacagtttcgcgttctagtgctgaggctgaataccgagctgtagcacatgccgttgctgagtgttgttggttacgacaacttctttccgaacttcatatttcgcttacttcggctaccgttgtttattgcgacaatgttagtgctgtctacatgactgcaaatccggttcatcatcgccgaacaaagcatattgaaattgatattcatttcgttcgagaaaaggttgctttgggacaggttcgtgttttacacgttccttcctctcatcagtttgctgatattatgaccaaaggcttaccagttcagttatttactgagtttcggtccagtctttgcgtccgtgataatcccgcttcgactgtgggtgggtattagaattagattagatttgtatagtctaagtatctctcgtatatgtatatatctcttatttaagagtttgttgtaatctctattgtatttggctatataaatataatcgccccccccacgttgggttgtgtggcgtctcataattttctacaggcaattctggatctagctaattagtaacattagagcaggtacaagtacaatagcaggctaagccagctttaagtatattttaaaaagataaatgaagagagaagagcagcgggctacaaatctgtagccagctgcagcacggactccaagacgtaacgagtgtatgacaggtgggaccagatattaatagtatagtaagtaattattgtatgaattaactattacattggctataaatgatttggagctagtagtaggctatactattaaacttgctcttaatgaaaagtccaaacactagcacaaataaaaaagtttacaattgtttcttaaacacaaccactctttaaaaaaagaaacaagttatgaagagcctcttatggtttgcatctttgttgcaggttgattactttgccaggatctttccaggagtggctcatggctttgcttgcagatataacggcagcaacccgtttgctgtcagaactgctgaacaatctcttgccttaatgcttgactggtttgagaaacacttgaaatgacaatagctaatcatgcatgcaatgcaaggccagtgcaattgtttatttccatcaaaatacattgccagtgtccatgtatatcctggtgttaagtgaaacttacataaataagcactagtgtaaagtgaaagtacgtgttgaatatggtgcgaagtgaaacaaagtgtactttatgaagtgcaaaatgcaaactccttttgttccgaagcgaccattagcatggcatattaaaacatcagtttgtaggagaacaaaaataatgtgtgcctctgttgccattttaacaagtcgatatgttcaatcaaatgttgtatgctactcatcttaagcacagcatatattgggtacctcttgactatttcttatggccacaaattagacagatgaaagtcgtgtttccaagaaattgctggcccttaactaggatggggacttctcctgaagctgtagaggaaacaaggaattctgattccaaccaaaatggatgggtgatgaaccatttgcgtgcaaaacacagaaaacattcccagtatttcatctcctattgtcctaagtcaacaggcaaaagatgacaaatcatccagccaggttgaacagttaaaaaaactttttttgtttgaaaaaaagctaagatttaatgtcctccagggagttaggcatacctggtctcgccggaagccagtggcgaggttgctgtagatctggccagagctgtgttcacatgagcatatctccacctcatcctatatatgtgcgccgccacatccagtgccaccccttggttgggttccatcgaggaggtcaagggagattcatgttgccttaagcttttgacaagggtcgaggggcagctctttccagttcatgtaggtgcagaaaaactatcacaacttccgagcatccaaggttggcgtgtgaagcttctgtctctaggtgcagcttctggtcgtcgttggcattcatgattgatcgcactctgagaaaattaaaatatattttagaaacaaagtgttgaggaaaaccatttgccttagggataacaaattattgcttacatgaatccctgagcatcataaagacccttcaaaatgctggattcttcatgcacttgggcagagtatggtatattttaccctttgaattcctggatgaatttggtcctgtcccggaggttataactaatcttgttgctagtcattaggaagcttggtgttcaaatcttcagaaaactggctgaaaatattggattttaaatcaaacctttactgtcatagtcttgcagcgtgaataaattcatcatgttgctggctttaaaagaactcctctggtgagtgcctttcagtactttgtatttcagaaaatgctcgtgtatctgccaatgatatagacttactcctctagcatcccacttataatcagtctatatactgtcatatctctagcttgccgaattctctatgcacgttcactagcctaatccacagagaatttaatttgttaagtagagtagaattaccattaaaaacaaaactacatataaggcaaaactcagtgaataaatgacaaagcgttaccatgctaacaatagaatcggtagagtatgatagaaaattattcatctaccagatcatctctcactggcatccaaccaaaacttggcaatgaggttagaaattttgcatcgtacggcgacattgtagcaataagggcatatcactagcatccagtcaaaacttggcaatgaggttaaaaattttgcgtcttacggcgacattgctagcaataagggcatatcaaaacattaatgtatctcctctgctaccatatcttaatgtctagttgggtgtttcttataagattatttttccttttaagaaacagaaaatctactacacggtcttcccgttgcaacgagagaaactaaatgcgcgattaattcgcttcttttcatcttcatcgtctgatcgtctgattatctctttgaccctagggtacaacaacctagcggctgcgctgctgctggacaatgccatcgcggccgtgagaaacaggtgtcctctcggcggtagccggaatgggcagcggcggcgcaacgtcttccggcatgaccacaaccttaggcctcctagacgcctcctcccagaggaagggcacgccgacagaagaccgtagcagtggcgtcgtgggttgacagcgcgtcgaggtccagcaccttgcttgtccgcgaccacgcgcgcgccgacgcctgcaggcacagtgccacctgcgctgccgctggacggcacctgcaggcatgcgtaatggggagcgccatgctgtgggcggcgcgggtgttcgtgttcttctccaccgccatgctgataccagtatgacagctgttacctgatacttgtgatacctggcacctcgtacctgtggtatctggtacttgatacatgtgacacctggtacccgatacttgtgatacatggcacctagtacctaactagtacccgatacccccgatatttgtgatacctggcacctagtacctacctagtacccgatacctgatacctggtacctgtggtacagtatggtgtacgctaattaattacacattaaaattgttccgtgacttcacttttccacggtatcccgtgggctagctgccctctttaagaaattaagcttctctcagactaagcaatgagttcaacagagaaaaaaaaaatctaatgttagaaatttcaaaaagccaagcgctagtgtctagcgctgcctccaccgagagacccgactgtgtgcctctatagggcatctttttcggcagggggtctaatgtttattagctcgatttttttttttttttgcagctggccggcagggggtcgcctgccgtgccccaaagtaggggatcttttcactgcatttttttttttgcagctggaacggtagggcggatacacgccctaccgctgcccattgcagtgggggtgggtgactctggggtggcgatggaatagaatcaaatcaagctaataaacaggtggtgttgtctcagaatgggcgatatggtacaaaactcataaccggatggattcagtcggagccaaagaacagcgcgcagagcgacataggaggagtagaggtgcgtggcgtacctgctctccaccccacgtcgagggcgccgtcgatctggccgtgctggtcaagtttcccgccgcctggccgtcgccgtcgccgtctccggcagcagagagggcgcatccccagctggcagctcgccgccgatctgggggaagcggcggcgtcggggagagtggagaggtcgggagggaggagacatcgagcctaggggcttttaactatttgccactcttacgaatggtccttaacgatttgccactaggcccacatgtcatagacacatgagggcccacgtgtcattgacagagcgtggcaaatcgttaattgccatgtcacaagagtggcaaatagttaaatttccctcgagcctagctcccatcgatgactcaggtatactatgcaggatgctgggccatgacctaaaaggacgattgagtccatccttctgacacatagggctcgagacgaagctttgccaggcccagtttgcttctgggctgatttgttttctttcgtttttgaaaggaataagttcattttaggtcccttaacttgacagctagttcgattttcgcccttaaaccgcaataccagataccgttggactgtcaaaaccggtgtaatataggtcccaaggtggtttggatagtggttttagcccacgtagcacgctatgcggctaattttgttttgaatgaagtggctaatttgactcggttttcatctaacatggcatatgaagcaaaatttaataatttaaaaattaaaacaaaatatatgagcccatgtcaatcaaaaaataattcccagatggcctgttgaaactgaactcgattagaacaacagtttgagtttctccatttatttatagaatactggtttccttcaaatatgcatttatccatttagttttacatttatttttttttatcttatgcatatgtcacttgtgaatatgaaaaaaaaaatcatccctcagcctttacaagattttttctacctagtattataggtgattaattttaaacaaattggagagtgaaataacatgtactacggtagctctttcactttctgccatttttcccctattgatgaatatgtacagctttcgttacatgaaaaattttcaaaatcattacttgcttcaattggttggtgataacatcgaagtttcctacgcatgctcacaacccagtaaagcatggctgaagcctactgacactgaattttgtatgttttcttagaacttctttatttcccatttaaacttatgtaaagatcatacatttgaaagtagtgggagtattgtgttaattgacatgtagttttacttgtacaaagtgaattttgaatgtgtttgacaattgaggatagacatatctgagaaataaaggtgtattttttaatgaaatccttaattatttttatgttttctaaaatttctagctaaagttagagcaaatcgataatttcaataggaacagttgcacttttctttcttagttatgcttatttctgctgctaattttcttttaaaaaacacagcaaaaacacatattctcacaacgttgctgcttattttctagtatatgcctgaatctaaaattgatttatatttttctttcttcttcccctgtcatgctgtctgctaggccaattggcccatttaacgtgtgcagtttggttcataggtatattggataggatatggtcatccatacttgcaaggatgtggtgctccagttatttgtttagttgtgtggatatggatccagcttcttgattggtcaggtggatgagaatggattgaatgaaaacaataacatattaattaataataaaatatgttaattatcattgatatagacataatttatactaattaataacagaatagactaattatatctaatcaaccctaattttgataagttaattactaactaacaacaaaatacattaattattgctaatcaattactaatgatcaagattagcaattgtggatatcctcatccagcatctctgtggaatgttctctctccgggccgtattatccatccttgcccaccacctagacatactaaattaaaactggatcatcatctcccatctaagatattcctccaaccaaacacacccttagcactacaccagacccatacagaccaagctgcccacacttctgcttgtgccagccagccgcagcccgcaagtcacgcagcacggtgccagattcttccatatatggttttggattctttttatttttgtccctgacaactcgaatttatctttataggcaccacgtggaccaatcagatgatgacataacatccaacattagatgtatagatagattagagaggcaacacaccagtgatttggaggagaagaagttcctctcgaaaggaatagtcatttagtagaagagatcatggctctaagccctccaagtttagttgtaagagccccgctccggtgctttctacttgcagtagaaagtaatctaagccgttgatcgtgtttaatcgtagggttgagatctagttctactcccattagagttagtggcggtagaaatgtggaagggtatatttgtcaagagataataattttcgtagggtattatcgtaatttatcagtataattcccgtccatccctctccttcatcggctgatcccctccatcccgcctccgtcgctgtctctcactcccgcctccgtcgcctgtcctggtgtctcctccccatccagcgttgtcgcctcccccaccctcgctgccttctccagctcgctgggtgcgtccatctccgcgtacagcttcgtcgtcgcggccacgtgccgctccatcttcttgaactgattcgtcgcgcccctatagaacccaaccgtcgcgtccagccgcgcgagtccgttcccccacttcgcctcggcctagacacggtcgaaaatcgtgcaggaacggcgcgccgtgcagcaccgcgtcccgaaccgcgcagcgctgccggcggcgcggtcgaggtccgccacgacctcgccacacgcgagccagagcaggagcgactggtccgtagacgtgatgcgcgcaacgccctcggcgcgcagcgtgtccacgcggagcctcctgatctccacgtcagacaacgagcagtagagcgacacgagccgcgacatggccgccgccacctcgaacgccaggatcttgagccccgcctcctccctggcgacgccaccgccgccgaaccgcacacgcagccatgcaggttggcgagccatgacctcgccccagcgggcatgccaaaaacctcacacccgacacggcaccactttacttaccaagctcaagagcacccaacgtaacgagcagacgcgcagggcagatcaaatatcaccagtacgaaatcgagatgggatagctcatgcggattatgcgtctaaacagctcaactcgcaacgacaagctgatacgcgagctcagctcatagcgataaccttttttttacggggaataccgatagctgatgcggcgtcgggggctcggggcaacgcaacctgatgcgaacaagcgaccgagaaagagaaacatcgcatatcaaaattacccctaatctgtattaagagattactaatataccctttaaaatatacggttgagattaattctacttgcagtagaatactgcaagtagaaagcactggagcgtcaccctagttgtaaatgggcaccattctttgattctctcgtgatgcatatatacattacgaagaatgtcaaaatataactactggtgtgaacatgaagttatggttgtttggtttcattcatcaaggttcaaatctttatgtccatatacacatctcgcatgtgtattttaattggtgcagagaggcggtcattctatttctcttgttaaaaaaaaaaatcaaactataaccatgtgttcgccatgctttataccttccatacaaaacttgggtcataaatgtgagctgccaaagtgatcttaatggtttagaagtaagttgcttcctaacatggctccattatagaagaagaaaacaatgtttcattcatctcctttaaaccaagatgaaattaagaagccctcttcctagttgcgggccaggaagcgactaaccatttgtggacaagcacagccaagtaaagccccaaatctcatattgttgtaggacaagataaggttgacaacacacccaggttttgtccatgttgatgatcaattagtttggttgttcaactgtcccgattaacatcttcaaagcaaagcttccaacagaccaacagtacattgaatgaaccgaacaaaacagaagagaatagatggtttctttgcatttaagttttattgtaccacttcgactcatttgtattcaagttttacgaaacttcttgattaactgaaaactgggctaggtatacttagcccgaccaatcagatatgacttttcacccttcctttttcaccaattaactaggaaagtatcccgcgcatgcattcgtgtgcggggatgcatatattagtttgtttcaaaaacacatcaaaatctaaattaaaagtaagatgttttcctttattctaattgaatgttcattggcactctttctttccataagcaatctcgatttttaccgctgatgaatgtattttattataatgtcaagctggacatccctctaataggtttaattgcatatagtttacaaaattggaggaaatatcatctcggtgatatttgacaccataaaatatgatgagaaatgcttgaaaaattattatgacattggttattacatatcagcatcatgtacaatcaatggttcatgtaagtaaaggaatacaacggcgaaaatggatcgtaaattggatgtataatttaaatgtacgaaagagcatgtagcctagtggttatagtgacctgagtagtaccccatggtcctgagttcaaatctcctatggagcgaatttcaggttgggttgttcgcggggctaagttccctatttcaatggccgtatatatccggttggatgtagaggccgggtaaaaaatacccttctctaaaaaaaatgtataatttaaatgtgatgaacgttcaaagacaatgcttctatattttattggattactactcatgggttttcttctgtttgtcttgcttaacactgttgttgtaggtgattggccctatgtctggctcaattatgaattgattccaaaattgtagtgaatatgacatgtttttaatcaaaatatagtagttaaatagtttttctatggaaacatgttggcaccttatccaattgcattgtccagagataacaatatgcctctaaagaaaatgtaacagccagagaggtaccgagaaacacatggaaaaatgttcactcgaacatcaatcctttgcaaacattgagttattatgggtttttgatattttctccttataaggtctaatttagctatgtatgtttgtgaggaagtatatgatgaaataatatatgctgtcaaatttctgtgttattgtaaagactatttaatttgatcaagaatgataagggaagagctagaatatggctccgcgtcatttttttaatcaaaacatagttaattgtgatttaatattttcccttttatgtttgagggttcgggacttggtggtagggtaggtgttaattgcaatatcggagataaagatgggatcgaagcggaatccacaggataaatcgtatcgaaaacagagtgggaatcggttggagtccgaatcggctatggacaggatcggcagagtttgggtcggacaaggttagcagattgagccgattcttacaacacaactcggtacatatcatcaggttgagtcaaagtgcttcatacggattgccacgtacggattgagtcctggaaaggcaattgtatctattaattagggtattttgtataatttccttatagatatgtttgggcaaaagtctgccgcaaagacttatggtatcttagagtttgttagtgataagtgtcgtgtccggcaaggacatgttttgtatctcgggtataaatatgacccgaacccatgtaaacagacaacaatcgttcaatacaatctcggcgcatcgccacccttttttactttcgtttatttcgacgagttcttgctttcgggttgagctgcatcgatttcgatcttcaactagaggtaaagcttgttatggcagcttgcattatcggggttaatgcttccatctttatgatactttaaccttgtttatgtaatccatcgagttatcacacacatgttacaatctatgctagttgcgttatataacttgttatcggctggttcttattgttaggaagcaattggtagagttatgttttgttattaatttaggttgtatcatgtatccaccatctcttataggttttcatcaccttgcttagatctcatacttgtctttatgtttaatgctgcatcggttgagttcgatctattaagtgatatttataattatgatatctggcttgttttatgatcatcgagagagatagtattggggtttcagccgatcttacctgacttagctttatgttttatatgcttgattgatatgctgtctgccatttatattaagatcttatctcaataaagtatattaggcttttgtttgatatattctatctgttttaatatcttaacatagagtggtatcggagtactagctgatacatgccagatctatctgatcggctatgctataagcgtttataatcttcatgttaatgtatatttcgatttaagtgatttatactgtctcggcacgatgaccgatctatcgcaatcacttggtttaaatatacatcaacagaaagattatatagtgttaatatctacagccgatcgagtagatttagtcttaccttacttatttataactgccgatcgattcacatatgacatcggcttgtaaataaatgatatgtcatcggcggctggccgatcggctatcgtttatggatttaaccgcggtttcttttgtctttatttcttgttgattgcaggatcaaatcaactggcacactcacgaacctaaaggcaagattttggacttgcactgaagttaagcagatcttctaggccagtgtgtgtttttcgcatcaacagtgggatatatatgtgagaagtgtttttagttatcgcgcaatccaagtacgctttaacacatttttttgttacattataaatttatgatcaaagttacacaatttcaaagccatgaaaataatcaaacataacatattttgaactcaaacggactacttcaacaactaccccctcaccattttcacagccaatcaaaacaattaaatgcgagaaaacatgacaactctactagaaaaaacgattttgaccaacgtttggccttttatttttctaggaggacaaaaagatactctcttatagcctttttgtgaaaatacctaaagaacctctaaatttagccccgcctacaaaaaaatcaatttttcagacgaaccccttaagagatccgcctataaaaataacattatttttagggtttgttggaaccatgccctatatttgcaaaatttgagatatgccacccgtatctcaatgacatgtaggacccacatgagtcaatgacatgtgggtcagggtggcatatcacaaattttgcaaaatttgtgtggcatggttcaaattcaggcggacccccttaagaggttcgcttggaaaaaaatgatttttgcaagcgggaccttaagtgatccgcctgcaaaaatacgataacactataaaatttgataaagtcccagcggcatccttcacttctctccctctccctcactttcctctccttcccatctccctctcccttcccctctaccggacacgtggcggcgccggtgctggcccctcccctccctctccctccggctccccttccttccctcccagatcctgcaaaggggagaggttccgatggcggaatggccggaggaggggatgacggtggcggtagtgtggctccctccctctccctcccagatctggtggaggggaggggcgtcggtggcggtgcggatcctctcccctccctctccctcccagatccggcgggagggaggagcgcctgcggcggcagtgtggctcccctccctctccctcccaaaaccctaaccgactgtgcttgagagcaccagatccagtgggagggaggggcaacggtggcggcgtggctagaggtgtggcggccgtgcgactcctctcgcctccctctccctctccctctccctctccctctccctcctagatccggtaggggaagggcgtcagaggcagcgcggctggaggggagggcgatggcggtgcagctcccctccctctccctcctaataccctaaccgactgtgctcgagagcactagatccggcacgggcggtgctcttcccaagcgtgcgacagtgtcgacggctgagggttgcgacaacgacgacgccaggcagcatccacggtcaggctcggctcccggcctccatctcctactgctcctccagtccttttcccttccctcccagatctagtgtgcgatgcaatttgtgaatttggaatcgaatttgtgaatgtgaatactatgaaagttttgtgattaaacttggggtttgattgagattcgatgcctggatgaggagcagtgtacgctgcggattttttttatcactgaaaaatgattttttcaagcggactgtataaccaagccgcatactaaaattgatttttccaggcggacgatataacctggccacctggaatgttgattttcgcaggcggtcgagacgttcgactgcgaaaataccggattttcacatgcgacgtgtctggcagcttgcgaaaaccttttttagccgccaacgaaaatgatttttctagtagagtactactaaagttaaaaaacaaaaagataatcgcaaacctagggcgggagaccgggactactactccacgaggtaccaatggtcaacaatctgtatcatgccttcatatgcatctccctcccatagtctgcctacgtcatacaacacgttgcgtggttactgcagacgtcatgcgtttctgcactttaattattattactacgactcttccatctccgtctctccatcctctttcccggatcctgctttggattaattaataaactcattaacaaggcaaataaaaacgcaaagcgatcgcattagcccccagttgcatgcgcttctgacttggatcgcagcttctgcaaaagctcatgatcatatgccgggctttacttagcacttgcacaagttgagctgcactatccatcagatttgacttatctcctagctccctcataaagtaccactagttaataagaaattaagtatttttataaacgaaataaagaaattaaagatgctcaaatcaaatcgatacggccttgatacactctaaaatatactttttttttatgattttccttaaaacacaatgcaaatacaaacgctttgttgaaattataagcacataataatttaatttattccataaataaatcatgacattgcagatgtaaattagatttaacgcatcattagatctacacatgtaaactaagcagtaaaacatgaatagatcaaatatgtgcaacatgtcgaacacgtaccgaggtgacggaaagaccggttgctcggcaactcgcggtttcgggcgtcgacgaaggcgcgcagcacgcgagcggagaggaagacgagcgtcgtggacgaacagggagcagtcgcgcgaagcgcttcccaaaaaccttattgccgccttctcccggtgcaggacgtcgaaggcagaggttccggagacctgctctcctgatcgccggtgcacgccggcgaacgggatggagtagtctacgagcgacggcgcagtacagagtagtaggcaaactctagattgatttcgcgtgtgttgcatgaaggcggcggctcggtttatatagagataggtcgcttgatcagagtgcccacgtaaccaaaccggataagttgcgtgtaatttatccatactccacgctgttttcacgcaccggatttttcggaatgtttccaaaacaaaacaaatccgaatttcctgcagcaaaacaaaactgcaaaaggaggctgcatctgcgcaagggtgaggagccaattttgcggaccattcgacgcgtacgtcgtgcacgcgccgcctaacctgccaggcgagcgagcgcgcacgtgtgtttcccctcttctctccatcacacatgcttcaagtggctaggagggcatcctcccttttaaggaggtccccctctcctagaataaccaaggtggtactaaactgcacatgcatgtcatcccatgaagtgggcttttgtgattttccaaagaattaatcttcgaatgggccttagcccatctattaattccaacacgcttatattcacatgcgtacacctacatcttagtcctataaacatctcaaaaaattaaaggtatacctatatttatggtgccacatatttaaaaataatagtcaaattggttttacactatgatttgcctacacttacatttgagttatgctcaaatttcatgtttgtcttctaattatatgcaatattgagaatatcattcaaaaaaaataatttccatgccatgccaattctactaatgttattctaaatatcacatccaactatatcttatgtattagtgagttaagattttgaaatctgattacgcacgttcttaaacgtttcttcggaaaaaaaaactacatctaaatattaaataagtaacaggaagtatcttacttagcctagctaggtaggtgtattatattctcgtaggccctaaaaaggattggttaaacaaaatcaacttgataaaagcgatacatacatgcacttgcaaagaagggacaatgcacagagtgaggaaattgcgcggtcaatggctaatcaagctttagctttagttgaccttgaccctaccactattttaggtcagcttcacaatccaattcagacactgttccttgtctaaggttctcatttcgaggtatacgtttcattgatttctcttgtttgtatttagttggtgtagcacgttgttttttgggaggagagtgagtgttgaattgtttttgaaacaattgagaggatgttgaattgtgattagggccaattaaggactttgttgtagctcttggcttctagctgcaagtaagatagctgaccggttcagcactatgacaaataacaactaaagtcaatggttaagttcatggactgttgaggcaaaattgtcaaacagagataagaatcaaacaaatgtgaactactcctacttcatctggacaaaaaaaaaattgccattttatatgtagttggagtaaaactttcaaaacttcaaccatcaattttttttatcagttatattttcatgacactagtgttacaatttgatctacgtttgaatatacttaaagaaattggtggtcaaaattctaataaaattcctgaccggagtgggtatactaatcaaagaaagcacatggaacctctgaccccaataaacaagtaatcaaaatctgaccccaataaacaagtaatcaaaatcaaagcagctgctagcagcacacatatactatttatcttaaaagtggatgccccaaatggagataatcatgatggttattctctttttaattatgcacatcatgtttctaggaacctctcgccacaagtttcaaaggtttgactttgaaggcaagtcacattacacatctccactctcctaccaaaacatgaagaaaaattaaaaaaatacatataaaattgtggagtggtgagtattctatcctcgttccaaaagtccacccgttcaataacggggatcccaccatttggtcatgggtgctcaatttgatgcaacttttacaaccaaagcacaaaattcttctgaaattataaagggtaaccatgtgagcaaagtgcagcgttgcttgagtttaaaaaaatagaggcaaatacgatacataaaacaactaattcatctaacaaggatttttttcattggagaaaagggacgagtgaatcttttggtgttttttttttgaaaaaataaaagtctacaagaccgcgtataaagaacacatacaataaacatgtgctccaaccttgtaccgcctaagcagcgtaagcggtcgactataccatataagcgtccaattatgccgcctaaacgctacaaggtgggggtgacagcatgaaccgcataccgcttatcaaaacattgttcagtgtgctccaaccttataccacccaagcaacgtaagtggttgactattccatataagtgtccgattgtgccgcataagcgctaaaggtgggtgaccgtataaaattgtgtatcgcatttaaaatattattcaatatcttatcatcatgattgatcgacggtggaagacaaaatgttatttccttaagaacaattcggtgtcaaatctttccaaaaataataatgtaaggactaatgtgtactaaagaaaagtataaagttataaaataaaaaggacggtaaaaaaaatccataataacaacaatttgaaaacaatatcatttcatagttagcaaaaacaaatttaagctatgaatttccaaaaacaagttctagttacgtggcaaattattaatgccacatttccttttggaagccattcaacgtgctttatcaataaaaaatatagttacattgttcactagaatgcttagtaaaaaaaatagaggtttcatcaacccagttataacaattcttcaaatcaaaaggcacatttagctacaacatatgtcatccaattgtctatgctcccaatttttatccaacagagaaaaaaaaatcctcacatttatcaaaacgtgccaaaatgaaattcccatcttcctcaaggtgctaaacataaaaaaggatagaaaaagataaaccacctcattgacttccctcgcgtctatccaactcctcttcgtcttcctccctccccagtccccaccaccatttccacttataaaacccatctcccccaccccaaccccgttcccacctcacaatctcaccctcaactcaccacccaacccaactcaagcacctcctcctcctccaccggcaaacgcagcagcggcgcgcgcgctctcgcctccgtctccggcgacccatggccgtggacctcatgggcttcagcccgcgcggcggctgccgcccgtccgtggagacggagcagctcgctttccaggaggccgccgccgcggggctccgcagcctcgagctgctcgtctcgtcgctctccgccgggggggagcaccaccaccgccgccgcccgcaggagaagcagtcttcgccgccgctgggggagatcgcggaccaggcggtgtccaggttcaggaaggtgatctcgattcttgaccgcgaccggccacgcccgcttccgccgtggccctgtcgtcggagcggcagctgcggaggcggctgccgcggcggcgtcggcgtcaccgtcgtcgtctcctgtctcgccgcctctcccgccggtgacgacgcagccggcggccgccgtgaagagcctgacgctggacttcacgaatcccgccaaggtcgcggcggcgtcggtgacctcgacgtcgttcttctcgtcggtcaccgccggcggagacggcagcgtgtccaagggccggagcctggtctcctccgggaagcccccgctcgccggcggcgtcaagcgcaagcacccgcacccgccctgcgccgccgccggcgacggccacggccacggcgcaggccacgcgcacgcgcacggcgggtgccactgctccaagaagcggaagcagcgggttcggcgcacggtgcgcgtggcggcggcgagcgcgcgggtggcggacatccccgccgacgagtactcgtggcgcaagtacgggcagaagccgatcaaggggtccccctacccgcgcggctactaccggtgcagcaccgtcaagggttgccccgcccggaagcacgtcgagcgcgccgccgacgaccccgccaccctcgtcgtcacctacgagggcgaccaccgccactcgccgccgccgccgccgcttgtttaattaattaattagcaaaaatcgttagccccttgtgtaaatgagtttttactttttactgctgctcctactactggttgtactaatattaaatgagaaagcaaattttaccgagcaaaatcttaatcgtttggttgaattttcttttgccgagctctgtggggaagtcaaagtggggcaataaattccgctttaattgtggtgtcgggaggtggggcccacatgtctggccggatgaggatgatttcactggcgctggtcaaaggcgcgggtgagcggtcgctttcgtcgtctcgtcccaatgggctgaccgcggcccgcttcgctttaatttgcgcgttaaataaagagtggggcccacgggagaggagaggggggcccggatgctttcaacgcctcggtttcttcgcctgcttttcttggccacatctctcgcacagcccgttgacttttacagcctccaaatctatgcgtattctctcggtctccgaattgctttcggcaaaatcacgcgacagtttaactttagtggtgattatttcgttcggcaattaactttgcgacgaactttctatcatggtactggtgttcaaattttaattttttgttttaagcctaaatttatttatacgacagaaatcatacgtaaaatctatagtatcatacaatcccagtactatctaacaatatctcaattaaaaaaaaatagacaaatttatgagtatcacctctcgagtagtatatgaccaatgttcaaaaaaaaaaaagcagtatatgacctaaaatatgtgctatgcaaattcttctagaaattggatgcccttgatcatataacatcgtgtgtgtttactatgttcatattagttcatattagtggagcaagaacaaagagaggaggaataataaagggggttacaaacttacaatgaagtgttaagtagaaggaaataaaaggttataactaaataccatcatggctccaataagacaattatggatgtgttcttcccctatttccccaacttctattccattgttttccatgtaagttattttaaaaattatattaattcatttttagagttctttttacttattttaattaattatgtgctaatgagccaccccattttgcatgtgaagtggagaagttgccaacttaatgaaaagaacacagcctatattactatgcaaggacttattactctgtagtggtatttagaatggtattctagccgtagactttaatccatcgcttggaaacaatgaccaccaagcactttttgggtgttaattataattttgcaaagacaagactttgtctagcttgtaaacaatgtcacatttgccatgaacatgcatacttttgcttgcttttctttcatgatgtactccctccgtttcacaatataagtcattctagcattcttcacattcatattgatgttaatgaatctagatagatatatatgtctacattcattaacatcaatatgaatatcggaaatgctaaaatgacttacattgtgaaatggaggaagtagaatagaactagacaattttgttcatgatgttgccctatagtctgacccataatctactcgacctgtttcttcaataagtacatgcagatataatgtaagttcctttcaagtggatgtcaagtgggcttccctagtcagaataaaggaatcataattaagcatttattcttggaacatatcttatcttttgtttaaagccatatgacttgactaatatctaacctcgcttccttttttttgtggggtcgtgcaaacacataggttttcttttttgttgtttgtttcacaccgtttgtgataagatgtactacaaacctaataataaattaaagtatatcaatattgattatatatatatatatacatatgtatatatatatatatatacatatgtatatacatatatatgtatatatatatatacatatatatgtatatatatatatacatatatatatacatatatatatatatatagagcaggttttctattcaactagcttagcaaattgaccctattgcacgtgggaacaaagtcaagtcaatataacgagtgcgttcttcacaattttatcgagtgcaatcaagcctaatggaaattcagaatagacctttcaaattgacgatattggtggataaatacattccgtattaattaaaggcgttgttttgaagaatgttacttaggtattgtgttttcatttcgctcgagcaaagtgtcgcaacacgatcgtgaggcatgagatgtcattttcgagctatcttaagatatatcttaataatatcttagataatcatgattcggaaatgcaattttcgatagtcatacagtctgaattgtgaagtttggtttgtgccgtgctaatcacctacaattttcatatatatgattgtgggagtccaatggttcttttacctaggatttcttatgaaatacgaccaacctacttagttttcaaaattggcaccaaatcattacaggcaaccaacaatataatattagctatatgtaaaatatctttacagacgggcaaagaacattttccctgacgggcttcattacgtaaaatcattttcgcatgtggctaggctacgctgtccaccaaaaaaaaaaagtcttatagtcggcacgtggttggtggctgccaatgaaaatggtgtattttctttggctattagtcgctagcggcattgccgtcgcaaccagaggaaactttacctgttcgactgagattccgagaataccaaataggtttaaccaagctaggtgatgaagtacaattaattagttggaccatcccaacaattatgataaatgtgggctctgtggaatactctgaacaaatattttcgaattttaggttgtttgactttacactcatgattatatcaattttctgactttacaaatatttgttttttacacaattctaagcataacatgttcattacggcctgactggcctcttcctcgttcaagttaattaactacatgtagtaattaagttgttcgatcactggaaagaacatgccaaagtactgcttctagatacgagattatttcgcgaaagttactttagcttctggtatatatgaccacctctgaacatgcttaattagaccagaagatgcccgttaaataattttcgtgaaattggaataaattaaagctttgccctcccattgacccaacttggttcccacgtgtggcatctcatattcttgtcagaccaattgcactaagtcagcaaccttaaaagaacagctaatatatattcaaatattaagaagctttagttttttttttaacacatctcaccagctaacagtgtgaacactcataaaaatatctttctgttcttgtacaatagtacaaaagaagaagaaggcatcaacggtgtctttggtgacaatcaagctggggcagatattagtcaactcttatattgcttaaacaaaaagacgactttcaaaagtccaatgcttttgattttgttgatatacgcatgttctgactaagcatgcaacatgtcaaagtaagcaccccactatatggaatctctcaagcggtcaactttgttggttttctgatgaactaccaaagttagtttttgctaccataatgtcaacagttaatagtcatttacatttacaatatgctctaaggttagcgactcggtcagttggtgaataggattactgcaaaatagcggttgtgtaaatggattgatccgtgaatccaccaacgtgttactcacttattcatttatttggtctataattaggttgacgggttagcccaattacacctctaatagagatactctttctgatgatcataaatatataaatatgtgacgtttagaataaaattcgatcgaattgttaaagatttgaccatcaataatttctcaaatcctaagtttaaaaaataaataatggtacgagtgattttttctgtaaaagtacttccacaatacacaataccataaacttcttagattctataaacttgttataatgtaaaattaatggtaagagttttaaaaatctgatcaaatcatcctaaatgttaaatatttacggctaaaaagagtattttgggtacaacttataaatagcagccacataatcaatataatttaaaaataataattttagtaaaagatttagctgttattaaaaactaaagctaagttagcgtatatttgaaatatgatttttttatagaaaacctctaaaaaacagtttctactccctccctccaaacaaagacaaaccctggatttccgtgtccaacgtttgactgtccgttttatatggaatttttttataattagtatttttattgttgttagatgataaaacatgattaatactttatgtgtgaattgtctttttaattttttttataatttttttaaataagacaaacggtcaaagttggacacggaaacctaggatttgctttttttttcgaaggaagtagtacaatttaaactggcttctgtttggttcaaaatgaataggagtaactccaatggaccacatatgatacgaggctgaagcagagcagagggcggttggtgtcgtcgagtttaatggtgcctagctttccgttgaagagtctgcatcgacgcaatcactactccgtacaaaaaaaaaaagttaaaccctgaattttcatgccaacgtttgactgtccgtcttatatgaatcttttttataattagtattttcattgttgttagatgataaaacgtgattaatactttatgcgtgacttatctttttaatttttttcatatttttttcaaataagacggacggttaaatgttggacacggaaactaggtttatcttttttttttttttacatagggagtactcatcatccagaggaggcgaaagtctctctctgattcgtggatggatcgccggaataatggcgtcagagggaggggttgagtgaatgcagagaggcgacgacgggtcaggtcgatcatttcatcagctgccaccggcgggccggactttgttggcagccggcagccgcagtgcagtgatggcgagctgaccgcgagtggtggttagtcgtagagaaggttaagggtgtgtttagttcacaccaaaattagaagtttgattgaaattgaaacgttccgatgaaaaagttagaagtttgtgtgtgtggaaaagttttgatgtgatggaaaagttggaagtttaaagaaaaagttgggaactaaaccaaacctaaggaatgaaaaaaaaataatggaatctaaaaaacacataattataataaaaatgtaagtgtaaatagaggattacgaatgaccattagattggattgtaggaaaaagcaggaatcagataagagatatatactcgaagaattttttttttcaaaaattgttgtttttgctgagttttctttaaatttttttaggattatacatttcataggaatttcatatggtaggataggatcgaggacttattcactttatcgccactttcaacaccttattaagttttagcattaccaaattttggtaagacaacaaactaaacatatacttcctccgtttcatattataaaactttctagcattgcctacattcaaatagatattaatgaatctaaatacattcatatagatattaatgaatatatatatatatatatatatatatatatatatatatgaaaattataagctactaccgggagtaactactcccatcttatccactgtacggtttgctacgtggcagtgcaaatttctgtatatatatatattgacatatatatgaatatatgcaatgctagaaagtcttataaactgaaatggaactgaaatggaggtagtacttatcaatgccaccttaccaaacttttgacaattctaatagttttcactctcaaaatttctatcaaccttggtaaggttttaaactaaatgcatccaacattacctatatttagtaacgtcaaaatgtgtcaaaatttggcactattaaaaatagctaataaataaacaatgttagaattttttttcatagaattaaaattctccaaaattcttatgttttttctacgaagcaagggccttaagctgtgtgttgtatgctaatggggtctttattaatgacttaactacggcgtgaactacgcagagagggctagcatagctagtagggagaaaataaacaaaagtattgtcacgcccagaaattcacgaaccagaatttctaagctgaatgtgcattaaacctctgtttaggaccagccagggtacacaaacgacaattgttgacatacagatccacgtcttacaaaaatataaaagattacaaatgcagcggaaaaaggtaaaagcgagctaagtctgaagacttgactcctgcagcgaggagactctattccacaggcatccttgacagcagcgacgaaaccaacttcttcgacacagctccaactgggaagaacttcagctctggagtggggaagagagagcaagactgagtgctacctaatgtactcagcaagtcataccggaagagtagggtatgatgcaggatatatccaagggaggctaaaggttcatttgcataaaactagcatttaaaagcaatagttgaaagcagtaaaacagttgtagtaattaatcaatattaaccaatcactgctcaacgctacaccacgttgagacaagcccaaaccaccacctgaactatccagttccattagctaactaggagtgagactaatcacggtgaatctggtcgaccgcccataaccgcgggcacgactattcgaatagttttactctgatcagaggtgtacaactgtacccacaagacacatccccacgacacgttcccgtgcgccgacatgctaccacgacataccggaaagaggccacgacagcgggcagtcccctcccatgcctaggtgaatccggaagcgacaaaggccgtcgtagggcccatcccgctccatcacgcccacccttgcctggatgcgtaggctagaggaaagctacactacaagcccagccgttgcccatgctggcctgtggtaagtacgataagttcatccagggcatcccgcgaaccagtccttaatcgccatgggcacgactagcaaaaccatgcacccacagcccaccatgtagtgtattttaattaaccaacaccattgcggtggcactgatgcaaagctatgccaataattaaagtctatgcattaatatgatcccctttgtgtactaattgaactaagcatggctaagcaattcctaatccaacatctatgcatttaaatacccaagttatcaatggcgtaagggaaacaacatatagctgagtaataggacccatcccacatgatattgtaaaagaatgcaacgtttaatagaaaatgtgggacatttgtaaattgggtacaatatgatcaattgtaatgcatgacttgccttgctctcacgctgatgggaccacagcaacgtcttcgaggaatcgcggatcgacgaaacggccgaaatctacgcgataaacaaagcacacatgcaaaacatttgataagtctactgaaacaggaaacaaaaccatttttagtggattctatgcttttttatgaatttactgagacttgaatggacttaatcggagctcggatgaattagttatgaattttagaagattatatgtgtttttactataaaagaaaaaaccttaattatttattgcgcaacatgtcccaggctgacgtcatccaggaggggggcgccggcaagcgggtcccacttgttagcggcacaaggggagggagagggggctcgggcaagtgggccccccgggtcagcggctcaaggttccgatccaccgtggaccgggaccacgtgggtggtccacaggaccgatgatccagatcggtcgggaggccgattggacggcgcgggcggggctcggctcggcctatagccggccggccggccaatcatggcgatgcggtggcgcgcggtcgccggtgatggcagccggcggcgggaggcggcgacgggcggcgcaaaaggcagcggcgtcggccggaagtgacagcgagcgtacggggaggcggcacatgcaggagagagaagtgggaggaagaggaggttcctcaccgtggggtggccggtgcggaaggcgaaggcggcgacgatgactcggcgagcggaggggcggacgggcggcggcaacgccctaggggagagcggagaggggttagaggtagggaggaaacccgcggcgacaaaaatgccggccgaagatagggaggacagcgaggctcaccggcgtgcgaggagaaaagggctctggtggggttccagcgacgcgaggcggtggccgagatgaaccacgaggcggtgaagttaacggcggcggcggcgtgcggccggaggtggcggcaagcggcgtcgctagcagcgagcagtgcaagcgagatggagagcatgggagagggcggcgagcaagggaaacgagagatggggctcgtgggagtgtttttatgggcgaggaaggggaggacatggacgggaaccctctcgatttggccggcgacgtgggaaggtggggagggagagagagagggggattcaaattgaatcccgccccttgcaagcgcgcgcgcgtgcgggagaggagtgggaagtgggcgacgacgtgggcgcaagcgcaggagaggcgtgggatgggctcagacggagtggaggacgtggggcgccggcggatggagctcggttccaacggctggaggtaggggacgaccgacaggttggccccacctgtcagcgtcccgaatgggaagaggagggggcacgggccagcccaataaagaagaggccgagcgcgggagagaatgggccgacggcccaagaaagaaaaagatggaaaagaaaaagaagaaaaagggaaattgatttgttgggaaataaataatgcacatgctcatttttaattggttaaaattatttcttaggctctgaaaattccactaaaaatcatgttagtataatttgacatgtagaattcaggaaaaattctacatgccgattccgattattaattgcatttttttattatatattaactctaggttaaattaaactatttcttcggacgatttattttataaaattttaaacaaggaaggggaacttcagggcgtgataagtaggtcgtgtttagttcaccctcaactactccaaacttctaactttccatcacatcacatcacatccaaaacttttctatacacataaacttccaattttttttctaaacttccaactcttttcaggaactaaacacaaccgtactccatttgtttaaaaataaagtacaagatatgacatattttattattacgaatctggccaaatcaaaagatctcctatacatattcataaatttaaaatgtgtcacattccattccccattggtgtattttgggagaagagagtacatgtacttctcctgaagagagagtaaaagctagcctcgtttcctagactcctacgcccacggcttacaaaatcggtgaaccatgtggttaccgtggtaattgcacttatcactgaggtatgataatgataaaaccatggtaataccatcaaattcaaataatttagaactatgaatttttgaaaaaaattacatggtttctcattatttgccatggttatcacacagtaaccgcacttgccatttgtgtgcggtaacccgtcccccattgtaaggaaactctgcctaggctgtgctagaaatttacgctgatttaatgatcaagccagttcacctaggtaaaaactgttacaaaatcaaagcgcattgagctgatatgcataataggcatagaatcaacgagtgaagaaaccataatagtttattctttaaaaaaatagataaaatgcccgtgtatttttttttgagagcagatcaaactattaatttgacccggcttttgggagaaagccaaaggtaaaacaaagtacaaggtctgcaaagagcaaaacaagagaaaaaaggctgagcgacaaacgctggggactccagcttccaacagcacactagggaggggtgaacacctacgccctcaaaccaaacctcagatagcccacaacacactaagaacacacaccaaacggcctactcagaaccgaaacaaaaagactaaatggctgcaggaaggaccaacggtttcacttgtcgcagtttgtccataatagcttcatgccagccatccaacaccttttgttcttctcctcttaggaacaccttccacttttgcgccagcgagagtgacttgtaaacgacctgtaagggagaagaaaccagaacatctttaaagacccagtcattccttattagccacaaagcccaacaaatactagccaaaagcaccatccaaaccctttttttcccctatcccaaacaaagctagtgcaatcccagaacgagaaaggtctcctttttaaatgcaaggcctctttaatcacacaccaagtaaacacagctaaaggacagtgaaacaaaatgtgatcagaggtttcatttttcccacatagtttgcaaagctcattcccccctttccaattcctttttactaattgaacagcacaaggaagctttcctctcccaaccaaatagagaaaatgtttaattttaagagggattctactcttccaaacagcccacatgactgaatccttaatcccccaaaaattaactgattatacattgacttggcggtaaaggatttatgtttagtatagggccagattacttcatcacaaccaccctcaatctgaactgattgaagcatcctcttcaagtcattcagctcttgttctctctctgtactcaggatcctacggaaggacagaatccaatccccattattccacagctccctaaccgtagccttctgatgcacacttatatcaaacaaattattaaagactactctcagtggtacattcccgcaccaaatgtccccccagaaatctgtcctagaaccatcatgaacttttttttctaccagtctctgcagaaatttcttacaatggtgtagccctttccaaaattgagaccccccacttcagagctctgaaaaaaactccccctcagatatttccttctcaacacctcaaagcacatatcaggggccccattctctagtttcataatccatttacaaagcagacaaatgttcattaccctagtattcatgaagcccatacccccaaaactcttttggacgacacaaagcctcccacttgatcatatggtattttctcttctccccagtaccttgccaatagaatttgctcctagcagcatccattttagcatgaaaaccctcaggaagagagtaaaaacccatggcataaagaggggcactagataggcaagagttgatcttaatttccctacccccataagacaaatacccactcctccaagattgcattcttttttcaagggctgcaggaat

SEQ ID NO: 4915 - DNA, 10660 bp, Oryza sativa
tcgagctaataaacaggtcgtgttgtctcagaatcggcgatatggtacaaaactaatttctatatggattcagtccgagccaaagaacagcgcgcatatcgacctaggagtagaagcgaagcatacctgctctccacgaaagccccgcggcgaggggcgccgtcgatctaagccggtgcagaatcttcgcgccgccgatgccggcatgccgcggagagtacaccggagatccacatcctcctggggttttgacggcgcgtccgcagccagctgctcgccgccggagccggaattggggaagcggcgtcgtcgggggagaagaggaagcgacaaggtgagggggagatcgagggttcccatcgtccatcgtcccatcgaatcacaagtgtcgatgtaagccacgggctgggcttctctcttcacgcctgggcatcaagcccaagctgctgcaggcccagtccacgcctctttttgttttcttttcttttttttctaaaggaatttttgtttgtgctcaaattggtaatgcggttgtttggttttagcgcgcggttacaagataaaataagtaagccaaggctatattgatttgttcacgaaggcatgtagcctgcccaaaaatttggtagaggacaatagaatcagtactaggtttctcaggaaatgtttacatatctgccgatgatagactttgtcctctatcggtacatctctagttttcccagttttccatgcacattccctagcctactcaacagatgatttaatctggtatggttattagatacaaatgaaaatttgcagagaaatttactactgaaaataaaatcacgtgtaaaccggaaattaataaatagcaaggctttacatttgggtatgatccaaaccattcatatgccaggtcatctgtcactagcatccaatccaaactcggcaagtcgattagaaattttgcaaggatcttagcataaatgtctctaaaacccaggccatcttgtttctttgcctttttcagtttatcccaactgatccaatgcgttttttttctccttctcttgctggatccaccaatacctagaaatgagagtgcttatctggtcacctttgtcaaatcaaaatatgccatggtgtagatagggatagcttgagcagctttgatcataatctcctttcacctgtgaattctttgccagactcttatcttttagatactcaagagcttcagctctagattttctaatatacattggaagccccagatatttctcattttgtgttccctttgttatgtgcaacgtttgcatcacctcgcttctcttctgatccctagtgttcttgttgaaaattacagctgactcatatcattcgccctgaagacaactcatataattggagaattccttgcaattgcattgcatcctccccatttgcacgaatcagaattaaagaatcatcggcaacagcaggtgagagatgcttggtgctcctgggcaaattttaaccctgccaattcttccttcattctctgccttcagtaatacagcagaaagccttcagcacagagcaacaaatatggtgataatggatcaccttgcctcaatccaaatggttctcctcgtatacagtaaacaaccaagtccagctatatttccatgataaaaacatcaggataccaattagcaaacaacatttaccacatatttagcagtagttgacaaatacctagcactgattccccgcaaaaaaaaaaaaaaaaaaaaaaaaaaaaaaaaaaaaaaacctagcactgatgttcgaagaaggatagcatagtatatgggaattaaaaattcactacttctgcataagagcaaagacccgaaacaaaaaatactaaggatcgatttatggaggcaattatatcaacagcctggacaggtactgcatgtaattggaagtgcaattcataaccattacataatcgatttatgagagaaattcaagcccaactgattgaggtgcagagcaaaatgtttgctaaagaattgacgctacatgtgaaagctgtaaaatacaaacatggagaatttttttttcccattttagataaacatggagaagacttatgtaggcagggatgaactgtacaaaatggttgaaacaaacaaacgaaacgtcaaaattgaataataagttcctgcatgggcaatcagaaaaatgaaattacaatgctggtactagtcagataatgtatgcctaatatcaagtccaagtgttgagttcagttacttcttgctatctcaaagcaaataacaaattaagaatgatcagttaatcattctgttgtcatacctttttcacgtgtacactctataccaggttcccataacaaactttgcaccaaatttgttggggctcataatctgacaaatgagaaagaacgaattgtgaaggaagtattaccaggacatgcttcaatacatatatggcaatgaaagttgggaaagaacgaattgttgcagtcctctagtcaataccaaatgtttgtattccagtatgtacaacatgtcaactacatgttcttgtttcagatttgtttctttcctacaaaagaaccagctagccataccagaaggttttaaaaagacatgggagacatttcccataaatcaaatttgcatgtcttatctgaatgaaattaacgtttgctgtatgctatactaaccaaacattgctatggtcagcttcagctaaaattattggcagttattcttcagcatccatgtttcagcttttaagcctctttgcgacagtgctatttcctccagcatatttatgtactctgagaaaattaaaaaaggacagtcatttttacaaacaaaaatcgaggaaaatcatttgacttaaggatcagaaattattgcttacatgaatccctgagcaacataaaagactcttcaaaatgctggattcttcatctacctaatcagaactatgctgctatggtctattatttccgtttccatgcctggacaaattcagttcagtctcaggctctcagcggttgtctgcaactctgcacatacctgatcttgctgctttgcaaccttggtaatcacatcttcagacaatcggctgaaaatattggatgttccagccaaatctttactgtcatagacttgcagcgtgaaaaattcatcatgtctctagctttaaaagatctcctcaggtgtagcttgctgaattctctgtgcacttcgcaagcctaacccgcagagaatttaatctgttaagtatggtaatatgataattcagatacaaacgcacattttacagaaaaaaatactattaaaaatagaattatatataagccaaaattcggtgattaaatgacaaggcattacttatactatgctaaccatagtatctgcagagtacgatacaaaattattcatgtgccaagtcatctctgacaggtatctagtggaaacttggaaatgcagtcggttagaagttttgcgtcttaaggccaaattgctagcagtaagggcatatcaaaacagcaatgtatctcctctcctctcctaccctatctttaatgttttaagactttatttaagcttctcttggcttaagacaaggaattgaaaaacgattcaacagaaaaaagaatttcattcaaattcaccttatttaagcttctcttggcataagacaaggaattaaaaaaaagctaagcactagtgtctagcgctgcctccaccagaggcccgactgcatgtatatgccgtatttgacaacttaccgttgccgtattggaggggatcttttcactgctccttttctttttttttttacagccattattataaccggaaggggatacacgcccagccgatgcccacatttgggatcttttcgctgtattcggtcggggtgggtgcccttggggaggcgatggagtagagtcgaaccgaccttataaagaggtcgcgcttgatcagaatcggcgatgtgggataaaacgagttactgggatcgatcggcgccgaagcgcagcgcacggaccgagctaggagtagaggcaggcgggcatacctggccccatcggaaaccggcggcgagggcgccgtcgatctggccggagctgaagtttcccgctgccgtcgccgagactacgcccgccggatcgagagccggctgctcgccattggacgtcgggaagcggcgccctcgacggaggtcgggaggggatcgatgaagtatgaggtccagttcgcatctgggctgctttttttttttcaaaacaacggttcatggttattcatttatgcttttctttttctgtttgacttgtgatctgttaagagtgcacatcgctccttccattaaaaaaaactatttgtgacttgtaatcggaggatgtgtcatatttagaattaaattttaaaaaactgttcattgaaatttttttagaatatttgagatgcacaattttttacgaaaatatactgtcgatctcgtacaaccgttgtgcgaaaatgatgtgagcgtgacgtcgcggatggtcacaaagtaaaagtgtgagaccgtgcggtcttatggaacgaaagtgaaccaaacagcgataccggtgtcatgccgatttaattagtaattaattatcctgattagtcaattaactaattattaattagtcgctaattaggataattaatcacttttattattagttaatagttaattaggtagttaatcactaatcaaatggagccgttagacggtgtcgctgattggttcagcgagactgttccgttccgcgagaccgcgcaataccgtccgcgacgtcacatctatgtcattttcgcgtaatggttgtgcgagatcgacggtatatttctaaaaaaaaacttggatgaacagtatattttcaaatttaattcgtcgtatttgtactaggtttttttacatgatggagaggttatgttgtatggagtaatggaataatgctacattcatcttgaaatataaattataaatatattttaactctaaatttagacaagcgctcatcaagattcgaagttagagatattttagtggtatggatatcaccactagcattgttttcaaatgtgttaggcaacttcggcttagttcttttttaaacattagcccataatttttctctcaaaccttgctatacatatgatttttgcctcatccaaatagttttgatcatgagttgacttgtactaatatattgacgtgtaattcttttgtgtgtttgtgaaaaagagttgacttataattttctttgggctgcattccaacctatgtttggaataaactgatatgttccacacgaaacaaggtaggaggttattagtgaataattaattagatattaacaattataaaattgaaaatgagtatatttcattttttaaaataaacttatatgtaaaaaggttttgcaaacacacaccatttaataatttggaaaacgtgatcacgataaatgatagaattgcaaaagctaaacgaactttcgaactgagcctatattgcccttatttcatacttatatgctagcctatttgggaaaacaaaattctcaatgcgaaaaaaaaacactcatttgcatgatagaattatttgatcacaaatttgacaactgaaatttaaatttttaaataaatttcagaccaaaattgatggaatgcagacaatattgccaccaaaagatcaccaattgatggcgatctgcgaggccgtgcgggtcacggagcgcgtctgtgggaggagaggcgggcctcacgggtgcggcgggtggtgaagagctcggaggcgctcgtcatggcgggtgggggagggtgtggcacacgtggcgcggtggcgatggtgcgagactgcgagctcctgtctcctaccggatgcagcgatggcgagggcacagccacggaagcctcagcgcggagatggcggcgacagtgggggtacggcgcagagatggcgtccctccccctccctctcctcctcgtccttggcctcttcgttccttttgtcgaatctgggagacggtggcggcggggactggggctcgagggagatgatggcagatccaggaggatgacgataacgacggtggcatggtaattgagttcagcctgatccgcgctaatgtgtttgattcattacctcgtgatgtgatattgctgctaatccatggggattaattaggtttcttgggatcaaattcgtgagctctagattaaatttggtctttttcgtgctgtttttggttgtctcgttgattaattgatttggggattggatagcagatcagattagaaatcggattcggtgggaaaaatagcgccggataaatcgaataacgcggtggtgacggacgaaacaacgctggtgaaaagatgtgacgattggaaaaatatcaatcttttaattacttaagattaagacttaagatattattcacttatctgtatgcctgctagataatattctcaaagtgaaactaattagatgagccaattatgcgaggtctgcaagagctgttgattagatgtttttttgagtaataaataaaagcgaatctgaatagtgcttacagatatttgcattagtactttgattagctgaccgcaatttgcatatgatttcaaataaattgaactttgttttatatgacatgtaacatgatggtgcaaagttgctgaagagcacctagcgaagttatgcactgcgatttgtttaagttgttatgttgttttagttttttcatagttggagcatcacttaagaaaccttctgccatcagttttgtgaacacctttgatatttatatttacatgtttgtcagtttgacattctaattgtaaatacatatttgtctattctgccttctagcttaatagaaattcctcttgattaatttttttatctaacacaaaatatttcacgcagctgagcattttgggctgcccacggttaactttggatggccttatttccaatctcaagtcatttaatacgaatgcggtgtttggaattaagcacctcagagttggaacactcttcagtttacggaaggagcagtacgaagagttattatccttgttgaataccgacaagacacaggaggtgcataatcgggggccaaagattccttcatgctaatcagtttttatcagattgcaatgatggatagatatgctcctgatattgagatgtgccctatttgtcagaactacaaacttgtttatgattgccgagatgaaggatgtgatgatagaggccgagtttagttccaaattttttcttcaaactttcaacttttctatcacatcaaaactttcctacacacacaaacttccaacttttccgttacatcgttccattttcaaccaaacttctaattttagcgtgaactaaacacacccaaaagatcaggtaatttcaagggttgtgctgtttgcatactgagatgttatgagtgtggaaggtgtgtagacaagttggcattcaaggagtcattttctttggactgggtttgccctaattgtcaagagaagaaggatctgtctcccccaatgaaataggggtttgtcccccaacgaacactcttcctctgctaacagagaacagcgtgcaatgctgtcatgcaagccatcttaacgtatcatttctactgagaaaacagacaaaaaaaacgatgagtttgttattcttgaaggcgcagccatcctgacatgctgcattagcttcttgcaagaaaaagaacaaaaaaagagtagttagtttgattcagcaaaaaaaaaagaaaaaaaaaagattgtttcgctactatcgtctaactggtgacatttcagaggtgagtttttcctgattgctttgatgttatacatcccattgaatttagtcttatgtgagagatcatttcctatctttggtttggggttgcttccaaggattgctgttcaagagcggaagcacaacgtgaactttacgtcagtattgcagcagcagctgatattcttggaatgttaagatcgaagatgaactgctctcctcctctcacggtctcaccagagcaaatagaggattgctgtaatttaccttatacatgcgtgccgcaatgttgatgttgtgtaattctgaaaacatttgtcacactaccatgtaatttacaactacttgcagagaaataaatgacttctaaccaaacttttgctttcatgtcaatttgtcaagtatggtgaatggccgtcctcgttggtaacatgatgggaatatcctggaagcaaacaacacctgtcggagtgaatttctgctgtttcgcgtagtagagaatgaaaaagagaaggccaactcaacaattacatttggcaaatgaaaagaaaagaaaaaccaaagttcagtttgagatcgtcacgttgagttaggctatagcacataggggaaaaaagcaaattatatttgtgcctctgtttggctaatctgcaagtctgcttgattcattgccacctgtttcaaggatgaaaatctgagaaaacatgtggaactacgacaagacgtatcatggaacattttatacgctccaaaaccgcagtaaaaacaccaacgatttgagaactagtcacgcaattaaatgtttttgattgaaagaataaataatcagaatacagtgtgcagccattggcagagctaatcatgggaagaattctacatgaccgccaatatccttgcacaacaacttggcttcagaagcaagcttactgcttctaaaaatcaccaggtttgtcaaccggtgcttgggctgtggttcaaaggatctagcttcggccttcttaccaagcagcaccagctcccgggccggcattacattcccccaccagaaatcacgcaggacttcatggatgagctcccagtattcgcgatctctaggtactcggaaaacgctgcttcggtgggagtccacagtagagctcgacccaatctctggccattattccatcaggccctgcacctgtggcatgtaatagtatggcatagcgcgcccatggcagagcgaagctcaggctttacccttgttgaacggggcacttgacttctaggatcccacggtttgggtcaccccctagaacaccatcaggtgaagctccgagccagccaaagttggcctcagtgtgcactgcgaagccaagggaacccactgaccgtcgggtgatgcttgtgtactgctctatggctacactttcattcaccgtgccccagttcatggcagacctcgccgcatcctccaacttgatttctgttgatccaaatactttctcgctccacagctctgaccgtctgttgccagcccagaagcccaaggcagtgctgaaggtgcttgtggtgagcttgtccttgcggagagcaaaccattcctctgatcgctgagcaacatccgaagagttcagctgggaggacaccacgagagctgaagatggtgagagagatagcagggatgactggctatagatctgcaatgatgaacctgagcagctctgaggaatatagccttcaaaatttcgtcttgatggcaagaatgcaggtgaggtcaaccgcacacgaactgtcgagcgaaaggctgttggaattggcaggagtgtcctgaacaaatatgaaactgcgcaatggttaaacatcatgctaaatgatggtgcagtctgcataaatatagcatagctgagaaagcatacaggaagtgctcaacaagaatggttaacctctgaatgtggcatacatgaaaagctatacttatttttatatgatgaacatgcttggctttttgcaagaataatgcaagcaagtagcaagggtttattccttgattgattttaggaagcaggcttgcttggggcaagtaaaagtctgggctaaaactaagaaagagatcccagcttctcaagcaatggagtatactacaatgaagcaaactccaggaagatgaaaaactgcaaatagctctaacctctcacgccggacaacaaagattccatttacagttcgatcaagggatatttgtctcctgcttattttatctatgtgttatcaaattatataggccgagcatacttcagtcagtatttaacatgaatccaagcctcatgtatactactaaaacaatctattcaggtgcagtcctgatgacgaggtgaagctaaatttaagtcacacccctgataaagctgaagaattgataagcgcagctatacacatgatatgaattagcagggtaatttgaacaattttctgaaggcaagcaagaatttcagaaaacgaaattacagctcattgagagtattgaaatcttataatccttcacattttcccttatctcttcatttatcttctttttctcccaaaatccctttggcatttggcacaaatactcaattaacatgtatgcgccccaaaatcaacgctaggagtgtccttgcccccaattgcaagattcagttaaccaaaatgtactatgcatcctaatggtcaatggagcatttggtttcattccatactttgttttgtagttgcaagctcctccagagtttcatgccattattaagcgttcacttcccacctagtcaccaccaaaagacattgtcctaaaccc

SEQ ID NO: 4916 - DNA, 59088 bp, Oryza sativa
ggcagggagggagctagccatgactgctaggtgagctcttcacgcgcgagatggaggaagaagaagagccaggggcatttctgtccgggatggcattttggcgaagacactctggttgaggaaggtattccagcgaagcccgttttcataatggtattctagcgaagccattcttatgggatggtagatatgcaattttctcggggggatggggactcatgtacacgccaatattttcatctgacaagtgggccacagtatgttgcaacaaatctcacgttatcttggacggaaaccgttgccacgtatcttcccgggagttatacaggcatcccgtgtgcattgtcccacgcccaggaagcttcccgtgttctttgtaaaacacccagaaatactttttgacacccgggaaagtttaccatcctggtagtggtttttgggtatatgaaaaataatatattcaaatttgttgtgacaaaatctttcatatgatattacctactaaggggtgattttgatcttatagttgcatagcaaaaccttcagtccttgacctggctgagatgcttatggagggtaatggatggtttctgtaggaagctgagggtttccccctctgttttttagaaaattaagatgcatatcaataagtcaaaaggttgaaattgagtcaataagttgatattgatcagcatattcaattgaccattcatggcaggtgaaagaagctgaaaaggctaaatcaatatttgcttttctaagaaacgaaggaaaatcagtcgttggagttggaggatattgttggggtggtgagtcatattgatcaaacacaagaaaatgtatttatgtgtttatactttatatctatatatatcctaatctatgaatattatctaaaaaaatcttaatctatgaatacactcttgaaacttcctatccacattatactatgtttgatagaaattaaagtctctaaaaacatgtttatctggcaggaaagtttgctgtgacggtagcaaaaaccaatgaggtagaagcggttgtcatctctcatccttacgctgtgactgctgatgatatgaaaggtgaagttgaactttttggcgctatgcaatatttatcatttgatctaatctgtattatttactcatattaattattcccgttgataaacagaggttaaatggcccatcgagatccttggaggtcagaatgacacagttacaccaccaagattagtctaccagtatgtgcatgccttgcgtcaaagaaacgatgtgagttcttgtttgatttcgttgagcatgtttttgtctcgttacctttttttctcggataaaatcttcattttccactaaaagttgacacgatttctaatttgtccatcatcctctcaatcacatataggttaaatccacgtgttgatgactcatcgtgaataaataagggatttttttaaataaatcggcacatgcagcaaatttcattgaatagagaaggaaaaaaaaacttatgtatgttataataagggattgaaagctctgaacaactgaaactgaaatatttggcaagttaacgaggcgatcaatgtacaaggcacttgtaaatcaattaaaaaactgtggctttgacccaatttcttcttctagcatatacggtacagagtaacacaatgatattgttgttgttgcagattgatttctacgccaagatttttccaggagtttcccatggatttgccggtcgatataacaccagcgacccgtttgctgtcgaaaccgggaaacaagctctcgccttaatgctggactggtttcagaaacacttgaagtgatgaaacttaataaatactacatgaaagaacatgcaaatgtttcttcagaataaattaccggtgtccatgtacaaatttgcataaacagccatgcatgcaggctgaatacaatgagtgtctgcaatctggtggcttggacccagaatttggttgctaatttctttatacccactcaatgcctgttgggctttactgtttttccaatgatggaataaaaaaataccggccattgtttaaagagctacaaccatttattaaaaaaaaatcactcaataatgagtaccatcactttcttctcttaatttcaccattatagtagaggtagaatcctaatttggctccgccgctctacaacgcaatagactaatattgatagctagatttagtgccaattacacaagtcaacacgctcaattcctttagcacgactagtacttgtttactcctatactatagtctagctatctattatttatttattttatttattatcatattattattattattattatttattatattataaatatatcaaatccgatgatccaaaatcatctaatccaacatccaggatttacaaagccgattggtttgcgtggtttcttgatgtttcgacaaggctcagaattaattttcggttgaaattttgaatgctttcggatagattcaaatgttacacagtaaatttggtcaaaattaggtcggaattcgtcgaaaaccaaaccgtgatacgatacgacggggcttgaatggccaaccggtaaatgtataaagggtaaattggaaccatgccattataattttgtaaagtttgagatatgccatcggtatctcaatgacatgtaggacccacatgaattaatgacatgtgggtcaggatggcatatctcaaattttacaaaattataatggcacggttctaattttccatgtattgtataaacccttgccaatgccttgtaagttgtatcgccacgtttcccctctctctctctctctgaatctctcgcacacccgcaagccctcaaatcacgccgccgcgccccgccgtcgcggccgccggcgacccctcaccccgcgacgccgccgacgccctgccatcgcgcagtccccccgtatcatcagaaaaatcagggggcggcagaacccggcgcactcccggagtcgtcaaggttttctctcgcggagttccatcccggccgtgctcccctcccccacccccctgcacgtgccgcgctcctcctgtcgtgtcgtcgtcgctccaccgcaaaaattctgtggctcctgagaggtacaatggtgccattgctcccctagtgctcgatgatatgcctttagggcgctttttttttgtgggggggggagggggggtaataatttgaggcaaaaattcagttcaccctagacaatcatgcggttgaatgagttttgatttccctacgaaacctatttgatgattgtgcaatttttagatctaatttcatgatattcattgcagctgataaatgcctcattatttttggagctaatttcttaatattctgttgatttatctttgttcctttagttttttcatggattgccatcggaaccttgtagcttataccctgtcatcggaaccttgtaggactatatacctttgtacatattgatcttccatatgcattggtttgttgagtataaacacaatctagatgaatatgtttcctgacaattgtttttcatttagaaaggaccaaatatgctaaaactattcactaaaatggtcaaacagaagaattccactgtcacactgcactttcaaaagtttttactcatactggatttgattctctttgtgttccttcagtattttgcaagattggcgacgccaaccgcgccgtgacctccccaaatcacgcagctgtcgctctcctcccacatcgccgttccctacgccggtcaggatctcccccgtcgtcgccacgcacaaccacctgaggcgctccctccgatatcggaataccctgcgcctcccctctctttccatcagtcacccaccgaagatcttctgccaacaaagtgctgccgtccgccgctatctttcaccaacgctgcgcggcgttcagcctctgcaaacgattgccaagaaggccttgccgccttccctccgattgagtgctcaatctgcatcgacacggtggtctacggaaaggctgtggtgcggtcacgagttccaactcggtgagcagctttctagccctccttgcaattttttagtccttacaaatcttaggctgacattgccgtgatacatttattcaaacctgatcgtttagtttattttgttctccttttgcattggatcaatgtgattacccttcataatttgggagcggctgcgttatacgggagcatgataacagatgctatgaatcatcctaatattaaattatcgatggctattatgcatctgtttaaaagtgactgaaatagagataaaatagtgaataaaaatgaatatatactttctgtttaattttcctccctcccactatagcatacatcagtgagaattcctaatgcttaccaattgctgcatcttgattgcaagctccagaaaaaaatattgtcatgattattgtgccagggggagaagtttcggttttttatgtgttttgtatgagaccagtgcaaggggatctacattgttctggattttgttttggtttcaattttgctggtcctactacgtgtgcatatatagacagaaagccttgacgggacataccaaattcaaaaactcagaaggaatcaccttgcgcttgtgcctaattgctccaaagtataaggttggcacaaatagtggcccgatttttagttcactgatttttatgctttcccaatgttgcggttaggctattactgtgtttgaggaaattccttcatatagttttatatgttccgtatattttgaaatttatgcccatagagcaccctaattttgttgacgtgatcagacaataaaaaaggcaccatgacagctatggtggataatgtcatttagtaacacagggcaatgtgttgtaaataataatgggaatggtttgtatcatttgtttcttctatgctcaagatcctggactgttatgcatgtatcatttgttgcccctcgagtcagattatttgacgtggatactttagtactttggatcaaagaattagggtatttatattgtacatagctaacaattgcatatactacctccgttttttaatagatgacgccgttgactttttctcacatgttcgaccattcgtcttattcaaaaaatttacgtaattataatttattttgttatgagttgttttatcactcatagtaccataagtgtgatttatatcttatacatttgcataaattttttgaataagataaatggtcaaacatgtgagaaatagtcaacggcgtcatctattaaaaaacggagggagtattattttcccgttgcaatgtatgggcacctaaccagggtcaggacattttctcatgtttgtagtcatgatcaaatcgctcataaaacatatgcgtgctgtatttatactccgtgtgtgtaagctgaatgttcaaagaacatgtgcatcttaacgctttatataatattagggtagttatttacctgcagggtatagggtatattctatatatgtccggcatgaattgaattaaagcttaattgcacatatcatagaaattttttttgataataggaaaatttaaaagttattaaagataaatagaattacactgtagcgtttagcacgggcatattactagtaatagttttcaattttcattcattattattgttaatagtgctatgttagtactatactagtcaagaggtggtctaataatcttttgcattcttgttgtgtgtggttcaggttcaggttcaggggcatctctcctcttttctttcccttgccgccattagcccaagcagctatctggattctggagagttgttctctggtactagttctctagcgcacgaacaacatccgcgacgaagcgcatccatggcagtggcaccgacgagagcggaggcactgtccctcttccggtccctcctccgcacggcaaggcagttctctgactacaacatccgcgagtacacgcgccgccgcgccgcggacgccttccgtgagaaccgtgccctcggcgacacggctgccgcggcggcagcattcgcggacgggaagaagcagctggaggtggcaaagcggcaggcggtggtgtactctctgtacgccccaaaggccaagagcatcatggagatgaagttgcagtgatcgacgcgagaggtttcgtgctctcttgcttgctgtcctcttactcaggatttctttctgctctgtttctaaagttatgtgataggttcgaggaaaattggtgcaatcaaagctgagatgttatcatgtttgctggataattgccatgacatggttgctatgagttgaataaatcagtcaattccacgattttggtctcttgtgttcaacataccattacctgttaactgtggttggattggtgccgattgcagcacttcgaccagggctcctcgttgctgctggggtccctcgtcctgttgccggcttgcagccaccagtcaccgttgctggtggtggtgccttgtacctgctgctctccgtcctgatggccatggccttcgtcccactggacgagctaagagatctagtgcatctgttctgaatttttcaggacggttcatgtgtcctgtattgttctatgctatgtgttcccatttttgtttttgttgtatgctatgacattgttgctgctctgatctttttttttttctgaaataatgaagataagcttgctagtatttgctttttgggctatcgatgtggtcttaattgttgctggtcctaatccttgtggttttgtgtttcttattcatgtactgggcataattatatatatttgtctcaacttttttttttcagaaataaaatttgtacagataatttgcatgtatgaaccataagcttccattataaggaaacgttcagagctcagagtagtagctgaaactgaaacatttaatttgtcaggctaacgaaaaacgaaggtcaatctgtgtacaatgaggcagttgtggaccgactggaaagctgtgggtttgatccaatttcttctttataatacagctacagagagttctgtgccaagatttttacaggagttcatcatagatttgcctgtagataaaataccagcgacccgttggctaaatcgctaaacacaaggtcttgctttcatgctcgactggtttcttcagaataaattcctggtccatgtaaaaatttgcattaacaaccttgcaggctgaataagtactgttagccatctgcttagtttttttttcacatcttttcttatttgtggtccacagtacagataattttattttgaattctatttaagattaaatttattcatcaaaaactacgattctaaaacgtggcctgtaaagtggttctcgtaaatattctttcatgcattgcagattgagtatatcattcttcactaatctactagacgcgcgaaaccagcttataacaaacacgtctcatgtgtctgaaatggcgtcctaacgtttactgtaatatacttcaatgattcatcaggtatacaatcagcatcacaaaataatttgtatcgcttaattaattacgatgtttcgaatggtggctgtcggtaacttacagaagcatgcatgacttctgattattgttggtactagtagagaaaacaagacggcatcctcactctaaccgtgtaaaattttttttaattcagtgctaaatgtcaacagatgacatatatgccatcaatgaggaacgttcaatgctctccccaagatttataagtctggtgcagatatagttttcttaccgagggaatatatatacacttcgtcttgaaaatgtatcaaatatcactaaaaacattagaaacaaatacttttagtaatattacacatctacacgtaaagtcacatctttaaattcatgatatataaagagaaaaatacaaaattcagatagacttatagccttaaaactgttaaatatttttgttatgtctaaactataatgactatggggttaaaattttcattataggtgtgtaatactactgaaagtatatgcacaatttttttctagaatttattgtgatatttgttagttggtatacacggagtatgcacatgaatcttatatgtagatgttatgttcccatccatctattatgatatataagcatttgttggttgtttagaaaagattaaggtttataagaaaagactttggtgcatcttattaaataagggagggtaagggtgagagagttcttggcagtagtattcgtgctacaagtgattatattttgatataagttttgcaggaggaaagacctaatcatcatttcattactgtcaaatgactacatattatatgattctggtttaagaaatagcatatgacaaggaggaagcaggtagaggccgatagaaaatgcaaacgttaaaaagtatatatagctgtatatctatagttggtggagatgctagctagaacactactaagaaaaccatttctgcagacgaaacccttctatttttcagacggatgtttattttgaaccgtatatacatcctcttatgaaatgcttattgctttctcgcaagtacaaaacggtacggtgtcaattaatccttggttgatatcaacggagctatggatcgattacaattaatggcgctctgatgtgtgtgaaccactataatgtgtaaattaaattgagaacattttttttctgaattacacagtgcaacacagacactcacaatgcacgcacactcatgcacccctataaacgcacgcaagcaaaccctacccctatgagaatcttcgaagactgggccgataaatcctagaaattgacgaagtcaccataggcgcctcgacagggccagtaaatcctgtcgacgggtacatcacctaccacactgaaagcacaaagtcattaaatcctagaaaatttgctcccacggggagtcaaagccaggaccttaggtactactgaggctcttgtaaccactagactagaagctcttttcctttaattaagaacatttaattcaattcaaagtaatagaaaaacacgtgtacattgtcaaaatgaaaaatataaactatagctctgatgatctcactccaagtccgtcccgtttgcctatatagttagcaacgagctgctctctcagtattactaccgaacgattaaagccacgtaaagaaaacaaaaatccaaggtatctcggtagagccaattcttgcatgagaaccatggcatgggcgttgttactcagcctcgccgtgctcgccgccgctgcggctgctgctccaacgcactcccagtgcctcgacaacccgccggacttgacagccggcggaggtgaggccggcgtggtcgtacatgacctggcaggcttcgaggcctatgtcactggtgccgtccattccaccaaggctgtcctccttgcctccgacgttttcggtgagtgcatgtctaggattatgattcagggtttaaaatttaggtccgtgtttagattcaaacttttttcttcaaactttcaattttttccgtcacattaaatgtttggatacatgtatggagcattaaatgtggacgaaaaaaaccaattacacagtttgcatgtaaatcgtgagacgaatctttcgagcctaattacgtcatgatttgacaatgtgatgctacagtaaacatttactaatgacagattaattatgcttaatagattcgtctcgcagtttacaggaggaatctgtaatttgttttgttattagtctacgtttaatacttcaaatatgtgcccatatacttaaaaaatttttggcacacgaactaaacacagcctaggttttaaattttcaaaattttggaacccccccaaaaaagtaaaaagactaaattatttcgcccaaaaatttcaaatatttttagtttgtatgaatttagtaaagcttattcaatttcggtcaaaaaaatgtttaaatttcaaataattttgttctattcaaaccctatgatgattagggatgaaaatggttcggaaagttaccggattctggacatgttttcggaaacggaaagtgccggtcggaattttttctgaaactttcagaaacgggaacgaattcggatttttttttgaaacggaaacgaatatgataaggttgctatcatcagaaactttctggaaatgaattcaaattttctctcggaatcgggaacagagtatttctcatgtacaactaattagcttcagctatctcctcttaatatttagatttatactatgtattgaggtgcttaattaaatagaaatattttttgttgtctagtactttagatttcttttggctaatgttttttttttagtttttattaggtcatgtcatacttcttatagttatagatgaatatagtttcttttctaaaaaagtaaagtgtacaactagttgtattattactattgataaaaaaaaatagaaatgtcgatttgttgttttagaaaaaaatatttaactacatctattcgtcgtcgatttgagaagttcagtttaagagctttttatattccaataaatatccataccgtatttgctccgattcgtatttgcttcattttcgtatttgattctgttttcgtatccggagtttctgattctgatttcgaaaaataaatatggaaacgaaaacgataaatgttgtttccgtaccattttcatccctagccgtgattcatgagtagcctactgatcagtcactgccatttctctatttgataaacgtttataatattggctcctgcatgcatcgttgttgatcgagttggtttcttcaggatttgaagcgcctttgctgaggtacacttcgtccttattttctttatctctttgtcttgttcttccgtagttgttcttccattgccggtctacatcgttgtcatgatcatgtttcatagttgttctcgtttcctccatattttttttcccgacaacagtaccgaaaggaaatcgacaaatgaacaactaccctggaaagagactgaattttacaaatcaatagcgtggataactggtgatcttctatatatgttcttacttttaaaaaaatgataggatctttagtcaactgccaactctcttcgtctttctatagtgagtttgttacttgtgataaaatcaacataatatcaacaatattgtgtatcatccgtccattttaaatcgttatccgtgccgattgagtagcctcatatatatatccaaacatatatttatcggtttgggttcacgaaccggcacagatggtatggttccaggagcatctcacggggacttggtaattaaggtcgatgttttattctgaatttaaacaaaaaatgaatattgtgcctatccaaattatactttttccagaataaattttaataacattcaattaattacaacaataatacgtcattacatgtatagtcattaattaattataatccattaaacattacatcacatatacgtcattacaagtcgtactttttgtcgttacaagaaaccaacagctattttttgttgaacaacttgacaaatctctatgtcttgtagaaatgattgctcttctgtttagccctttctgtttactttgtactccctccttccaagaatatgagactatttcttttgataaaaaataagaagcaattaactcactcactatgtgacaaaaccaatgaacatgcaaccaataagttctacaatggtttcttggtttccgatcaacaatttaatttaacacatagtgactataaataggacttagatttttagagaaaccaaagaatgaaatatgtctcagatttatagaaggagagagtatagtacgaggcgatccctcgatcaatgaacatgtctttttagaaatgtccctaatgacgaagccggcaaagttgtcttgaagttccagactattgtatgatttagtattaatttacgcgtgcccaatttttttttgttcgaaccatttagcatgtcaaaaaaaatcaaactaatatatttcactataagcatttccttcaagcaagtcatctcaagtttgatattttagagaatagctctgatcaatccatttgtaatatatatgcgtcgcaaggagatatatacctcttcaacccatgagatataagtacttgttcctgaaggagaaattatgtgcaaaacatcgtaattttatctatcttgcagagagaggacaaaaaatgcaatacttttcacataataaagctctatgtgaataattaattgtgtgcgagacatacaaaataaatatagagcgaagaagagctttgaaaattcccatttcttcttaaaaaaaaactgcaaaatctcaacccgttgagcaacagggttccctgcatgctctacacttctactcaagcttgtccataattataagggggtttggtgaactgttttgaggccatatctttatcagtgccgcttcttgctgtgtggagggcgcgggctggtatatggtgggaaaacccttatcagcgatgtgttttgttcgactaatacccataggacggtataattgtgctgttttgttgcattgaattccactgaatatatcgtgaattatgatccagtagtagatccggaaacaccttaaaagcatatgtgtgataatgatgctgaaaattacaggaaaatagctgacaaagttggtcaagcaggatattatgtcgctgtacctgatttcttccacggagatccttacacattagacctgaaccttacggaatggttcagcaaacattctccggtaattcgtttcaccgtcttatgcaatttgattttatattccatagaacattaattacctagtaatcgtgatcgttcagatgaaaattctcagctcctgcacctatcaggatgcacaaattaagccgcaaattaagcaaaactatatccaaagtacttaacctatactagctagatgctaattatcaagaactcaataagttgattttgaccagtatatatgaattgatcctgcaggtaaaagcagctgaagatgctaaagcaatcttttctgatctaagaaagaaagggatatctgttatttggagttggaggttactgttggggtggtgagtgatattaatcaacataaagaagaagcacattaatttgtgcatttataattatactactacatctatcagtggtgtatcttaaaaataaaaagagcccaagtaaacttatttgctataaaaactctgtttcaatcttctaatatataatttcaatggattcagcaatgagcctgggcagccgcctgaggttgctagggacaaaaaaaatgtttgcagtcacgaataacaacatactccctccataaaaaaaaaccaatctagtattggatgagatgttttctagtccaacgaagacatgagtctgtccagattcatattctaaggatacactctgaaccttcctgatctcctctccacattgaacaaacagagatctgattcatattaaagtctctcaaaggcaagttttaactggcagggaagtttgccgtggaggtagcaaaaaccaacgaggttgaagcgattgtcaccacccatcctggattggtgactgtcgatgacattaaaggttgatattctttctttgttgctgttgctgaaatatgcatgtatcatctgatctagctatagggttgcacaggaatatatagccattgttttcttattccaaagttcgccgtgacatttcacgcagaggtcaaatgccccattgagatcattggagctcagaacgacacactgacaccaccaaaattagtgtaccagtatgttcaggccttgcgtcatagaactgatcgggtgagttcccctgttataatttcgtttacagttgatatagcaaatgcatcagcatatatagctctatttgccttgcaatttgttatcctttttgtttttcagataagataatttaatttgcacatatacatgaagcacaggattcaatagaccggaagagtgagaacacttgaactgaaaaactaattaagtctattttctgaaaggaaatgagactgtagacacacaagagaattttccacggatgatgatatgataaaagatcatgctggctatattttccttttgagggaatgctggctctaattgctggtcaacatctggcaaaagttagagctgatacaatagcataaaaatcaaaagatttactagcatattgtaaacgggaaccgagaaataacaatagtatatgattaattaaatattaactattacaaaattaaaatatatttatttaatttttaaagaaacgtatacacatatatatatatatatataaaattttctaaaaaagacaccgttcactgtttcgtggtttaaaaaatagtcacagtaaacaagtgagttgcataagcgaaacgaggaaaataactcacccaaaatctaatccacaaaagctaggccatcatttggggcactgcatgtggctttaatcctatacctattcctttctctccttttttgcaagaagaacatatttttctttaaaacattcatcaaatatttcaataacaaatctttgcaaagaaatatattattcattagcaaaaaatgaacgttagaaataaccttttgttcattaattattgaagattgattactttgccaaggtcttccaaggagtgaaccatggatttgcttgcagatataacgccagcaacccattcgaggtcaaaaaagccgagcaagctcttgatttaatggtcgattggtttcacaaacacttgaaatgaagacaaggatcagctaatcatgcatgcaaggccacgactataatttcgtcaaaataaatttccgatgtccatacgtttaaaaattgcataatgagccatgcatcagttgatgtataggttatattgttggttgtaattttttaggatatatgtaaaactcaattaaaagcaacgtgtgcgggttagtgaattattatattggctaaaaagttacatggatatataacatattttagcagctttggtaatctctgtaacatttgtatatatatattaccaaccacagactgcaattattcctatgaagtagctcccaagtcaagccatgcatgtaaccaagaaagattaatttttttaataatagattaaataaaacccggcctctacatctatagaaggatgtacacaaatatggtattacatcaccaaacacttaggcttatactctccatcccaaaatataaggcacaaccacttttctctcatgtctcataatgtaaggcgtgcatgcatgcatacattaactagtatctcttggtcctataaaatttatttgttttaaatcttatactatcatcaaacctcccaatcactcccaatcacattgcttgcattcatcaaggtgatccaactaagaaagtgattaaatgttttcttggtctttgtgttatgggtggttatgccttatattttaggatggatcgagggagtaaacaagttcaaaagcaaacaccaccataggagacaaagagacaacaaagacatccagatcaagtctcacaacaaaaaatttcaactaacaattcaatcttcctctacaattccacctagattttgaataaaattccataacagtatcaagaaagattgataagccgtttgatttcatatatcatgttccaacccatcccagctcaatcatcccctctccaatatgctactgttgacaaccagcccagtccaactaatatgtgtgagatgcttgatttagaagcaggctgtaagaatctaggggttcaatttctcagcttctgacttctaggtagattttggattttacaactatagatcttcacatgcactcacatgcattcccagttcctcagtgaacagcgtgagctagctagcagtgttcaatctttcattttcggtatttgtatcgggggtgtcaacatggcgatatttccgaaattttagaaattccagtctaaaattttgaacaaaatagtcatatttgaacaaatattgtcaaaattcacgaaaaattaaaaagtttcagtcgaaataatatcgtatgggggttccaataggaccaaaatttcggaaattttgttacgaaattttgaaccctggagctagcaacaggagcaatccatggttcccacaaataaatgaagcaacacaggtgtgtcctccactatttcagaacaagatatcttaaccccttattatcagtgtcagtttgtataaaactggcataaaagaacatcaccaccaattggtttttatcatgataaaaactaaattactagtgggttttatcatgcaccacaagtgacaattatttaaaatatttgcatccatgctcctggccatcaaattggctatagatcatcaatgcctcctctctctgtctcccatgaaacaccagtgcaatgtttcttgagaataattagggcgtgtttggttaagtgtcaacaatccgggcacatatgcttactgatcgaactcccatgtgcgcatgcgtgcactgttatattgatggatacatcgacgataaaccaagcattaacttttggcgaaccggatgcactaccaaaaagtccagcaatttggccataggcctgcagcttccaagttcttcgctttgactttgcacaataattgatgattgcgtaggtagtaaaattcacaaattttatgagggaagaaatttaaatgacccaataaccatttctctttgtaatcctgcctccgtacctatataagatggacatggagcccttaaataacatggccaaaactcgatcgtcatatcaatacaacaccagacggatacaatatctaaatatgaatagggtaatacttctcatcgagaatgcctcaacctttctaaatttgtgtccctttacttactcattttagatctcgtgataccccttcttactaccgatttatagaatcaacaaggtcaactactataaattaaacatgatgttgaactcataaccgctgggcttgtggactgtcatagactgatgtaaacctatatgcgtggaaggaattcagcctcatagaagtattctcaagttgaaatttaaaatctccaaatttcaaagagatggtccttgtttgattgtccctaagttttcacttaatctttctcaggcctccacgttttgctcaacaaggtcaactactataaattaaacatgatgttgaattcataaccgctgggcttgtggactgtcatagactgatgtaaacctatatgcgtggaaggaattcagcctcatagaaaagggcacgtattctcaagttgaaatttaaaatctccaaatttcaaagagatggtccttgtttgattgtccctaagttttcacttaatctttctcaggcctccacgttttgctcacattgcctcaaattattcggttatgaaaagagtatgaacgaatgcgggaggtcgaactacttgatgaacaagttttattttttcataattgcactattcattttgagaagatcatatatattctttttgatgagcttctttcaaaatagaataaaaaggtcaaaagtacccaaattatctaatcttcgtgtgattttgccttcagaattgaaactgaaatatattttttctgaaagtacttgattaaattagaacaaatttatgagggaggtgaatttgcccattcaccatttctttttatatttttacaagattttttaaactaaaatttcaatttttctaatgaacttaaaatatggttgaaattattcctactaaacattaaaatttaatttcaattattatcatgtttaaaaatttcaatcacttgaacattttcacaccctttgacaattaaaatcaagaagaaaaaaatatccctagtgagatttttaactttgtgttaggaggcagagatgaccttttttataagaaacaaattacaaacgtagagataataatcattttgagagagagaaatgctacctctgtttgaaaaaaataagggtacactttattttgttgggacaaactttgaccaatacttattctttcatggtataaattttagagtaagttttacaaaactacaaataatttgatcaaactatcacaaaactacatatttaaatataggtatcacaaaactacagatttaacaccaaggatattacaaaactacagatttaaaacttcattaaaaaactacatatttagtgatgaaattatcaaagaactacaaattttagagtttatatcgtagaacaattgaggttacaaaagttgtagttttgtgataaatctatgttaaatctgtagtttctgatataatacaatcaatctgtagttttgtgatagtttgatcaaaatacatacagttttgtgaaatttaatctaatttctatgatacaaagttaatgttgctaaaattttttaaaggaaacaaaatgaaaatttaggaatatttaatttaattaacagtgaaaaaaaacattgaacatgggattgattaattaaaaactgatcaatataacgaaaggcacacaaaaaaatttttctcaccttaaattcaattcaaaatgtcaacaggcagcgggaactgggtgtgacattaaacaagaaactgagggcaatgtgctacctaacctaaggctaaaggccataaacaaactacaaatgccccagcaactatcgattcgatgcctcatatgtatcgtcaaaactcgatagttggaaaaccatggcaccagcgttgctctacccgaccatcctcttcctcgcagcggccgccgtcggcgccgccgctccgccgcactcgcagtgtctcgacaacccgccggacctgacgacggccggtggcggcggcgaggccggcgtggtcgtccacgatcttggaggattcgaggcctacgtcaccggcgccgtccattccaggcggaccatcctcttggccaccgacatcttcggttagtgcatgcctgcctgagctgccagcttatctgtctttgaaatattctttgatgatatattgtggattcatttattactaaccattaattaatcttgaattcttgctgttgcatgtgagtggttgcgtggttgttaattgtgggtctctacttcaggattcgaagcgccattgctgaggtacaatcttcttcttcgtttgtataatagggaaattgctgtatgtacgataaacttgttatgattttggtacgatccagtcatgcatcgtacacttgcatgaacattagcattcaattgtcatgcaagttacaacaatagaaaggtgactatggttattttgaagggatcggatatggtttttggtcaactctctctgtcttttttatagtgatctccagttatttgtgacttgcgagaaattaagtcacacataatattcaatattactgattatatatctgcatgatttatcagtataagacttggatggcgacaggccactcctgtatcgagaatcattatgtactactccctctgttccatattataagtcatttgatatttttctcagtgaaactattttaagtttaatcaaatttatagaagaatatactaatatttttaatacaaaacaaattaacatattaccaaaatatatttaatgttaaatttaatgaaactaatttagtattgtaggtgttgctaactttttctataaatttggtcaaaactaaagaactttgagtaagaaaagagtaaaacaactaaaaatatgaaacaaagagagtagtaaatatcgatatatatgccaagatactctaacgtcctattattcctatataatacacatctatctattatattattaaaggaatagaaaaaggagcctctacgttggctcacattaatcggagaaaaagaaaaagtagaatccatataaaaatataatttagaaatagctgaaattcggaattaaaaaataaggaatatagaagaggagactagagtccatatagaaatacaatttagaaatagttgaatttcggaattaaaaaataaggaatattagaagagtagactagagtccatatagaaatacaattaggaaataactgaaattcagaattaaaaataaggaatattagaagtagagtatagagtccatatagaaatacaattaggaaataactgaaattcagaattaaaaataaggaatattagaagtagagtatagagtccatatagaaatacaattaagaaaaaaatagaaatttggaattaaaaaataaggaatattagaagtagagtatagagtccatataggaatttaaaactaactaaaatttggaataaacataataaaattaaaagtagagtttagagttcgtataaagatacaatttacaaataactaaaattccaaattaagaaaaacatgggaagaagagtttaaaatcaatataggagtacaatttagaagtaactaaaattcgaaattaaaaattaaagaatactaaaagatgagtttagagtccacatagaaatacaattagaaataataaaaatttaaaaataaaaataaataatattggaagaagagcatagagtctatatagaaatacaatttacagaaaattcggaattaaaaaaaagaaaatattaaaagataagtctagagtccatataggaatatatataatttacaaataactaaagtttgatattaaaaataattaataactaacacgtatataaaatataatataaatattacccattagtagttttgtaaagttattgcaaaatttaaaattatgttctcattttaatatatttgaataatataatgaggaaacatatatgctattatatgagagaaaatataatgatactagccgcgcaatctgtgcaggccactgtgctagttttgagagtaatttcttagggttttcaatatgttatccctacatggagatgatcagcagcatagcgacatatatatattggaattgtttcatattctatcctcctacagctaatctctactacttaaaaataagtagaagacatttccgttgtccgtaccgataaaaaccacgcgaaaaaaaggtttccgcatgtaaaagaagcaaaaaaaaaaaagtgtgaaaaaagtttctgcccgattaaaaaaaatcatctgtataaaccgttatccaaaaaaaaaaaacaatgttagtgggaaaaaaagttccgtcgtcgatactggaaaaaggaaaaaacgtgcaaagaaaaggtttccatcttccgtaaaaaagagtaaaaagtagtgcgaaaatttttttgttccgattcttaaaaaaaaaacccttctcccataaaaaaggaaaaaattatagtgcgaaaaaaaaagtttcgttccgattctaaaaacaaagtccgtataaaccggtcatcagaaaaaaaaagattagtgtccgattctaaaaaaacgggttacttttccaaaaattcctaaaaaaaataggttggcagaaaaaaaatgttcctcacaccgttaaaaaaaaagtccgattctagttaaagaaactggttcgacattttcagcttttccaaaaattcctcaaagtatatttgaaaatttaaaagcaaattcaattttccccttttgaataattcttttattcattcaaattatcatatatcaaaatccacctaaacatgtcaaaatttatataaaccgcgtgaggaaaaaacatcaccatttataaaataaccgatttgaaaaaactgtctgactcaacgtgagaaaaacgccaccttttataaaagaatctggtttggcaccatgcaatgcgaaaaaactgtctaaatttagaaagaaaaaacatccaattccgtgaaaaggattcgtaacatttgtattgttcatcgtctaccacgtcggtttggtttttttaaagcgtaggtcgaattctgacatctggaactaagacaagtcttgcttcggttttttttttctgagaacgagatcaaattaatggacgtttgggttagataggatccatcgattttttccatctacacggcttctctttcctcatctattctcttgtattgatagccctgcatgtctgtgtaggcaattatcatactaccatagctactattctttataacatattatatggaaataatattaaaaataaatatgtttttaattgatatttagagaagagtgcacgtggctctattttgtgtagacttaatcatgcgaggcaatataggatttgattgatcctaattttgattgcaagaataagactgaaaagtattaattttagatttttatgcatgttgttagatgaacaatccaattcttttgggtaaagcaaaacattggtaaggttgccagcaccgaggttgggccattgatttaagatgttccagttttctttatgatatgttaaaaatattatcattgacactatgatatgacattcactgctacgggatgggtttttccgtgcggtcaaaaaaaatatccacgtgcggatgaatggcccgcacgcaacacttcgtctgcgaaagtcatgatttttgcgtgcgggtggccctcccacacgcgaaaatcggatttttccgtgcggttgcttatgtcgctcgcacagaaaaataaaaatccagaaaaaaataaaattcacaaattaccgaaccctaaccctagatccgccactccccgccgtcaccgctggccggctccaggcgggggactgtgtcgccgcgagatccgtgcggagtgcagccgccacagccggatgacggatcctggcgtgggaagggcggtgccgctcctggccgccttctcctcgtcgtcggcggcggccgcatgaggtggggagagcggcgccgctcccggctgccgcctcctcctcttcaacgccagcggcggccgccgcgccgcctccaccagcagccgcgacgggcgcctccacgtcggcgcatggcagcggcgccgcttcctcctcctcctcctcatcggcggaggcctccgcgccgccgcccgtcggatccgcgctcccctccatgccgctgcccgccggatccaccctcccgtccggctgcaccgccacagaagcccctcccctccgccagatctagggagggaaggaaggggaggggaggggagcggatcccgcgtggggaaggccggccgctcaccggatctgtgcggggatgaccgccgcccgccggatcccgtgcctgcaccgccgtcgtgtggagctgaggccgatgccgaccgccgttgtcgttgccatcgcccgcgcgccaaaaggagacgaggggagaggcgtgaaagagagaggaggagagagaagagagataagaggggagggatgtgaggagaaattaaaagagataaatgaggaaaaattttgaaatgggtgggagggaaaatagggaatactattttcgcgtgcggctctcttaatagatacgcacgggaaaatcggctcattttcccgtgcggtccgtttaggaggaccgcacgagaaaatcgattttcccatacgggcaacagcccagccccggttcccctatttttccgtgcagttccacttaagaactgcatggaaataaaagggggtaacgtccacgaaaatctatcgtttagtagtgattatcatgaaaagtgtcagggttatggataagatataccctctacccttggatacacgttgtatactgatacggtatacccgcgcctatacggatatttcctatgtacgttaaggaaattcgtcacgagatagatgcggaatccacagatagaaggagtcctactcagacagaactgggtcgttactgtatcgtgtggggtccgatgtctccgagttctacttggagaccaactgacctgcggtataaaaaggaccaccccgggaggacctaagacatcaaatcttaccgccaacacatccaccacagcctacaaagccggagcctacgggagccaagtcgccgggtgatttagttgaaccaactcgactacgatctcgtcggtatcattgagttccactattccctttctaatatgtgattttcattatataatcccatatcactggattagagctattacctatcaaggggcctgaaccaatataatccctgtttcctgtttgcttgatgtcgtactacgtagatcctcatatcagcgtaccccaataccctctatatccggtctacgggtatcccccgtcgacaaaaagcatatattgttattagaatttttcacccgttataacgcacgggcatatttgctagtaatataaatataccaagaggttcaaatataccatttaatagtgtggtaatcatggtttaatatctttaactagtacttagatagcacatataattggacagcaatttaaaatgggcgagtatatgcgccatgataagaattccatattgtgcttacttaaactaaaatatgtttttcatgacacatatactattgtacatcattgtatagtgtgcacatctgcttagggacaattaatatatgtaagattgtgaacccaatgttaattcagaacttattatgtgatcttccattgccaggttgtacgtcaagctatttctccatggcttgcagaaactctgtttatctgccagtactttattttaattttacatttgaaaacaatgtaaaagcagatgtttgattataaggttgctgacaatttcaggaaaatagctgataaagttggtctagccggatattacgtcgttgtgcctgatttgttccatggacaaccctacacatttgaccagaaccgtacagaatggctcagtgctcattctccggtaattcatttcaccatattaattaatttgatctaatattcccctgtaactttaccttgaaatcgtgatatatgattgagacgatagagtaaaagaaaactcgacagctgcaccaaggatatacacaaagccacaaaacaaaactttatcccaaaaatgtaacttatgcgggatgcttataaagataatatgttaaagttctaagaaaagataatatataaacagttataaacgattcaagataataaattaaagttctaaagaaagaatatataattaatattgacaagcattttcaattgatcttgcaggtaaaagcagctgaagatgctaaaccaatctttgctgctctaagcaaggaagggaaatctattgttggagttggaggttactgttggggcggtgagtcacatctatcaatcaatataagaaaatgtagttgtaatatcctgaacttaatggtcaaaatctttgatatggaattccagaatatataattcctaaccccatatattcaacaagcagttatttaattcatattgaagtctctgaaaacaaatttgttttactgacagggaagttcgcagtggaggtagcaaaaactaacgaggttgaagcaattgtcatctcccatcctgcagcggtgactgctgatgacatgaaaggtgaactttctttcttttgttgcgctgttcgttgttacaatagaaaatagctaataattgttttcttattccaagctctccttgattaattaacagaggtcaaatggcccattgagatccttggagctcagaatgacacagttacaccaccaagattagtttaccagtttgttcatgccttgcgtcaaagaactgatcaggtgagttcctgttgattttattgacggttggtcccaaatacatccatgttttttacttctaaactccatctcgctcttcaaatacttgttactggattctatttactctctttgttctaaaataaacaaaccttagataaaataagtctttacctattacaacgaatttaaacaggcaattgttcagatttgttgaataggtaaaagctcatcctatttaatatttgtttattttaggatggaagaagtagtttttgacgttgaccattcatcctatttgcaaaaataattatattacatattaacgatgtgtgttctgccataatacaactacataagttaacttcattaatctttaaaaagttattaatctgaaaaaatgatagtcaatagcgacaagcaaaataatagtttctaaatacaagttgcatgtacaaaacacacaagctagctctcactaactgaaactgaaccagtgtttaatatgctaaaaaaattgcaactgtaaacataaaagagaattaatttttactgatgatgagatgttaaaagaccttgctagctctatttgcatttttttttgagaaagaatgctagctccaatttggaagaataagtgctataacattgcatattacttccttcgttccaaaataaaaaggcaaaatcatacctttttatgttgtagttaacaatcatctccatcttccctaaatttgtttttttcaatcctccaccccaagatctttaatcacattagatgcatgcatcgtattatattgaggtaatccaaatgagaaggtgataatattttttttcttggttttcgtgttagtggtggtttgtaccttatatttttatattttatgattgcgggaataatatattatgttttataactaaataacctcttatatatgagttattgttgcagattgattattttgccaaggtctttcaaggagtgaaccatggcttcgcttgcaggtataacgccagcaaccctttcgaggtcaaaaaagctgagcaagcacttgcgttaatgcttgactggtttcacaaacacttgaaatgaagattgctaattaatcatgctaggaagaccagtgcaattatttcatcgaaataaaactctcgttctcgatataaaagtttgcatatcaagcagccatgcatttgatgtacactattttctttaaattatatggagtgaattaatagtatgttgtcgagttgatgttcgttatttatctataaataattatacggatgtacttgtgccattgatgttcattgctggctataaattacatgtggatgtacaactcaattttcacaagggtactatatatatactttagcaaaaccatcaaatttattacaaaactgtacaattatgccacagcatcagcaacctatatatttaaatcacaatttataacaaatttccatgtcacaaagtttcaatcctagcattgttatcctgatgaaactttcagaatctctagctttgtgatatgaaaaaaaaaaagtttatgtagttttgtgatatattgtatcttaaaattttcttttaaaaaataataataataaagatactgtggatttacatgtgcaatttaaaatagctttattgaaatatatataattttacaaaatttactcactttaatttatatcaacttgtaatcagtatatttctaacaattaggccatgaataattgaaagggttgaaaagctaactatatattaccccatttatttcgttgggccttgggccattcatgagtaataacaataacagtagcaaaacatacagcaatgcatggcaataataataccaattaactttctaaaaaaataataataccaattagaagtctgtacgtatgcttacaaacttgtacgtataagttcgaaacaaatttaaaatgcaaatgaaaaaatagactttgatttgcattttcctaatatgaactttaattgcgaatcagcactctcgtcgctctgcatgcgtttccagtcgagatcggccccaggcatgcggccgttctctctcatgtgtgtagctcaaaatagaaagatcatatgccgaaaataaaaatctagccaaaaacagaaagatagatcaatctagtgagagacgatggctgagcggttcccaataatgtttttgccttttgtggtggtgtaatcaacggttgggcgcactctcctcaacccgtggcccgcgggacacgtgtcaaccaagtccactactattcctgcatacgtatgtataaactttatatacgtatgtataaactttgtatatatgtgtatataaagtttatacatatgctatcgagtgggccaacgagatggtatcgacgcctcagacaaccgccggcagtgtgcctagccatggcaccgggtgatggggacgatggcgagacgaatgccaagaatgcataaaacttttactagggaagccaaacctaccccttgcaatctggcatgccgggccgctcataggccaagcagcggcacgtagacaagctagacgtagcggagaagaatattgcacggacggggatacaagtttgtctcgcggcgagttgcccccctcccccccccccccccgggatgatgagatagtggtgcttgaggccttatgtgcagcgagcttcgagtccaccatggcttcgttggtggtgggtgtgctcgacttcttccttgttgtcgagctcctaatactgacagccaacgccatggctcacatcgccatctatgagtgaaacatgtgggtggacaacaggcaaggctccgtgaagcactttgccaccctccaattagctagttgtcaccctaataaggtgatgtaaggcagggtgacgaaatcattgaattgttttagaatctatttctaggtccacctaggcatggcggagtactttccctcacgggctaccaatgaccgataggccactaggtgaccttcgcgctaattctacctaatggtgggggacagactcggggctctgctttaccagtcaagacatacggtactagtggaagctggatgtggacgcattacacctagtgggggctccgctgaacaccatcctccgccgcatctcctctctctagaggatgagggatctagtcaaggagtcctgcttgctgggggtcacatggctaaagaccaatgggatcactcccttacattgggcacccaatagtctctatgggaggacctaggccccttcacatcgcgtggttgataaccccttaaatatttctaccttgcagtagtgctccacttgttgtctccccattccgaccttcggtacacactgcagcgttctaagaccattatcctagtcacaatggtgatcgcggatgccaagaagatactagggagttcgctacccaggaagaaggtcgctcgcctggctcgaaagaatgcatcagtttgacggaatagtgtggccaagaggtttgggcttacactccttgccatgccttctctccatgagctagaggagaccaacaaggatggaaagcgcaaggggcatcgcggggcggacgtggtccatgctcccaagaggtccaagcagggagcaaatctttggctcctccttttgtgggcgtgcctctacaggccaagcgaccaacactgttgttgtcagagacgtcggtgaaagccttcgatcatgacatcatcgaggtcggttcgtcggtctccactatccatgcaccgaaggtggtaacggtagcggttgccatagaggccaacgagacggcctggcaagtggccctcacaggtaagggtctcgtttccttcctgttatcgtgaggctatattgttatctcttacatgcctctctcttcattttccccttcttcattgtaggttttccagggtacaggtcgtagtcgtcttcttcgaaagttgagacaatgccctcgatgccgtggtggactggagaagaggaggtggcgtcgttgccacctcaagtggagatatcaactgatatggtgatatcggaggcggatggcgtcttgatttgactccggagcaagtgattgccctctgtgggggcatatcatggaggcagctccagagggcatccatgcagaggccatcatccactcatgggatccattgcctaccatcatgggacggctcgtgcgtcccagagacttggtggcgctccggttggatgtggaggcaccgatctggtcctccctgcttggggatgacgctcgtgtattggctactatgatgagatcaatggagctaatggagctgcaatgtgtgttggcctagtaggtgcgtccgtctgtccttgtttcttgttgggtttgttttgagtaatcagagtgccttcctccttcgctcaggccatggtggtcgtcaaagcatccatcaagcgtgggggaagtgatgcagcaacacaacacgcggagaggcttcgtctagacgagattatagccttaggtacagcggaggccagtggtgcagcctcataggtggaggcaaaatggtgacggtgcaactggccctcttgcaggtggaggtgtctcggtcataggtggagaaatggttgtgggatgttcataccgaggtggcccgcctgtccccggagaagaggcgttgtcttaggagattagcatggccaagggagagtcggagactcattcgcttgatgcccgcacactagatgagaatgccgtgcatgtgccctagcggttacgtgggctttgggctccgacttcgtggattgtggatcaaaggacctacagtcccaaaggacaatgcccccatcaccgacaagatgacctggtcgatgaggtaggggcttcaccaagaaggtcatagccacctacgaggcttggtgctcataggccaccacccatatattgtcgttgcttcaacaggagtgtaggcacatcgacccctccgtttgcttggaccccgtggtgttcaccatcctaatgtagggcgctccagcacaccatccccgcgtcgtgacatgaacgacctcacccggaggattgggccctcgttgggtcacaacgttgtagtggctgagctcgccgcttacaccgaggggaaaacgaagagtgtgcccaaggtgtagggattagttaattttttttagtaaatttcataaaactacagttacttcgatcaaattatcataaaactacaaatttaaggcactgtatcacaaaactacagatttaacacaagatttgaggccaactatcacaaaactaaagatttaatactagagttatcacaaaactatatattttacaacttaaatccctaccactactgctatgttagagtgataaatgttgtagttttgtacttaacatgttgcaaaacatgtacttttgtgataatattattactaaatgtgtagtttggtgatcttccaccttaaatctgtagttctttgataaagttggtcctaaatctatagttttgtgatacaccttaaatatatagttttgtgatagttttgtcaaagtacatgtagtttagagaaatttgctctcttttttttcctgtgttccctgtttcttttatttctcttcatgtagccttctctctggcttagccttgcctactgtttggcctccagactatcctttttcttaccttctgcaattcgacataatatataggaaaaatttgctagaggacggtcaaattttctggtatttcctaacgaactcctaaaaggcgtgacatggctctaggactcctaaaagacacgtgatttactagtggacaccacagtcattatttcatcattcctgggcttaatggagggggaaaccatgagaaaaagacagttctgcccctctggctagcacgttgtatgtacattagtggctttgcttatgccacgaccttaacttgtgtcttgacccagtaccctttaacacatcgtaggcttcaccatcctcacccctccagggggtggtcatccctccggccgtcggggcctgcactgctttagcattgctgcctgtttgcacctacggttaccaaggtacatatggtttagtgtgtggcgaggtggccacgtcctccagcacaaccttcaactagaacttcgattgaagtctttcgttcaatgatgaggcacacgagccattgctctagtagctttggtgatcgaatctaggtccatcgaggcatccctagtgcatcggacctattctagatttcaagacatatgacgccgtagggaggttaggcaacatgtacggtggaatggcgaccggtcatggctcgcctgccatgggatgggtcagggtaccacgtgtttcatgggctcaggccgactaggattctagatcctagggctcttcaagcagaacactgggcgggggtccttacctactcatcatgagtagcctcatgccgagtcgggtgctgttgtggggtccttccactagggatccttaataatctagccatagcacaactctcccatgaggtcagggtggctcttacagaagtccgcctttaagggcgattcattaactagtccgtccgaaaaaccgctaatctctaaataaatgtggataattaattttaagtccaactgaggaaaactaatattctgttatatatatgtgtgtgtgtgtgtgtgtgttttcacatttaattaaaatacttattttagtatgattgttaacttatgtcatgtagcctctttatgaataaccatactaaaggaaatattcaattaaagtagtaactgtatgtcttattaccaaaatatagtaagaatcctataaaaaatttgtttacgtcaaaaaggcttaatatgaaaattctatctttttttaaagtttggtaccatatcaaacttcttttttgtcgacgtttgatgtctcgactacggtatttggacagtatggggatcgtcggtgctagggcatacgcgagaccgaggtaaaagagatggagacagggatttttatacaggttcgggcccctgaattgtcaggtaataaccctacatcctgttggccggagccggagttgctttttattcaccataatcacaccagtacaatatgtggggtagcctatctaattgttgtcgacatggcggtctgaaggtctgactcgtagtcgacaacagggtagccttcctcctcaaatccgtgtccggcgagatcagagatagcgctttcgtatctcctgacggtatccggagacaccgtaggggaatagccatgcctatccctgaagtcgatatccggcggcgtgtcttggcgtatgtaggcttgtgtgttgtggcttctggtggacgtgtgttgattgtcatgggtgtcttccatggtctcctcaccctctcctcctaggggggcttgtatttatacccataggtgtccccttgtccaagtagaactagggaaaccaatatggatacaatccgagtagtccttgtcgtttccatgtagaactctggttgtatttccttatccggaactccctcgaggtcagtttccgtataagacatggtatgtggtggatcctgcctagatttagtcaactactattaggtatgtggtatccataaccctgatagtagcccccgacttcgatgcaaatgaacgaattcatattctcaaccgcgcgtagacattggagtaactgttatcgagctcatgtgaccgttctcggtgagtttagagataacgttggacttcctttgtcagcctcgtgcgggcaccgaaagggtttgtctaagtcaatctctgatgtcgaccgagaaagtatagagcgtacgactaagtctcacgtcttgctgtaatcgagaatttggattgaagtcaagaaattttatctcggcgggtacaccatttcttcattctctattccttgtcgagatccagcaaccgttctcgagcgatcgagaaggcgtagagtctgcgacggagccttgtcaacattggtcgtactcgccttagtcgatcttggtgtagaaccatagagacatggagtcttccacaatatcaaatagaattttcctgaaaccaatactcagaaaagaatatcaaatagaaatagcccccaagcgaatgctcaaagggtgacatgttataatatgtatggtaaattgaaaataaattaaatttactgatcaatgttttgtgtatgagcgtcttctctcttaccgacttcgatcagtcagtagagtcatacactctccctagcccccagccttgtcgtcggagaaccgttctaggaggataaggctcttggacccttgacctgccttggttgaataaacactgatcctagcccccagccgtgaagttggaaaagtcaatttccgattacacggcttggttaatacgcacggcgagaactctaacacgaccagatcttacatggtcctttgtctctgaaggatccgacaaggccttatcggctctgggcgtccccagacgaggatcccttaggttcctcggaggccttgtcaagacggcgtaaagggacagtaggataggtttcaacgctaggtgtcatcgtggtaagggatctctgggtaaaacattgggcgatattgtgtacctgctatcaacttggttgaaatagaggtagtaggagagtcgctacaccgctggtcgaggaccaggcagtagtcgtaactcgaccacttaaagtgaaagtagtgggagagaagctacgtagctggtcgaggaccaggcagtagttgtaattcgaccacttggagtggaagtagtggaaggaacgctacgtagctggtcgaggaccaggcagtagtcgtgactcgaccacttagagtggaagtggtgggaggaacgttatgtagctggtcggggacaaggcagtagtcgtgacttgaccacttaaagtggaagttgtgggagagacgctacatcactggtcgaggaccaggcagtagccgtaactcgaccactgaaagtggaagtagtcggaggaacgctacatcgctggtcgaggaccaggcagtagccgtaactcgaccactgaaagcagaagtggtgggagaaaagctacgtcgctagtcgaggaccagacagtagtcgtaactcgaccacttgcagtggaaatagtgggagagacgctacatcgctggtcgaggaccaggcagtcgtcgtaactcgactatttaaagtggaagtggtgggagaaacgctacgtcgctggtcgaggaccaggcagtagtcgtaactcgaccacttgcagtggaaatagtgggagaaacgctacttcgttggtcgaggaccaggcagtagtcgtaactcgaccacttaaagcggaattggtgggagaaacgctacgtcgctggtcgaggaccaggcagtagtcgtaactcgaccacttgcagtggaaatagtgggaaaaacgctacatcactggtcgaggaccaggcagtagtcgtaactcgaccactagaagcaaatgtacgagagatcactacgatcaactggttgaaaaccggtgagtaggtgtccctcgatcatttggagtcgtggtgcgaggaccgctacgctggcgtagtcatacctcgaccatctgaagttaaggtgcgagagattgctacgtaatgatgcgagaaccagtgagcgagcggaattatctctcgaacaccaatggaagttgtggtgcgagagattgctgcgtactggtgtgagaaccagtgagcgagcggaattatctctcgaacaccaatggaagttgcggtgcgagagttggtttattgcaagtgtatctcatgtggccagtatgactcacgtacccaacttatagcatatccggatgtccgttcgcaatcatgtcgggtgatcaagccgacgacgttcgcgaggaattatccgttaacaaccttttctcgagtagtccagccatggccggtgctatgagataggtcgtcagtctttgttggtaggttgggtgcgataactccacaacctactcgagtgctcagttgttcctgaaaattattttctagaagacaagacatatagcagataatatcgagtatgtactcaaaaaactgcatagatcttctagtattatcaggatataacgagcagattaaatatcaggcattatgtaaaccgtaaacaagcatgatttatacagaagagaacggagcgagcccccagcattagaccgtagttggcctgacatcggaagcactcgcacaatagatattgtttaaaaaacatgctctaggtaaacataataaattatagatctgacaatatcgtatagattggaaaaataggtacgataaattgtatataaattaccgcgtacctgtgtagatatatgccaaatatatctacgaaattagtagatcaattaaattattcaacctactaattgccttactgtgtatgcttggtgaggaatagtaactccttaattgatccgattgtgtgtatggtactgttccccatgtaagcatgaaccttgtattttggtcctttaattgatctgtttgccacgtcgttggaacggccaaccaggatgctgcctagagattggattctagtgcgagcataagagaactcctccaatccgacttagaatttacacccatgtacatatcaatctggctctagatttcagctccacggcgctcgttttgttggtggagataagccgagttcggtttgaacttagccagccgatgtctcacaccagtcgatgccgcacacatggaggaatcggtgtcggattgctcttggatgccaccgacacagtagcactcctcggcgatgatggttctgatctagtcggaagatgtacttggacaggttggatctccccacagccgaagtcgtcgagtagcttgttgtcggagagtccatctcttaaacccatctcgtcgaaatcctgaagcaccaaaatccccctacctggcgcgccactgtcgacgtttgatgtctcgactacggtatttggacagtatagggatcgtcggtgctagggtatacgcgagactgaggtaaaagagatagagacatggatttttatacaggttcgggcccatgaattatcaggtaataaccctacatcctgttggccggagccggagttgctttttattcaccataatcacaccagtacaatatgtgaggtagtctatctaactgttgtcgacatggcggtctgaaggtctgactcgtagtcgacaacagggtagccttcctcctcaaatccgtgtccggcaagatcagagatagcgctttcgtatctcctgacggtatccggagacaccgtaggggaatagccatgcctatccctgaagtcgatatccggcagcgtgtcttggcgtatgtaggcttgtgtgttgtggcttctggtgggcgtgtgttgattgtcatgggtgtcttccatggtctcctcaccctctcctcctaggggggcttgtatttatacccataggtatccccttgtccaagtagaactaaggaaaccaatatggatacaatccgagtagtccttgtcgtttccatgtataactctggttgtctttccttatccggaactccctcgaggtcagtttccgtataagacatggtatgtggtggatcctgccgaaatttagtcaactactattaggtatgtgttatccataaccctgacaattttaaagagttagttttttttttcatatttagtggtggtcctatttttaagggcctgtttagatcctccaaaatggcaaaagctatgccgttttggagcactttttgccattttagatataaacactagtagcaaaagttggcaatttggcatttggcatttgctagtgtttacacccaaatttggcacctaggattaaaatagggaaattgccaaagtttggacgatctgccggttttcctctgagagggccggtctgaccgccgtatgtcggctggtcagaccgccgctagtgggccggtctgaccggtagagtccgagtcagactgttttcatcgagtctcgggtttccttgcttgggaagtcatgtttcgtgtttccatctgtttctagcccgagttgaacgtggaggagggcatgtaaagggcaagaccaacccctatataagggacaaggccggttcaattgtaagagatcaatcaactatcaatcaatcgaatcgttcttttacttttgcttctagttctagtttagtttgtccatctttgtcgatttgcgccggtccgccgccgctgtgagtgcgacacctctttgtaggtttgtcctgaaaaccttctgtttttcccacgagacgggtagttatctatcgttctatctagatcggctccgctagccggtttagtttatcaaaatccatcttagtttaacttttgctagattgaggtggttggcgactctaagattaccgcaaagcgttaggtgctgtgactgtgcttgtcaactttatcaaaaaagttgccaacagctagtccatggtagcaaattttgccaaaaagtgctccgggaccacaccctctctctttctctctctctttagtgctaaaatggcaaaactttaagatgcatctaaacactaactagtacttttgcaatgtcaaatcttttgccaccaaaacttttgccatatatttgctattctaaatagatctaaacagaccctaaatgcatttttcttaagagatcatccatgaaaatcgatttttagatgatttcctttatgagaaccacagataaaaatcactggatctttaactgtaaaaatcatgatttttgtaagcctttccttaggaaagccacccgcaaaaacgaatttttgtggacctgccaaaaaaaaggtttttataggtggtcaatgactctgaggtgtaactattttcacatgcactatttcttttggactgcttgagaaaataaatagtgtagcgtcaaaaaaaaaatgatgttttatagtgtatatatcggccggatgagaatagagatcagctggactgatatctctgcacgttaataaaaactgcagctaatctcgtccatccattttgatcactacgggttcagatccaagttgacagtacatatatgtaatatcaacaggcctctagttaattaagtaattagtataaaaatgaaaatatgaagatggttatctggccagtggccttccagtacacaactacacattatcaacagctagtggaaatactcaaataatactgctatgcccaggaaacactagtaattactacctccgtccctcatataaagtcatataaaggatattcactatttttaaaatactaatgtcactcgtcttatttaaataatttgtgcaaatataaaaaagaaaagttgggcttaaaatactttaggccgttccataatatgcagggaaacgtaatacccaagtcatgatctgttacatatttcatatatataagttatcccctataactagtcggataaccatgccgtgtgggtatggggtacccataatctccacagtagcccctgagaccttcacagtcggaaagataatcttctctcgaactagattactccaaagccgagtgcttcaatcatcctcgccatgatctcccgagtacttttaccaaatataaagactgtggagggctgaaaaataaagtcaggtgcatcgaatagatgcacctaatagatgtaccaactgagtggttttgatattgtaatcaaccaagtgacttgatatcaatatatagcatatgcggtgtgaatccccgaataatatgatccaagtgatataccgactgctttgtaaaatatgatgagtgtaacctaaggttggctacatcattgaaaattcacatagcaaaatagctataaagaagcttgtatgttgtgaataaagaaatttccaaagtattgggcatacgtcatgcgcacactgctttaacagatgtgcttaagtccctaaaagacacatggtttcaccacacctggaaatatatggcatatgtggtataacatccgagtaagtaaactcataaaggatttaccaaccgcctgaaaaatgaccataatatataatcagcctaagccataatattggtcaataaaaatgcacacttacatggcaaaaagcaatgatattgtatccaatcaattgcttgataaacccaaacagcaccttaactatataaaaaagtcagcgggacagctatataaagctttactgtttgacaccttttaagatgtattgtaccaactcctaaaaagttaagtaactgcggtataaaaggattttaaggtattgggcacttgatcacgcgcactttggcctaagtaaaaagtgcctaagtccctaaaagaacgtgacaggccacccctgaaaatatgggctgcagacatattaggccaaggccaaaaaatatgccttcgataccctttaaaggatgacgcatgtaacatgctcctgagtaacaaatcttctgggtaatatagaccaagtgtagctcatatgaatagcttctgatctaaatgattatcccttatgggatactccaaaataaatataataattgaatcccgactggcgcaagtattcggttgatagcccttacggggaataataattggtccagtctttgagcatagaaaatagactcatgactatgaatccatgtggaatgtatccggatcaagtccaaattggagatataatcctcacgcttgagttgatgagcccctgagcatatagcttgtccttctgtcatagtcaaaattgtctattggcaatagctgacgcagtcggcatggagatgaaatgaccaacgtgaagacgaaattgctcatcaaaagtaacggaagatgtcagtggtagtaaaaatagtgacaccaatcaaaggtaatgaagttgcataaccatggaggcgaagaaaccagttggcaacagtcaggtcagctagcagtgaagatgtaggcgcccaacaacaacgaaagaacagtcggtgatgacaaaagcaaaccgacgatgaagacgtagacgcgcatcaacagtgatggcgaaatccaccaatcatgaagatgaagaaaataatcggtggcgacaaacgcatccgacggtaatgatgattagcggcaacagagatagccgactatgatgacgaagtttcccatcaacgacagcagagtaggctatgttgaagaggcttgacaagatgttgatgaagatgacgatgtcggtgatccagtcaatagcgatgtagcagctgatgataacgatgagatcctctatcggcagttgcgtagtaggccaaccgtgaagacaaataattggaggagagttgatattgttgcccaactcgtctaaaccgaaatatttgaagttgttgaagtagaatgtctgctctgaatcaaagatgaagataatgactcctgaagttgactcgttggttgatgaattgatttcttcagcttgacataaaatttgtcaaattttgagccttgtatttgtgtagcccccgactctttggttagttgggaaacaactgaacatagagtcgagaattatagcttcttgtcatcgagtagtcattgcttgattgaagatatgtgttgaagatgtccaagtagaaatcctgaatattggagagcctcttgttgtagtaaaataacatggcatcgcatgccgagatgtcgaggctcacaaagacgtcgtggttggtgaagtagcaaaacttgcgaagtagcagcaatagagtttgccagtgccgaagataataaagatgaagtcgctctaccatgatgacaaagttgcattgccgtgatgaagtgaacacgagtcgtcggcaacagaagcaaactggtagtgaagacgcgcagttgtgaagataaaagcactagtcggcgacagcataaccagtcggcgacggaagacgatgatgttcatcagtagtggtagctgtataaaccagatgtagaggcgagggcactagtcagcagcagacgagacgaaaggcgatgaagatggtaaggccaatcaacattggcagaatcatgcagccatggaagtgaagaaaccagtcggcagccatggcaaacgtaggcagcttgtgttgaagatactgatgcctattagtagtgacagcgatgtagccagccgtgaagaagatagcatcagttggcgttataacaagccagccgtgcaggcagtcacaccagtcagcggcggatgcggcggccggtcggtgaagacgtaaacgcccaacaacggcagcataataggccagccgtgcaggcggaaacaccagtcggcggcggtcgaggcggccggtcggtgaagacgtagacgcccaacaacggcggcataataggccagccgtgcaggcggaagcaccagtcagcggcggacgaggcggccggtcggtgaagatgtagacgcccaacaacggcggcataataagtcagccgtgcaggcggaaacaccagtcggcggcggacgaggcggccggtcggtgaagacgtagacgcccaacaacggcggcataataggccagccgtgcaggcggaaacaccagtcggcggcggacgaggcggccggtcggtgaagacgtagacgcccaacaacggcggcataataggccagccgtgcaggcggaaacaccagtcggcggcggcgaaggcaagccggtcggtgaagacgtagacgcccaacaacggcggcataataggccagccgtgcaggcggaaacaccagtcggcggcggcgaaggcaagccggtcggtgaagacgtagacgcccaacaacggcggcataaaggccagccgtgcaggcggaaacaccagtcggcagcggcgaaggcaagccggtcggtggtgatgttctgactgatccattcctggagcgtaagagataagcttaaagccatgaatcccttttatgcatatctggatctggatcctgcagaacaaacatataggatgagtagtatctgatataaatataatactcgagaaaaaatcaagtattttaaaatatttataaatatgtatttctcctcttgtcaattttgatttccccgagcagatgactctgtacgtttaaacactctgtccgactagtcatagcccccaagcatcgggagtcggcctaggcatttcccaaacatgcatatgagtgacatgagttcgtcattaatggaacaaagtttcacggatcagaatttactactcaggtacttttgcaattattaagagcagaaaataaattatattatctctatgcttttgatttcttccgagtaatacttagcaccttgcgttactcggtccatccaacgagcccccgggtgctaggaatcggcccaaaggcaaccatccattggcaaaccaaacggaaagcataggaagatagaactccataactcgataggtacttttgtactcagattatgtcgcaagcaatcaagataaatattataaaaaatatgatataacatctgtagcccccgactcactactcaatggaagaccaattggtgtagtgaggcagaggaaaaggaaaaatatcatataaagaataaaataaatgatgacttagctttgtaatattccccttggtgatggcagaagtggccaatgtgggaacaaagtcgtccatcaataacaatgaagacaccagtcggcggcgacggaggcaggccggcggtgaagtcgtagacacccaacagcggcggcataatagaccagccgtgtaggcggaggctccactcggcggcgacggaggcaggccggcggtgaagtcgtagacgcccaacagcggcggcataataggccagccgtgtaggcggaggcaccactcggcggcgacggaggcaagccggcggtgaagtcgtagacgcccaacagcggcggcataataggccagccgtgtaggcggaggaaccactcggcggcgacggaggcaggccggcggtgaagtcgtagacgcccaacagcggcggcataataggccagccatgtaggcggaagcaccactcggcggcgacggaggcaggccggcggtgaagtcgtagacgcccaacagcggcggcataataggccagccgtgtaggcggaggcaccactcggcggcgacggaggcaggccggcggtgaagtcgtagacgcccaacagcggcggcataataggtgaagatgacgatgcccatcaacgatggtgtgaccaaccgaccgtataggcggggacaccagtcggcggcgacggaggcaggccggtggtgaagtcgtagacgcccaacagcggcggcttaataggccagccatgcagacggaaacaccagtcggcaagagtagtgccgcggcgttacatgcaaacagcagaaaataccaagagagattaatctgacatttagagatcaatctaataaacaacaataagttgaaaaggaaaaaacccggcgaagtcggagattaaaaggaaaaaactcgccgagattgatctcttcgactgactccgagacggagcggaggaggcggaggtcgcagtcgcgggcggcgttggtgtccatcagcacgacgcaggacggcaggaaggcatcggcgtggctgcagccgtctcctatgcatccgattagatcggttttggcatgcttcgtgtttgtagatccatcttgcaacaccatggcatcttcgttgggtagattggacctgtaggcttggtggtggacgaggacgaccatcaaatccgtcgaactgtcgttgccccgtcgttgccgtcgtgctgatgcgaacaagatcaggcagagaatagcagcgacgattcgtcttgttgaagtcgtcggcggcgaggaatcaaggagctcccaaagcgaagacgaagccggcgactcataaagttgattccatcgcactcgtcgtcaggaaactcggcgtttacccctacctggcgcgccaactgtcgaaacatgaattcggcaataataaaagggggtagcgcacgagacctaaaagtggatggatgcggagacaaaggatttagacaggttcaggccctctcaatgagaggtaataccctactcctgtttggggatttgaatccgccgggtgtagtatagatctgacgatcaggttgtctcatgcccctagagggggctccctgccctccttatataggttggggggcagggttacaagatagaaaccttaaccaatacggtatcggtttcctaaatctactttacaatcttatcaaaccaggactttaggccgttccataatatacagggaaacgtaatacccaagtcatgatctgttacatatttcatatatataagttatcccctataactagtcggataaccatgccgtgtgggtatggggtacccataatctccacaacgacgccgccgtgtccgccatgccggcgcgcgtcttccacaacctgaagctgcgacagcaccaggggtactgggtgctcgacgcctgggcgcgcggcgcggtcgccatgcagcgcggcggcggcggcctcgtgccccgcgccgacggcgacgtcctcctcgccagcctccccaagtcggggacgacgtggctcaaggcactcgcgttcgccgtcatggcgcgggcggcgcacccgccggcgagccccgaccacccgctccgccgcctcaacccgcacgactgcgtgcccctcgtcgacaggctcttcgcccccggccgcgacgcggttctcgacgagctgccgtcgccgaggctgatgtgcacgcacatgccgctgtcgctgctgccggcgacggtggccgacggtagctccggctgtaagatcatctacatttgcaggtatccgggactttgtgcgtgataaagtttgaggacactggctagcaagtactcctatatactggcttagtttattaacttacacatgacatgaggaagataaccaattgtggagtaaatggtaataaaataaagtgattgaattaataggacaaaaaaaatgatgctacatctttcgcaaaatccttatgtaggccacaatgcaaaaaattcataccgaattcaaatattaagtctaaactcaaatgtgccggatattaaaagctagatattaggcacatgaaaatttgaaaattccaaacacctaaaattatgcattaattgctaatcataaatttgtagtgccatgttaatgtgttcgattttagttcattttaactacaaaaatatattgtagtagtatatagatttactttatttttgcatttcactttgttttttttaccaattgttaattaaattatttcatggtatttgtaaaattactttaagtttaggttataatatatcattgttacacctcttatctatgaaataaggataactttgcaaacagatagatataccacagggaacaatgagaaccgtgccttcctgatgcccttattacaatattgcttgaactgtcataggtaccggttagaaactggtcataggtatcggtttccgtagtcggcacctatgcagttgcgcataggtgtcggttcttaccacctaacaccggtgtgaggaacaaataaagcaaggttgctcgacatcgagcagctactgatccccatccaagaaccattcctataagatcccctcatcacatccaataacacaattacgaaatcaacactaagatacaaaatcaatatcaaagaacaatagagaatacacagagaggagaataaaataaatcatcgcagttgctgcctctcgacaaaccggtgctgctcccgcttgatccccttaaggaggatggatccagatgatgacgttcagggtggagatgtacaggcccggcagggtgtgcagtggcacgggaccttgcgctgctcaagcccgtgctcaccgtccaccgccgctgccccagcctacaccaccgctaggacgggttactcgtggatggcgctgcgacggggcagaagccactcttctccgtacgccgcttgtctatcctcggcattggctctgacgccggcgctgtcctcgtcgatattctcggccccggtgccaccagcgagttccacgttgacaggtccttctagcggtgctactgctgcgtggtagccggattcggcggaccccgacctccaggcggccggatctagcatggcttagaggtagtggtgaggaggaggggcagaattacttggaggggcgtcaccagggagaggaagaggaggcagaggagggaggagtggcggcggacgaagatggatgaggaggagaggcccgtgtggtggggatgtgcaaaagatgtggacaaggagtacggggtagggagaaaagtagggagaaaatgtgaggatagatgtgtgaaagatgtggataagaaagtggcttggctccgtcaattttatgggtaatagttaattaaaaaatcagttcatataatatattataggttcttttttaattattaaccagtacctacaatatattacaatatattataggtcctagttcatttgaaaatattatgctgattttttctttagaactgacatttatattactcaaaggtgtatgttctatatttttttcatcgtgcaaatgtgagaaaatatccgtaggtaacggttttaaatgtcgaccgacacctatgaatcgatatcaataaggggtattgtagtagtgttaataattgtgatttctgtgatgaataacaatgggcagagaagaatatatagaatcatgtcgttattatatatatgtgcaaacaaaatatgatgagggggagagagagagagagaacggggagggagagagcgactggagggtattgtagtagtgttagtacagcgcaaggcgtacttgtgctagctacgtgatagaattggacaattaacgtggaagtaggtgactgggtgttgtcatatcaattaggtgtaccggatatttgttagctacaataaggacggtcgacggaatgggactgatatatgcatgggctagctcgaccaaagttgctagctactgtgtgtccttcaggtaattaatcggacagatacacaccacactttttatattatactccccccgtttcaaaatgtttgacatcgttgatttttttaagtacgtgtttaactattcgtcttattcaaaaaatttaaataagtatttattcttttcatatcatttatttcattgttaagtatactttcatatacacatatagttttacatatttcacaaaatttttaaataagacgaacggtcaaacatgtgctaaaaagtcaacggtgtcaaatattttgaaacggagggagtaagttgtttgatttttttattagttaaactctcttaagctttattaagtttataagtgtgtgtgtgtgtgtgtgtgtgtatatatatatatatatatatatatatatagaggccatatcctgtgaaaatgcaccaaatgttgcaaacttggaaatactaatctccaccgttgcatccaatctgaacgaccatgataagctcccatccactctctcacctgttggatgcacttttgcagaaaaccgcccgcacctggctgcatatgttacaaaaaaaaccctatactcatcttctttatagattctatccctctcatcttgtaatgtactgctaccatgatttgttccaacaaagctcactggtcgactcctatggccagcgagacggcggtcgccggtcttgagctgcgccatgagccactccatctcggcgcgcttcaagaccgccttcaccttcaccccgccgccgccgccgcagccgtctcttctccatcctcctcctcctcctcctctgctggttcttccctcagcaggtggacgaatccatcctccgcggtggcgatggcgaacggcatcggcgctacccaatcccctaaggccgttagcaacctcgcccccgaccgctcccctgacctggacattgagttgcagggctacgaagggaatcaagtcccaaccagatctgggccaaggtattctcttctccctgatgatggatctgtgcattggagcctggtgaggtagagcaaggattggagggagagcacataagtgctcttggttttttttctctgatttcttagttagaaatgtgcaataaccctggaattgttctctgattggagggagagcatgagaatattgcttgcatgctggaattctataaatgtaactcacacatcatagtccctgaaatgttttttagtttctaaaatgtatatggatctctatttgggaaagtcactctggatgcttgtgctttttattatataattttttttacaaatgcatgtgcatctatccaaaaagattcatgtacaagtttaatttgattacgcgagatgttgctcctattatctctttgtgcaactaacaacataccatgaataagtatgtgcatctgatcacaaataagaaacattctacatctgggcatgccaatgagaaacattcagtagcagttgaattttgttttgtgtctcacaaggaatagttgttttttttcctatagagaacatctgcaaattgtgcataggaagattcaaatgtggggaggaggatgttgacttgaaaagaagatggaagatggaaagaagatggaagatgagactgtttaagattactcatttgattttttttcaaggagttgagagatttggggactgatagctctagagcactagtgataatataatttcaagaatgggataattggggcataccatcttatgcagatattgtgttcttcttttgtatgatcaatgcatgtctaaaagctttcaaattactctggtgttatcctgtgagaagtagtctttttatatggatgacaaacaacctaccggcttgaggtgagtttattggccagggattccccctcgtcaccaaagtgtccctgggtgagtttctccatcttctccatcttccccaatcatgggttgcaacaaaagaacactactgcacccaatgcaagtgggcaagcttgtgcagaggaacacaacaaatcaaatgcataaggaacaaatcaggtcaagaacaaatgggagcacacctcgattatgactgaagaccagccccatctgccaccgccaccccaaaccctaaccctagatgaacacttgttgagcttttgtccatacctctggagcaggaatggaggaggaagattggatgcgaggaggaagctcgagggagtcagggaagcacataatcgtggggatttctcatcagttcgaatcggaaggagggggtaggggactagctgagggtgagaccttttcttttagatggagaggagctgagaattgaggtggggattttggaattgagagcgggataacatggtcctgatattttcagtaaaacatatgttaagtggggtggtaaacgtaaaatgtacagttggaaggggtacattatgatctcatcccttggaataggatctaacggttggtttgcatatttccaacatttaccctgtttgcacctgatatgccctcatatatatatatatatatatatatatatatatatatatatatatatatatatatatatatatatatatatatatatttctaatataaaacaaacatattatcaaaatatattcaatgttaaatttaataaaactaatttaatgttataaatgtgacctaaagaaatttgactaataaaaaagtcaaactacttatatatcaaatggagggtgtatataattaaacaacctctatatatagccataatttgggcacatatattcctctttaatctctctcatcaacagaccgggagtaaatacataagatcttatacacatactctctctttctctttctgtatatgtgtgtggtatatatagatagacatgtcgatatatataatattcaatttgcggcccattatatttgtaccatgatgaagtgataattaactaagattgttaatgtaaacaagtgggatggaataataccaccattttcaaattttgcttggtgcatgtgcgaagaaccgagatcactgaaagacataaaaaggcaaaaattaacaagttgcttgtgacaaatataattctcatatgatatatgttcatcgttttcatggaacacatcatgatcaacaatgttttactcctatcattcatcaaaaatccaaaccacaatttgataattgcatcgtgaataaagtattagagcacacacatcgaacactataatataatcactgcagcatgccatgtgtaattaaaaaaagagcacatcgatcgatctaaagacaaattaaagtttaacatataatgtccagccttaattgagctaggtaccccaaaatacagatatgcctcataatcttcgtccaatgcaataactagctaggtggtaaccaggtttgaactgtagttacgtagtttttcgattttgctatttgttaaaacaccattgttaagtcttattccttttttttgcaataaaaaagaaggagctgtcaaaacatataaatgtacatgtgcagggatcagaaggatgcattggtctccatgtggcacttcctgaagcgcaatgggctacaaaatctgtacgagtccttctgcgagggcacatgcttcgggggccctgtttggaatcacattctcgagtactggagggcaagcaaagcgaacccaagcagggtgctcttccttagatatgagcggctgcttcaagacccaacagacagcatcagggagctagccgagttcgtcgggcagccattcactagctccgaggaagaagctggtgttgtcacggagatcgtagagctctgtagcatggagaatctcatgagccagaaggccaacaaggaaggcgcccaaggtgtgttcatcaagttctctcacgactcgtatttccggaagggggtggcagggggttggacgagccacatgacccctgagatgggaagacgtctggatgcgattctccgggacaagtttgatgggtcaggactcactatctgaatatgcatttagttttacgtgtgtttcgtcttttaatttatgcttaacaatatatagtagtacgcaaaaaacgttggattgttttttttcttgttgaaccttttctccatgtattgaaataatggtgttgtttggaagtatagtctgtaaccttttatgcttgtaaaacggttataactttgtaatttccagggcaccaaggaaaaccctttaattgtaatttccctaattcggttaatcacaatgtagcttgtattttggtaattgttagagttactctggttactgatgtaatgggataatggactagctatctggcataaatacataatgattccccacacattgctgcaagatggctgtggatatcatttgctttggagagatgcgcatactatataaaatgctttctagaagtctatcatcaatgattactgcaccctaagacaaatttagtaaattaaggcaaactgtttcagcttacttaagaattcaactaacttcatatatatttcccaattcaagatgactaaactaactaagtgtaatgtcaacaatcaatccagtatactgttcattgaaatataagctagaaaaattcaacctctaattctttcttttgagaagaataaaggaccaggtcttcgacaatggaagcctttatgccatatccatgtacttgtttatgaagtcataaatcctataaatcctataaatcctataagtttatacaggatttataaatttaatatagattactaagtatgctagtgttattgcccaagccccatatgatgagtcatcttaagggagggagggaagtaattaattaattcacacatctgcaattaatatggagatgatatatactcctcccgtccgtgaaagggcatatagcctagtggttgcagtgatctgagtagcacccaaggtcctaacttcaaatttccatatgagcgaattttagattgagttattagagggcaagttccttatttgataggctaagttcctaatttaaaaaggctgcatatatccggttggatgcagaatccgggtaaaaaatatccttcttaaaaaaaatactcctcccgtccaaaataaaacgaacctaagactggatgtgatacattcagattcgttgtactaaaatgtgtcatatcccgtattagatttggtttttatgggatggaggaagtatatccagtattagatttggttttttatgggatggagggagtatatactgctcgcagcctacatgaagaacatgtcattgcgcctccgctgagttggggcttctatttttcccattttcactgatagctagatctaaattttcatgagctatgtttttattcttactaattgtgtggaggcaaagcagctgtttgcatactgttcgtggatttgtgtatcaaattggcatgtgtgtgttacaggatttgttctagtaatttggcacatgtaattaatttggcacatgtgcgtggatatagctaaaactgctgatttagatgacaaatcaagatgtattatggtaaaccttttttaacatgctccaaaataaatacatcaaatacaaaaatgagagagagaaaaaaatgatgatcgaagtggaacggaggaagtacggtggtaattaagctagttacaagctccagcatacgctgcaagatccctagaacacactactagaaaaccacaaattggggacatcctctatctacaaggcctttcctatccttcgtaaattcttaaattaaaaatcaacacctataacgtgccaatttttctaaaaaccaacacgtataatacaagtgcctgattttctttaataaaagcagtacaaataaagatgtcatatgtgctaggttttttggcacattattggagcagcagcaccagcggaaaaaaaatcacatagacatacgccatatctcctcgtgacctcgtccattcctttcttatatccgtctctctcaaaccctctaagcctccacctaagataatcttcatcttttctctcattgtctctcactctttactcctctccacctctcagcatcctagcctgcgacgctacgatgacaccccaacacgtaaaggcggcagcctgcctctcccagtgacacgacgattgcggcgaacaagccattaggttatcctctcaccatggccacagcctcagttcccgcagacggattcatcgtcattggcgatggcggtggcaccgatgccatatctagattgtccgagttcaggaacctctagatctgccctcctccctcccctagttatcactgtcgaccatgacgagcgacaacgagcaacagtgacctcccctcggtgggacagcatcagcatcctcccctcggccccacctccccacaagcagcggtggtggcgatccacatgactaaccaatacccctcctcccaaaaaattcccctccctgatctctcccaccaccccttatatctgactgtggtcttctggatctgagtagtggtggtgagcagtagcggcaaaggtggctttggcctccgatgggtggtggtggccttggtctccgctgggatgaggcaatggaggcatccttgtgttgatttgtaaatatttttttctttgaggggggaggtcgtgaatgttatgtgtgtaatttctgggatgattctgatacattgtcattggatttgtgagaatcttccattcagtttttgtatgtgttcttggctcgtagcatatgttcgattcgagccgatgcatcgagcattttttttattcatggaatctcaaaagcaccaatttctagaccattctccacatcagtgtcacatgaagggtgccggttgtgaatttgacaccaaagaccggttcccaactgacacaaaagtgagttcctatagtagtgacagatcgaatgtaactgcagcatttacctaaacagaggttaattacaataattaacaaaaaagatggttgcctatggtgattgacaaaaacgatgggtagcatcggaaggattttatttggtgcaccgaaaattacataggtcatagatgtacctgtttataagcataaacagttaaagttaagcctccaaacaggctaggaggctttgttttattatgaaacacatagcttgaaaactgtgactacaaattaaaagatgaaaccccggccataatggcgcatcatatggtgagccccgatccatcaaacttttctcgcataatcgaatccagatgttcgcccatcttaggagtcatgtggttcctccagtccccttccacccccttcctaaaatacgagtcgtgcgagaacttgatgtacacaccttgtatgccttctttgttggctttctggctccttagactctctaggctacatagcttgacgatctccgcaacaatgccagcttcttcctctgtgtcagagaatggctgcccgacaaattgtgcgagctctctaacggtgttcactgggtctcgaagcacctcctcatatttcaagaagagcactcggcctagatctattttgcttgccctccagtaaccaagcaagtgatcccagacaggaccagcaaacccagtgccatcacatatagactcatacacttcttggagcaacagatctggcacattgcgtttccgaaagtgccagatggagaccaatctatctttctggtccctacaaaatataacaagctagagtaaagcaatgtttcattgtcactaaagttaatactatgtgaataaatgttttggattttggtttgcaatttctctctttctaaatatacatattgtatccaggacttgcttttgcgaattcatgaaattttggacaatgtttggatcaagtatgtaagaacaatatttttttcctagggtagagatcgaggttgttgaacaagtccaacaagctaacacacgagacacggggctctttacttctcaaagggcaccatggtctagagcatcatgactcattgcaagggagacaaaataagtttgtttttcaccgaactcttgcatactaatacaaagcaaaaagactagaataccctctactttatcagtcccctacttacctaattacaattaatgcatttgtcccctactttcataaaatccaatgcaatgatgactcaaagatgaacttattttgggacatacaagagggggcaaagataattatatttcagaacagagggactagaagcttgcgacactatagaaaaacatgaactgcctctccatcgatatggatataaggaaaagggaagccaattatttgacctcatcaccttgaactcttgtaggaggataatggcaccagtgaaagacaccatctaccaatactgcaaggatgactctcagacggaggggagtgggtgtggaaggggatttctttttgctttgaaggggctcttaccaaggtcatggttgtaattgtgcgtttatcttcttgtatagaaaagagtagattctataaaaccccacctattatggttcaagttgtacaaaaccatagagattttggcatgtgacacataatctcaagtattatgtgtaaccattttaatgtgctcctatatcaagattttaaaaagtggacaaaacatttatatgatgaataaaattctcaaaaatttaaattgtaattgtagaactaaaaggtgtggttgatcaaaaatcaaaatgttcaatagtacggttttatgaaattttagaaccataatatccggtgtgatgtgccacgtatcaaaatccttatagttttacgtaacttacaccataatagtagggttttatgtactttacttatagaaaaatacaatgttaaataatgacaacaaagtaccagctaatctagatcctgcaataaccaaataggaaacatgctacatcaccatatttggtagagggtcccgttctgtcataataatactacgcagttgtatcacacatagcacagcacgtggtcatgtaccatctttcttcctaacgcttttctttgggaaataaaaaatctctatttaacggccatatggcaaaatactcatttttaagggagaaatacataccatttccaaaattagtttaaagttttcacacatgagatttgagatgagagcagctaatatttgaatctgatatgtataaatttcggctggtgtacaaaaacgaaaacgaccggatatgattcaaaactaagattccccttagtaaaataatattacctccgtcccaaaataagtgcagccgtggatatccgtgtccaacgtttgaccgtatgtcttatttgaaaattttgaaaatatttagtcacacataaaatattattcatattttatcatctaatagcaataaaaatactaattataaaaagttttcaaataagacgaacgatcaaacgttgaacgtgaatagtgcaaaactgcacttattttgggatagagggagtaccaataacaatataacgaataagggatggctagctatagctatggttatgggtacctgcaaatgtagatgatcttggtgttggagttgccgtcagccaccgccggcggcagcagcgagagcggcatgtgcgtgcacatgagcctcggcgacggcagctcgtcgagaagcgcgtcgcggccggcggcgaagagcctgtcgaggaggggcacgcagtcgtgcgggttgaggcggcggagcgggtggtcggggctcgccggcggcgggcacgcgcggcgcgccatggtggcgaacgcgagtgccttgagccacgtcgtccccgacttggggaggctggcgaggaggacgtcgccggcgcggggcacgaggccgccgcggtgcatggcgaccacgccctgcgcccagctctcgaacacccaggtccccccgtagcagcgcatcggctggccgtaggagacgcccgccggcagggcggagacggcggcggcgagctccgtcggagggcgcaccggcgtggcgtcgacgtcgacagcgtccttgaacgcgacggggcctccaccatggcgcacagctgctcttgctgccggctctcctcccttgttcgccatggcggcagcaagagcgagtatcgactcttataagaccctagtacttactatactccgtatattggtttgctgttgagaaaagatttggtatgcatggccagatggccttgacagccggatgagattctctacaatactttatttggcaggttactataggcactatctggacgagattttagcggccacagtttctccaaaaatttctagctctcgaatgatcaatattcttatccggattcttaggcccgtttagtaggactccaagctccaactcccaactttaaactctaactccagtgatagctagctcctataggagctgaagtgggtatataagtatttggctagattgattagctccacaccaacacgtcccttgttggcatttagttgaacacctggttggtgtcgccccactgcctccgccaccgcacgcgcatggccctgcctgctgccgcagccgacgctactctcgcacctcgccctgccgccgccgaccacactccaccgcccacgtgccgtctcccgccaccgttgccgctcgtggccctcgccgccactccaccaacacctgccaccaccgcctgccgctgccgacaccaacggcgccgccggtgtcaagggatgaagatggggatgagcgagaacgggagatggggtaggaaggggtagttcagtagcattttggtataaatagactaaaaaattaaagggtagtgggtcttttgcggtggagtgaagctgtggagtagcaaaaacctagctccacccccgtagtacaaatttgtggagcagctctactaactccgctccaaaaaatagagaatctataccgtttggcacagctccagctgtaggttgtgttcgtcagttggagttgaaaacactttcctcattgcacgcaaaacgaaacaacagtttagcgtatatttagttaaatattagctaaaaatttaaaaaatctaaagtagtgaaaggattcatctttccactggtggagaaaccatctttggtcggtctggcaaaatccacaatagtcccggttccaaaaagaaccgggactaaagataaaaattttgatcttgatctttagtcctggttcataccctgtcagatgtatgtcagggggccgaggatctttagtcccggttggtgtcaataaccgggactaaatatcaccattttagtcacggttggtactcttgatcattagtcccg

SEQ ID NO: 4917 - DNA, 39482 bp, Oryza sativa
gtgaaaagatcccctactggggcacggcaggcgaccccctgccggccagctgcaaaaaaaaaaaaaaaaggagcagtgaaaagatccctacggcaggcgaccccctgccgaaaagatgccctatagaggcacacagtcgggtctctcggtggaggcagcgctagacactagcgcttggctttttgaaatttgtaacattagatttatttttttcccctgttgaactcattgctactcactcatgggataattgaaccaattgcaaaatagttcgattacttcgtaacactcctccatatacaacatactccatgtgatagtatatagactgatcatccaataatttcagtaaatgtttgactgaaacctccaatattttcagccaattgtctgaagatgtgaatatcaagattccaaatgactagcgacaagatcatgtatgtgcagacgacccctgaggctgaaccaaactcatccaggcatggcatggggaaaaaacagaccatagctcatcccggcatgaacgaagaacccgacattttgcatattttttctgatgctctggattcatgtaagcactaatttctgatccctaacgtaaataatttgtcacagtttttgtttctgaaaatgatttttttcctaattttctcagagtgcaattagtcatgatgtcataatgcaggctaacgatggccagaagctgcacctagaagcagaagcttaacaggtggcacaaacggcagttgaagcttgactccaattagaagtcatgatagtttttctgttgctacttggactggaagagctggtgtgccagggcaccatcctctgtgttcttgaagtttaagtcaacacctcaataggcactggtttaatgagctcttctcagccatcacaaacttcgaatagcagggccaaagtctgacaaacttttagttaggatacctggaatgtgaggagctgcttcagatgcacttgaacttccctttgcaattcgctacaaagaaaaagataaagaggatctggaacatcagctcaacctgggactggcttccaatcacacaccaagttcatcatagaaaggccatgcatcaagctcttctactaggaacattattattcagtctcagtcctaattcgccaatgtgcaccttcagtcttgagccagctctgcaagcaataactgaacatttaaagaactgcattttgtgcagcgatatggtgcggtttcagaatctgttgaaggaaatagcagtgttgtaaagatgcacaaatggtgcaacatgggtgctcaaacctgactaccggtaattttagctgtagctgattggagcaatatttttgctaggtctggtgtactgcataatttagtttcattcagataggacatgcaaattgggaaagggaaaatgtctccaacatccttttgaaaccttttggtatggctgactgattcttttcgtaagaaagaaacaaattaaaaaagcagaaatttgtcaccagaagacattttttctcgatttttctagctgactcaaatgatcggtggcaagttttttttttccccaaaacaaattggtggggaggactgacaattttcgtccttccccaacttttcagtgttacatttgttttgaagcatgagctggtaatacttccttcacaattcgttgtttgtttcctcatttgtcagaatcagttccaagaaatttggtgcaaaatttcttatgagaactcagatggtattctgaaagaaagcatgggatgtgctcaaacagcaatatttactgatcatgcttaatttgtctttgctttgagtgaaatcactacttgactaagaccaacattttactttagaggttaaaattttgtcttgattgcccatgcagaaccttattattcagctttgacgtctcatttgctaatttcagccatttctacaattaatccctagttagctagatatgtcctccccatgtcttttaattttacagtttcctaatgctatatagcctctaccatcttgtctagcgccaattctgcagccaaactttgttctgcacttcaattagttgggcttaaattgctctcatattatgtaaatttgcaagcagttcttgttgagattgacgccattgcttccatgaataattcctctgatgtcataacttcacgtagtgctccctgtagtgtttatgggtctcatgtcactgcttttatgtagtggatcttttagttcccatacgctaatatgatgaggtttcctcctttgaacatcatatgctagatacagttaagacccttacagatagtaattttctatgccatctaacatttacctgtgttgctactagtctccctctggttttcttgtacaccaaagaaatgcttgtcatttacactaatgttgttgtcttattgacctcctatgttgcagttaatgtgtttatctgcaccttggacggcagaggggaacctctctatttagacctgaagagtcattgcaaagagtcattactggacagtcttatttggtagaaggagaatggcctcatgcaagaagagtgttctctttgttgtctctgaacctgcctgtctaggatgcccatcttggtacccagttggcaccttgcaaggacgttgcaatattgtttggaaaacaacctcatcattctcaaatattttgcaatgtagtgtatgcatgcagcaaggtatgccattctctacttctgttccatcttgtcttttcccttttccagagtaattaaatggagtagatagaacatcagattagatatttcagaagatttattcatgatgggcatccctaatatatcaaccggaatagatggttttatttatgactgggttattttttccattcatggttttttgaaattttatttgatgtataaacattactcatactatccttttcttttctctgttcagatggacacaacacaaatcgatgaaaccagcctcagtgagagtccgagctggccgagggtcagcctccaaattaaaaaaatatttttttcctggtctttggaatgccaagacgatggagatgcaggcaatcctgaccgttcattttttcacgtgtcagcacaggagccctctagattgggccggtgttttccgttaccagtgcctttcagctcatgggccacggccagcaattgttccaactgccacttttggggcccattccgttgggtgcgtgcccaaggtgatccggacatgtgggcccctctcgtggtagaaacccttgaacaaccgatcaagatcagctcaaaatcgaatcagcatgggaacaaaggaagagagatgcatggatgtagtttaatttgctcctaatcttatcttagccacgtagcatgtgtacggtttgatgtgtgtccacagatgggagaatttactaatcataaaacatgaagtggtaccgattgcctctataaaattatggggaaaattccaaatacctctaaaagtcactcatatttctaatctctccccgacaaattattttggtacaaaacactccacacaagttcattttctctttcaacttttcacctctatccagttttcagcaatttctcatgccttatgggtctcccattaagttgcctcttgacaccaaagctacttttcattttgtttttgcttttgcatgctttaatttcaccaaagatacggcgataaaacatgacaatgacctcaaattattagataaggcgtattaaatcttatgtccaataagagagaacatagggtcttaattcgctcaccatatgctagagaaatcgctaaggagtgcgatgagaatcactaaaaactagatagaggagggaagttacaaaactaatttgtaggggagattgaaaaggtgcgttatttggatttttccctaaagttattatcctaaacctcggcaataccttctgaaacaaaattttgaagtggaacaataaattagtattcctttgaaacacaagaacgtcttttcaaaaaaagaaagttcatggaaaattagttcaattcttgtaggaatcctacaaatatactctgttcaaaaagaggcttactcttataaaagaaactacatacttagcactgcatggaaatgtcacataattttacaattgacatcgaaattttaaaattatgccgcatcctaaaatcaaatcagcatggaaaaagagatcgatgcatgcatggatgtaattttgtgtgtaatcttatcttagagcatctctttaagagtatactaaaatttgacactagaaattcttgatttgggccatccttaaaagaattagaccaacaaatcaccctctccgccaacagtaatcctaaatttggttttaagtgagtcctcctttaaactgtttctgttttttttttccttgcgagggagagatcattgctaccaagcggatcgaacgatagtggctgaatcgacaccaggagtgccgatacgtgcccaatatttggctcggtaaggcatcgatgttaagcgtgagtacaaaattagagagcttatgggtattttattgaaggcctagattgtgacttaattcctaaagttaagctttaggagccatgtatacggccatacggaactcttggagttggagatgctctggtactagcacggtgtccacatgtagggcaagcttcacatttctatgtgaaagaggaggtgtactcaaaagtgataccttgctcgttaatataaaattatttttattcttataaaagagagcagtgatgatggtgagtgatgaatctgccatagcttgcaccaccaactccatactatttgaaaaagaaaaatgacaagtaggaccaaagggtccacgtgtcaaccacctccactatcaattcattacattttattaaaagaaaaaagaatagtctgagggtatgaaggatcacatgttagtaacaaatacatatatagagaaattaagaaatgatgtatgaaggaaatgatggtaataatgggttgataataatcttctttaattaaaatcccgttgcatcgtagggacaatatgaatatgctagtagtagaaaaaactaaaatctttttgcagtaatttgtagagttttcacgcaaatcagttaaactctctcatagaaaccctttccatagtagacttggttttttgacgaaactatacattcagtgatgcatatagaggttaagagtggtcttaaaataactgtgtattatcttgatgtaattatttaatactagtaaaaaatttcctttttctttcaaacaaaaaagttagtgctgcataggagtttaatgaattttcaaaagaaacaatctgagccatacagaaattgtaaaattatgccctacaattccaaaggacttgtgcctttttttcagctagtgtcctagtgtcgtacgtcctgccccacctgagtggaagcaagtgaaagtcgacgtggagaaacctatccaaacaattaggactatccatcattcaggatagccttccgatcgagcagcatcgagatggagatggagaggtgcacggcacaccaaacacatctttgctttgcttgcagctacagtactgctacatactgacagcgatcagcgatggcaattagcaggcactataatcacgaaatagtcgtgctagtttaatttggaggggggcctgtcatactgtacatgtataattaagccgtctccatccaaattgtatttatttattggaatttgttgctctcttaatcgaaagtttcagtttcacatttttgggatcgtcgagtccataagttggtttatcatttcctctaagattttagaaaaaaaattataatttatatttcttactcttttttttttgtcagatttcggtgatttgtttggagggactataagagcaagtttaatagtatagccaactaatagcttcaattcatctatagccaatctaatatcccatccatacaatagttatatactacactattaatatctggtcccacctgtcatacacacactgcgtcttagagtccgtactacagctggctacaaatctgtagtccgctgctctcctctctctttatttatctctttaaaatatgtttgcagctggcttatagcctgctattgtacctgctctaagggcttcatgcagcactgaggagaaaagaaattgttcggtgcttgatttgggtgatttattcggagaaaaagaaattgttcatggggccatgtctacgtgggtacacgcatgactccaggttatctggtcgtcacagttgatcgaatggtcatgatccggtggatccctcaacatgttggtacccatgctcttgtttggttaattgtgcattaagaggtacgatggactccctgcatctatgtgcattattgtcctccttaatgagacactagggccactgcacttttaattaatttttcaaattttatttgagtaagagaaagatcaaggtcaacaggaggaccctcttgcactgatattatgattttttccccctcataaacacgcatgcgttactcagccctacgaacacacatacgtccccttattcttatgagtagtgcattcgaaagattagaccgatataaataaatgagataaatctattttatactactgaatttgtctgaatttaataatttgccactgatattatttctttctataatataccagtgacttttttatcaattattctacgatacggtattgggttaggcctttttttcaaaaatacctaaaaatatccttatgcacacacaagatttacaatttaattatctcattagaagtctaaaaaatatgaaaatttttatatggccttcttatacaacatgtaagttcgtatataagtttttaagtttttgcatttcttttcttttttttactccctccattccaaaatataaggcacaaccaccctaagcccaaagattaagaaataattattatcacctcatagtttagattaatcaaataaatgtaatgcatgcacccaataaaattagagatcttgatagtggataatttaaataataatattttagtggagaatatgtgttaattaatggcatgcatgtatgtatgccttatattatggaacatctctaaaaagtagttgtgccttatattatggaataaagggagtaaaatataacatggaggttgagagttcgaatcattcaaagctcactctttcggatctattttttctctctttttgcagtgcttgtccactcttttacttcttctttttcagttttgtgtggcttttttttctttaattcttgtaataatcctaggtataacatgaattttttttcttaatatatcgtgcaaatattttttttccactagttacatgttgaaaactcaactatttagtaggaattatttggccccctcttgaaattggctcaagctctgcaaccgcgagcatacatgtcaaatctaatctatcacaagaacaaccacgtggaaaaattaggatggaatcacccttgtaaagtgtatagaaaatacaactgagagtgggcatcaattccatctgaattggaagaggcattgatgaacaaactaaagcacatctgcatgattgtgaattcttttctttaagaaacagggtaatatataaagcagatttgtataattgtagaacaaaataaagctaaaactattttatctggactttaaaaccagccagaaataagagatatatatggtttaccccatggataacctcggcaaaataattgctgattccttgtcgtccaaaaaaagaggggtcgttttagatgattatccaaaatttgtaatgcaaaatcttgaggacatatacagactctaattgtaatacacatggaaataatgggaatcatatattagttatacatcgatatggttgggctctgtggttgtgtaggaatgatatgatttttgacaaatcaccatatgctacatatatgcaggtaattttcagggcaacctattggcttccgttttgggcacaactataaaggtgtgatgaagacggtgagcttttaaaagctgcatgtcgtaagcttgagacgacggttatgcagctttttgccaatcatggatgaaaattcacaaatagacttcaataatgtgttctcccgatattgttttggttaaatttacctttgtgtggtcatttcttctatcatttctgaactacactcgttttagagtgctagattgtaataatagactgtagctctctttgagcaaaggccgagatgactatttcattatctaaaaaaagttatacagcgatatacatatattgcaagacaaatccaacattattactccggggtggccagagtatataactttgcatagatgtacttgattcctccctcccctcccacaaacacttgtttccttgcaattatatatccgacaaattagtagtgggaagaaatatgattatggtgtttctcattaatactctttgttgtatttttcgtgttcccatcagatacatgtcttggaccccgtttgatagtgagtttagagtgtcaactttatcctttcttgttagcactttctaaattattaaaacgtatgttttcggtaaaaaatatatatatataaggtttcgtttaaaaaattaaataaacccatttttcatgtttataatacttaataaattatacgctaatggtttgtgttattttacgtacggcgaaaaatccttgcttaacctcggtaccaaacttagcctgctctgttcgctgctggaggttcccaactaggaacagtgcgcacggaaagcagagcggtccattagcgcgtgattaattaagtattagccaatttttttaataaaatggatcaatatgattttttaaacaacttttgtataaaaacttttaaaaaaaacaccgtttagcagtttgggaagcgtatgcgtggaaaacgaggcgaagggagttgggaacgagcacttacgaacagagccttagagtaggtacaatagcaggctataagccagctgcaaatatattttaatgagataaataagaagagagaagagcaacgagctatagatttgtagctagctgtagcacggactccaagacgcagtgtgcgtatgacaggtaggaccaggtattaatagtatagtatgtactattgtataaatgagctattagattggctatagatgaattggagctagtagttggctatactattaaactgctcttagtctgagtggttataacccttagaaatcaagttttggccggataaattttggacactacaaatcaagactttgcgagatatttaaccatttgccacatttagatgtggcaattaactttttgccaatggacccacatgtcatagacacatgtggacccacatgtcattgagatagggatggcaaatagttatttgccaaatctaaaagtggcaaatagttaaaagccccagactttgcagcttccatcaagtattatattagtggtcaaagaatgaaaaggttgacagaacattcatttgtgacggtgcatagagtataaattaaggtcgttggaatgttccatgcatcttcaaaactaacctggacaacagctgcaaagatgacccatgtgctaaccaatttggcagtaatgtgcactatacatatacttctcgtataggtttgaatgcagtacttgtttgcctatccaaaaagcgattagtgcaggagttgtgctgtagattgatctttatggacatatacgcacatacagcatggagctagctttgctaatagcaaggcaatcaggcattatggaagaagcccaatgattaggcacaaaaatctctgattgaatgatcttcctggtggcacgcagtagacagagtacatgtacacacatgcataatgcagggttgttatgttggagcttagctttggtgctgtccatttaattatttgctgttagttggtgatgatctcgcgatcgagagctacatgggaaagtggttgcgatatgatgcatacacatatcgctagcttagctcgtttttccttttatatgaaactgatgaaacatgaagattaagttgatgcacataaaacgagaaaacctttaacacatagttaatgagtttttaattattataaacttgataaatatatatatttaatattttaaaggaacatctatataaaatgtttaaaaaaacgtactaaaagctagctgctcccttttggccgaatttagcctgttaatttgcagtctgcgctggaaattaaaccgcgggcaatgatacatgtgcggtgtgcattgatatgatgatgcagctagctagcccgtctctcgcttttgattttgcagtggaaaatcggttaggtacacgacgcggtgccggtgcgcgcgcgcgcgcgcgttttcaacgggctcaccagcaaccgtagccgcgcgcgcgcgagagagagaccacgggagggagacagtgcggcggcgacgcgcgtacgcgtacagcagcaacagcatggcacacgtacaggctgtttcctcgctgcgctgcatacaccgcgccgcgccgcgccgcgtccaccggcgcgcggagcgtatgcatgttccggggacaacgcgtcccacacagcacatgggctcgatcgctctaagctgcagtacaccgcatatctgtatgcgccgtcaagaacctgaacctgatgcgtatatactgtccttcccttttcaaaattggaagcaaaacatgcacaaattaacaatgtgatgcatggctagctagacaatggctgagtttagatccaaagtttggatccaaacttcagtacttttccatcacatcaacctgtcatacacacccaacttttcagtcacatcatctctaattttaatcaaaatccaaactttggatccaactaaacacagccaatgtgtgcatgacgaacataggctcgatcgggcattgatttctctcaccacagacatatcgggcaatcgaaaagtgatcaatggctatagccttccgcccttcccggacgcacacgtataccgaaccaaactgggggacggttggtaggtcaacaccagcagacggcctgacggacatgcacagaaacccggcctctcagtctcaggatgtgcgtgtcgcaccaaccaaacctcgcgagaatcacatgcattttcgcaattgggcgcggtgaagtgtgcacgggcaaccggctgatctgccgaaaaattccatttgccaaacaaacctgtcacagacagcactagacagtagtaacgtctggaacaagggacaggtatacccaatgccatatggagaacccgtgaacgtcggctggtctcttcctggagcccgtgcctgtcacggggggcccagctagctagtgctatccattcccatacatgctgccacatgtactgtgttctcttttcatgggcgtcgtgcatgatgaaatcatgcgtatcccactgcacgcggtcctgcgccaccaccaagttctgatcaggaattaagccgatcatgcttgatttagtggatgattaaaatgtactactcccaccgtcctaaaatgtagctatttctagcacagtgtcttgtcctaaaataaagttatttcttcacctacctcctcctctcaaccaatcacgaccattcttcttcacctactttctcttttcaaccaatcacacacttcctccaattattctcacctactttcttaatacctatgccaacctcaaaaatagctttattttgggacggaggaagtacaagcttaattttattgaaagaaaagaaaatggtgggtgtacatgtagctgcgcgccaggtgtttctcccccctttcttttttcataaaagttgtttttctttttaggtgctaagcgatttcattcaagaagagaaacgttcaggggttttccggctagcttcacaaggtggtgggctacacgacctggattcgaaacttctaattatttgatactaggtcattccttaatatttgcgtatttttttatttcattcaaggaaagaagagtgattttacagttgtttatgagcttccatattttttagcgtaaaatttagatttttcagtatcttcaatactagaaggtatgaaaatttgcattaaaaattttagtacctccagatattagaaggtacgtaaatttccactaaaaattttagtgtctcttaagtacttaaaaatttctcaaggaacaaagatcatattaacccccatttgaatttttgcttcaaatactttcatattcaacacccgaactcttttgatcggatgaattacaacttgattcgaatttaggacagttttaatccaacgtgatgcatatgtgtaatgggccttccagctaggcatccgcgtgctacttcctcctcctcctcgtctactcgattccctcctttctcctatatatgtttccggtgccaagatactggtctattcaaggctacaacccaatttgcagcatgtgaagtcgcctcgtccactgcagaagaagagggctagggagcagtggtgatggcagccatagagcagcgatggttaaatcgtggaggctgtcccttttctttgacaagtggtgcatggcctgatgcaactatattttgtgagtttttgaatcgaagagagtggtctgaaactctgaatggagcagcccgtggacaaagaggtcttacatagtgaacatttttacgcgtgttcctcggtgaataaattaaacaaagacgaacacttagatggactgactatgtaaattaggttaattaattacaaaaggtgcaccacttaagcacccctcatatgaaaacaaactatttacaatgtacatgtcgaccacttaagtcacttgtttacgaaaatgtgttttctcatatggttcatcttatatgccgttgtttcgctttatgattcgcctatatgggtatcttcaaaatgaatattttaagtagcgatagtcgattgtaattaaaagcgttgcttgttcgagtactagctagtggtaactaaggccaaagaaactcgatcaagctgaagttctttatgttttcaaagagaagatcgataaagaaaaaaaaaacagcaagtaaaggttagctccaaactgtgcactgcattgcccactggcgcatgcatgggaaggcacaccgctactaatatgatgatacctaggctgcatcatgttgaattttttttttgcaagacatctagttgctggattttgaggagtacggttgtgttcgcttttgctgaagataaagacaaacttatgatacgtaaaaatagaaaaacattatgatatgattgattgagttttaattattataattaaacatgagagaaaaatatatattattttaaagaaactttcatatataaagttttcttatgaagtacatcgtagataaaatttgtagcttaatcataaataaagggaccaagcacactacatgatagatttttctggacaccgcccccttttgttttcaagtggtcgtaagtggaaccgtacggaaaaataaggggagcggtgcggggctgtcgcccgcatgggaaaatcgattttcccgtgcgagcctcctaatccgaccgcatgggataatcatcattatcccgtgtggttgatttaagtggatcgcacggaaaaatcgattttcccgtgcggcctttttaagtgaaccgcacaggaaaatacctccctcttttccctcccatccacttcaaatttttcacatcctctctcttactttttttcttttattctccctcaactaccccccctctctctctaccttatctcttcccctcagtcaactccctccacaccttccactcctccccccttccctctgtcaggctggcaaggcggcgagccgggcgcggcgacggccgggcgaggcggcgggccggcgcggtggcgagccgggcgcggcggctagcgggagaggcggcgagcagggcgcggtgatcaccgagctggcgagtcagcgagccaggcgcggcgacggtcgggcgcaccggcggacctcctcatggtgatcgtccacgtcgtgcacgtcgaccgctgcctcccttcctatgcagcgacgagcaggtggggccccgcccagatctggcgggcaacggctattttcatgttttttttggttgttttttttcgtgcgggtggcataagacaaccgtacgggataatcaattatcccgtgcggtcgtcgggtcgcccgtatgtgaaaatgccgattttcctagacgccgggctacagttgggccggacaaccgtataaaacgtccgcataggaaaataggtattgtagtagtgaagtacgcacctctctaatgatctaatcctgtggtagctacacaacagatgttgcggtgtgtcgatcgcggctggcgatcgacttggtaacctcccctgcaggggcatgcagagccgggcacacatgtatacacaaccgcatacatgcacgtacgattgacgctgaggcatattatcggcgacaccctagctaccgccatgcatccatatcacgcatatatattgatcgactacgtatgcatagctaattaatagctagtctcgtcgccggcaaccgaactcatcatcacatcatatcgtcagctcagctgcgtatacatacgtacacgtacatctcatgacctattgatcgatcgagcgtagtagtacgtaggctgctacacactcctgctcctgcttgtacatatgcgtgtgtaccgtgtacgcggttgttgggtcaaaagccaagagcgacggcgcaacggcgaatcggcgatcctgcagccggcccgactggagtgctgatcagcttgtacatgatgtgtgcatgccggccgccgatcgatcgagggcaacgcgcaaaccaccacaggtcgacgcatccatatatatccatttgcacgcatgcacgcatgcacatgttcccatctgcctatatgtccatgcaaaaacttggacctcatcatatcgaagatcatatacagtcgtaaatctgaaatgctcattttctttttttgaccgtttgggaatagaaaacagggacatatcccgcgaaatccatcaaatgaaaaaaaattaactcgtaaaaaccagatctaaaattcactaaatttatgagaaaattactgcaaacagatttaggcataaactacattctcaccaaatctcagatgcaataacttacttgaaagtaaaatataaaaaaaatgagtgaatagtactatatgttcacgtaaaatttgtctttttaatttctgtaaaatgaagctgattttagatttgagatttggtatggatgaatttcatgcctatatctatctctagtaattttttttataatttttttatgaatttttagaaaactttcagacatggtttttcatggttttttaattatttaatggttttcacttgataattccccccccccccccagaaaacagtgatgtggtggtagaattataggtgcatcactccacccaccagggttcaaatcctgatgcccacgaatagctttcaaacggattttagtggagattaaggatgtgccactgatttccatctcttagatcatgtactagaagacacattcgtagaaatatgagtgtgttgttgcatgtatagtggtgtgtgtatgtgtgggtgtgcgtatgcgtctaccgtgtaattaaaaaaaaagaagaaaacagtcatttattagactctggcattcaatttagactctgcgataaaatatggatggatcagattgtgtgcaactgcgtgcattggatcttgattcgtgaaattgacactgcatgccctcacatttatgttgtcaaaacatatccaccttccgatggaatcgttcctagctatcgcggccgggctgttaatttagactgatcgacatcgatagactccaatctgaagctaaccacacacccaccagctaattaatccagattcgcctcctgattaatcaatcgatcgctcatcgatcctctcatggtcatgggcggcctgaccggtttgatttgatccctgaagcagaaagcctaaccaattactacaccacgtaggagtactcaccaactaacaccaataattagcacccaattagtaatcgtcccttcttttcacaaaactttattattgtagcacttacatttttatcaaaatactccctccgttccaaattaatttacatatagtttttttaagtttttcctaaatgatctacatatttgtgttcattcattagatctatttgttatttgtgcgttggagtaaatggatattgatgtatgcatccatgcacacaagcatttataactcacatacaatatcttgatttgctattggctagaaaatagtggggatggtgcatacattgagtttgttgctagagtaaatatagtatgagggcattcccaacccaatgactaggatggtgtccatagcattaaataagttgccacctaggaaaaaaaatgatgtggcaagtgaataaatgaggaaaaagaagaaaaccatgtcttgcatgagacatggtttctacacaacatccaagacattatgtgagataagtagcgttaaattgaagtatggaatagtggtgtttgcattggaagagtagtgtctagtactagtttcttgatgatgtggagtttatggaaaccatgtctagtgttatgggttgggactgccctgagagagttactccatccgtttcaaaatatagggcgcaactactttttaaaggtgtttcataatataaagcgtgcatgcattcatgacaattaataagcatctcttctctcctaaattattattttttaaatcatacactcataagatgtttaattctattgggtgcatgtattgtattggttggattgattcaaacaaagaagtgataataattgtttcttggtctttgggttaagagtggttgtgccttatattttagaatggatggagtattagcttttcttggtcttggtgtacctatgaaatatgtagatcaatttgatctaattttagagttgacattatacttttacccttcatcaataatgcagccatgcacaattgatattagacgttgagttgttaattaataaggggtgtgtttagtttcacgccaaaattagaagtttgttgaaattggaatgatgtgacggaaaagttggaagtttgtgtgtgtagagaagttttaatgtaatggataagttgaaagtttgaagaaaaattttggaactaaactcggccaatagttgatgatgttttaggaaataattggaatgcagttaaggaggataataacgatataattttgctcatctttttatttggtgtaaaatttcctaaaatgataaatgataatctaaaacggagggagtagtagctagcttgagaccactattttcttcaattagttaagtgaaaaatgcacatatgcacacgcatacacctatgattgtgtcctaatacatcttaaaattttgagaaatttcatggtcgttaagaaagtttgttgaggtagttaaattttacactaagatttttttttacctcaagatactacctaattatagctggaggtactaagttttacacttgaaaaatgtggtacatcttagtaccttttcaaggatataaaactaccctaaaattaaaaaaaaaaggtgtacatgagtaaatatccaaaatcactaattagattcaaatggaaagtgtcacctcatgtttgtaatatttaattatgagcgtcaggacttaaaccgaccattctaaattacagccagtaccatgctctttacttgtagctagtaaaaaataattaatcaggcgtttcccttcttttgcacttgaagtgtcctcatcttggctagcgaatccaaattatcaattcgcactgtacatatatatccccgcgattgctaccttgtaattgcacccctgtcctttgttaactattaacacttcgggctagtacattaatcagttgttagtacatcaattaagctaaaagctagctcttcgtagattataatatatattttgagccataaatgcagattttagctaggctttatttttaaatttgactcccttgcttaaaccacacacaatatctagtgccatctggctacgtagccaacaacgaacttgtttagtaaagcgccgcgtcccaaaatatgccggattattattatatatatatattgcaaaaagtagctaacctgatctgtgtcggcgactgtaacgcgtcaccaatagatttatttaagatcgtaatttggggcccagaaattacagtcaaaagtgtctgaagccactgtcagtagtggacactgatgccaagctagcatgcatgggagccgtagataagtgtacactagatttatttttaatcaaattaacattttaagtttaagcttgtatagttatctctaaccagctggctaattacaaaagtagtgcatttaagacactccagttcagcttttgttgttgtcacttttttttcttaaggagagtgtataagaataatattagggtgcgtgcgtagtgttgtatgttgagtgtatcccttttattcttaagaaatcctttcttgtgaagctaaaaatatcatcatgcaaatttctattcattatcttaaaaaagctacaagtaattattgcttaagtttgttttcagttcttgtttcccctacttgtgtccaaggtgctttatcttattcatagtataaattgtttatctcaatcttcatttaaacttgaattatttttattacgaatatgttgtaattaatccagatgtatagttccaatacttaaactgatggatttggatttaattagcaccaacccattgaactgaactgatgaatttggactaattggcaccaaccaaacgaactgatgaatttggatcaatcggcaccaaccagatgactcaaaaggtccagcatgtatacacctaaccaatgaaacagtttctcaaaaaaaaaagtacacattttggaagttgttaatttacccccagtatgtgtcggcactcggctgcaatcatacaagtcaccaagagattctccgatcctaattttggaaccaaatttgtgttcttcattgaggttctaacctcacctctctcgttttccgtatacacgtctgctaaactattgaacggtgtggttttttaaaaaaagttttttatacaaaagttagtgtaaaagatcatattaatttatttttaaatcttttaagctactgcttaattaatcatgtgttaattcgtcactccattttgcatgtgaacgaaggtgttcccaaccccctccagaagaacacagagcaactcaaactgactgactctgctcttccttcttttctttctttcttttttttccctttctttttgcagagcaccggtactctgccttttgggacacgtagcgaaacttcccaacattagcgctaatcatctttatttatttgctaattatcattgttaacgtagtagattagccacagcccacaagccttcgtccccacccgacagcgacgtcaccaaaccgcgccaccaccaccaccacccgccgccggagcagcgcctcctcctcctcctcgcgccagtataaatccggcctccccctcgccgtgccactcactcatccaccacccaaagacaaagcaagcaagtacagtagccatggcgaagcatctcgcgctgtccgtggccgccgcggtggccgtgtcgtggctggcggcgtcgtcggcggcggcggcggggttctacgagaagttcgacgtggtgggcgccggcgaccacgtgagggtggtgagcgacgacgggaagacgcagcaggtggcgctgacgctggaccggagctccgggtccgggttcacctccaaggacacctacctgttcggcgagttcagcgtccagatgaagctcgtcggcggcaactccgccggcaccgtcacctccttctacctctcctccggcgagggcgacggccacgacgagatcgacatcgagttcatgggcaacctcagcggcaacccctacgtcatgaacaccaacgtctgggctaatggcgacggcaagaaggagcaccagttctacctctggttcgaccccaccgccgacttccacacctacaagatcatctggaatccccaaaacatcatgtacgcatcacaaaaacgaactcaataatcctctcttcgtcaatcaaacaatcatcgtgttaatttgctgaattacgattacttccgctatgatacagattccaggtggacgacgtgccggtgaggacgttcaagaagtacgacgacctggcgtacccgcagagcaagccgatgaggctgcacgcgacgctgtgggacggcagctactgggcgacgaggcacggcgacgtcaagatcgactggagcggcgcgccgttcgtggtgtcgtaccgcgggtacagcaccaacgcgtgcgtcaacaacaatcccgccggcgggtggtcgtcgtcgtggtgccccgagggcacgtcggcgtggatccaccgcgagctcgacggcgccgagctcggcaccgtcgcgtgggccgagcgcaactacatgtcctacaactactgcgccgacggctggcgcttcccccagggcttccccgccgagtgctaccgcaagtgattttgaactcgatcgattcaaatcctcctccattgatgagttcttggcaatgatttgtaattgcttcttgttcttgttttcgtcttcgtcttcgtcttcttcttcttgatccatgtacattttgccatccattcgttctccatttgttacagttacagagacaggttgatggtgaattactattgccgccaatttttttcttcttcttgttactcgatccaattattactactagagttcatcttgcacagttgggcggtgtgaaaaactgaaaaagaaaagggtgtcaaatttgttgctgatgctgagcaagtgagcacatgcttatgctctcaggtatgaacaaaataaacagtaaaattatctgcagctgtttgacccgtttcggattccgcacgctacatgttcgtccgtttgacgcggtttggtaggatgctttgattattaactcgatgattagcacaagatgattaatttagttagtgatgaatctaacgcccaacggcgaggtttggatgtggtgcagactgcagtgcagggaagcagacaagcgggtgacaactgtgtgcttcgctgttcttgggtatcagatttcagtcgtacacgctgaatttattgagcacaacagctcagcctcagctggtaactatccgccatgttcttattggcgtacgcgttggttggttgctgcacgcccaatccaatgatgctgtcaactactggcgtctcactgtaattaagtataggagagtaagttggtaaaagtaaaatcttgcggttaatctacaagtactaccctgataaggaatttgaaatttgaatgaaattgtcccccctggctggacggcgagaacggaatactctgctaagtaaatgcaggatgtttttttttaaaaaatctctgttagaattcgtaccaaaacagtgcccaaattcttgcaagttcagtccagttggcctctcatcactaggagtactaaacagaaacttttttccgataatgaaattttatccgacagtgcaaactcttcatcacttggagtgaacttcttttatatgagcggctcaggttcttcatcaggactgaacttttaccgataatgaaatttaatccgattgttcaggccctttgtcacttgaatagttgaacttagtgaatgtctactactactaaccgataatgtcaaatcatgtcaactatcactccactttttgcccttcttttccacttcaaatggtacaaaaaaaccatccgaagaaatgccactggctgaaagcaacagccactagtttctacagcatcactagccatggcctccagttgacaaaaacccttttattcctgcactgaagcacaatgccaaatcttcaatgatgaaagccagggattacgatcaatcttgtgctgaataaagctgctgagtattttgtgctggtggtggtggacatgaagtagaagaggcaagaacaatgaataatggctgctgctacttcttccactagctgtactgcttttcagctcagcaaattccagaattgcttgtccgggatggccttgtgggacaggaactgggaataaaggttgcctgccacttcgggggtttggcctacacaactcaacatgtttaacacggttgtgatgatgtgattctaatggcctaattggtagtactaatggtgcttggaagttggaatcgaccttttgtggggtcattttgttggataactaataaagtgttcttcttagaggaaaaaaaggggaaaaaaaaagaaaaacaagaggaggataagtgttgctatggaatgaagcaagaggatgaatatagtactccatccgttccaaaatataaggcacaaccaccctcaacccaaaaaccaagaaaccattattatcatctcctagtttggatcaccctaataaatataatgcatgcaaacagtagaattagagatcttgagagtggaggatttaaaaaagtgataatttaatggagaagatgtcctagttaagtgtatgcatgcattcatgccttatattatgtaacatcaaaaaaaagtagttgtgacttatattatgtaacggagagagtactagtacgtccaaataatttggaatctcatgctaagccttttaactcatgcacttcaattcttttccctgcacagaaaagaagccagtgtatgtgttttaagatctctccttcttcttcttcttttttttcatattttcgttttttgaagcaaatattcttatacggtagatgaaagaagaaccacttacccaaaagataatggctcaaaaatatattttgcataaacgtacaaagatgattcacatacacaaatcaacaagtgtatgtgtatgtctatgttctagtacacatacaaaatatattttgcataaacgtacaaaagatgattcgtatacacaaatcaacaagtgtaagtgtatgttcttcttagactctaagacttagagagaaaaatggaaaaaaaagaaaaaagaaaaacaagaggaggataagtgttgctatggaatgaagcaagaggatgaatgatagtactagtaggtcaaaataatttggaatctcatgctaagccttttaactcatgcacttcaattcttattccctgcacagaaaagaagccagtgtatgtgttttaagatctctccttcttctttttttttcatatttttgttttttgaagcaaatattcttatgcggcagatgaaaaaagaaccacttacccaaaagataatggctataaaatatattttgcacaaacgtacaaaaaatgatgcacatacacaaatcaacaacacagaatattctatgtggaatatgagagactatactttgagaacaactaaaacatgcaaaaatcttaaaacatatagacaaatttctgtactgtgcaaggaagctatacaaattttcttcacacttatagaaaagcagtaaaagagaaaattagttgtcgaacccttctgctgtagcagtatgttggttttttttttaaaaaaaagaaaatagattatccaataacacaggacagactcggtcatgtatctgttggaattaatagaggggccttagcccattcaaagattaattatttgaaaaatcacaaaagcccacctcatgaaatagcattaatggggagtttaataccaccttacttattctaggagaaggagacctccttacaagggaggatgctctcctagcaacttgaagcatgtgaggtggagagaagagggggaacacgcgcgcgctcgctcgcctggcatggcatggcggcgcgcgtgcacgacgtacgcgtcgaatggtccgccaaaattgcccttgcgcaaatgcagcctctttttgcagttttgttttgctgcaggaaattcggatttgtttgttttggaaacactccgaatactccagtgcgtgaaacggcgctccttttgcagttttgttttgctgcgggaaattcggatttgtttgttttggaaacactccgaatactccggtgcgtgaaacggcgtgaagtccggataagttacgcgcgacttatccggttcggttacgcggagcagagatcgtataggtgtcctgatatctcccgctgtctccatgcaacacacgcgaaatcaatatagggtttgcctcttcctctgtattgcaccgtcactcgtagtctactccatcccgctcgtcggcatgcaccggcgatcgggagagtagatctccggaaccttcaccttcgatgtcctgcattgggagaaggcggcaataaggtttttgggaagcgctttgcgcgaccgctctctattcgaccacaacggctcgtcttcctctttgcacgcgtgctacgcgccgtcatcaatgtccgcaaccacgagtacttcctactgagcaaccggtcttctggtacccttggtacgtgttcagtatgttgcgcatatttgatctgttaatgctttactgtctaatatacatgtgtagatctcatgatgcgtttatactagtttacatatgcaattttatgatttatttatgaaataaattaaatcattatgtgcttataaattcaacagtatggttcgacaagtggtattagcaaatgtgtgtgtgatgtgtgtgtagtggacgtgtgtaataaataaacactagtaatatgcccgtgctaacgctacgatgatatttaacaatgtattgtaacgcattttcaagaaaattgttatttgacaaatgaaaaatattgtcatactataattttcaaaataattatatacttagattcttatctccatatactgaatgtcaaccgacaagacattatctgtttaaaatgtaatcccaaacgatcacaattaagaaatcacatctcattttttttcagccagcaaacattgcccctatcaataaattgcatgatccacactttttatcagtaaaatcaaatacagaaatcacaaatgccagcctaggataccctgatacggatacgctccgatacatatcccgtacgtagcctctattttcccgattttcagaaaaaagaaataattagggatacttctctgatacgcacggatacaggatacagtacgatctaatcctagcttctcatgggataccaatcctcgctgcgtccatctttttctacccaacggcgccgtcgttctgaagctaggcaaaggtagagccaccactccgcaacgcggggcctactaccgctgccgcacgccgccgagcgcagcatcgtcgccatgccccgtggagccaccgccgcacgccgcacgccgcacgccccctagcttagcgcgcgcagcaccaccgctgctccgggtcagggattgcttcattcaagtgaggtctcgcgtattgatggttcagtgcatcctggatcttgatgttgtgattttggacaccgcaaagtagactacaaagccataagtgacttttgaagatccagtactactgcagtactgttggtctggtcaaagctatacgtgcgtatgagagagagagaggggaagagtgagacagagaagaggaatagtggaagagaatatgacatgtgggtcccacttttttttttataattagaatgctgacaagactgccacgtgtacgccacgtagaccaaaaccaccgtggattggatcgaggggggtaattcatccggtttgcatagttgggggtgaagaatgtccggttttgtggtttaggggggtaattcggacgaccgcgatagttcggggggctaattcgtactttttcctcaattatttgcatgttcattattttggcctcaatcaattctcccattttctttgaggagtgcattatttttcttaatttattatgtatatatagacgtatcctcgtatccatgtttttcaaaataagccgtatcccggtatccccgtatcgcgtatccgtatcctcgtatcggggtaacatagatgccagcaacacttctgcaggaagacaagagcatgtgcaaccagttccattggcaatggaaaagaagcttcttgtctgtatcagaagatcattttgttttagcaagaagaaacttgttgatcatcaaggactttagtattaactagtgagcgtgcacgtgcaaggcacgtttttcaccatttatgatcttttgaagctgaagttatcaattgtgtaaaattagaatcttaagatccatctaacatatgttgtttgttcccatctaaaatgttaatgtaaaaaatagaatgtgtcatttccatctcaatttcaaaatagaaaatataaaataaatactgagctctttttacactttcatagaaatagaataatttgtagaagtatctttctttccatttccgtttactgtccaacattttcacatattgatgaatcattgaatgataaccggaaaccagttcattattgaaaggctaaacttcattatagtagctacaatagcagactataagtcagctataaacatattttaagcaggtaaaagaggagagataaaagcagcaggctacaatgaaaggctaaacttcacgtcattagagtagctacaatagcgggctacaatgaaagactaaactttattagagtagctacaatagcagactataagtcagctataaacatattttaagtagataaaagaggagagataaaaacacatctctcctcttttatctgcttaaaatatgtttatagctgacttaattgaatgtttcaataattgaatgtttatagctggcattaattgaatgtttcatgaacataaatctaacattattcattaataattcgttccattgtcaatgacataaaagatatgatattcatagaattttggctccgttggaaaataataaacattatttctttagttaaccaaacatagttagcacacaacatgtcaattatcaccactaatggtttgttcctatgaaaaaaattgagagttagatatctttttgactggcggaagagtaccggcaattctttagttttcccgacagacaatgaattactggcagacaaactattcctggcaaaagatattagtcctggcagattgtctccctgtttagcatgcaattagacactaagaaccagctttttaaaaaaaaacaaaatataatatgttgcatcgaatgtaccattgccaagtgcaccaattaaattaatgatcatgaaacaaatacatcttttttacacaattaatttactgttgatgactttatccttcacaaaatgcatctgattacaatctaagaaatacaggtcagatgcccgcaccacaaacacccaatctagtctagagtggcacctgcaaacacaaaatagctacttttgatggctttgcatgtacaaaagacgatttaccatccttccagtagatttctccatccaaagcaagctattctacatgcagttcttcaacaaaatgtgaaacattgccagaattggttcagctatcagccacatcccacctagaaaagatgttatacataataagcacaagaggaatgttgcatgatcattttgtaatactgaaagtaatgcaactatgcataaggaaaaggggatttttttttgaacagtgtagctttcttgtggtttgcagctcaaagataattgcaatagtagcattgatcagatagctaaagttgcacatcagatagcccttacaatatgctaaagttgttacctaaaggtaataagtaccgtatgaaaatcctagatggtcaccacacatgcattctaaaactattggctatattaccatcatttagagtacatattatatcaggtagggatctgattgttagaagtcaaaactcaagcataattcttagcattttttttattatggcatctttataggttgcttgttgttagggagatatataacaagccaatcctgggagaatgatgtggaagtatgctaggcaaatttcagagatatgtgcatagctaactcagattctgtaatcaccatgcaggccttgatggtaaaaattgcaaccaaccgaaatgctagtgttatatatctgatcaaaccgaaatacaaccacacatgcaaccaaattgcacgcaagttactataacagaacttgtattacctgtacaagttactatatatggcactgacaagttcaaggggctttatggcactggcctgaaaatagaagggggttactggattgataattatgtaaaaattacaaaccttaatacaaagtaaggagcttattagttggaatacacataaggcttccataagctgacctgaaaatctgccaatgccagattaatgatgttcagtgcagtttatagctagcttgcatgctggaaaattaaatatcccagatgcatgttttcgtgattgaacctgaaataaaacattgtagaatggttatccacggctagcatcacaattaggatatgtatgtatatatggcaggacatacaaaggagcacatgttcacaaaaaaaatcccattatacttagtcctgtgtttaattatcgaattgagagggaaatcaactgtctttaaccacaatatcaaaaaatttagtcaagcatcaccaacttatcattgtcaaatctcaaagcagatccattcatcaggattatttgcaaattaacaaactaataacgaccccctactccctctaccccatcaaggtattatctccatgtaagttacctgacctagcatccatagttataataaagtttcataaatgtctccatatttctgttaaatatctcagattttacagctaagaacacgtacagatgttcttttcagaatacctcaggatcttaagctaggcacaaacaaaagttttatcacccataatttttagaaatgcgttatcacccacattttttagaaatgtgaaaagaagtgcttaaacaaaaaaagtaagcacacagactatagctaatggtttgctgcatggatccactcaatccgttgcaaaattgcttatacccaaaattctcatattatacctcttatgaaactgaggaaaagaaagaagaaaaagaaaggaagatagaaaaaaatgcagagctactaaaagcatttcatctttatctttacagagaaaggaagatagaaaaaaaaatacagagctactaaaagctaaataaatagtttattggataaaatgagaagataacttgcaagctctgcaccacctttcaaacatattcacatgctttattgaaaatactgacatatacttattttaggtatatggcctccctcaagtacgaacatattgaaaccattgcttgctaactgtagttatgaataagaagctaaaaaacctgtggtcagcaggttgacaaatgtatataaatttagtcatgggatgcaatatactcccactctggtgagcatgcatgcccatagaaaaatccagaaaatagtatgcagcctgttgttttatctgaaacatgatgaaaaaataaatacaaaaatgacttgtaaatatcaatgtgcgcatacccaaaggtactcttatacaaaatatattgtaggcgcaatcacatcgaaataaaatgaagctcttacctggaaattatggcttcaatttgcttcttgaattagttggccatctcaagaaaattgctggaaacaatccattgtatcaatacatcacctatctgttagcatgaccctgattcagaattatataattgagctgctcataaaattgcaagctaaaccaccagttaaggttgattcaggtgtaaacaggattcagatttgtttaaatgcataatttgcacttttgttcgaaaacatttacaccgtaacatggttatgccatgcaagtcaatcaccttctcctcaaacacattgtgtttcaccattagcggtggtgcagttgctccatctctctccatagatccacctggaacaacccacagaaatcaagatcagggcaccaccacagaatcatgagttcatatgacgggaagaaattacagaaaaaaatttgaggatattacatggaagagaaagcgactgaattttcctgtcaagaaaaactcctaccagcttaactgcgccacttttctgttatctgagcaaacgcgatggaagacccttctattccgctgaagctagatattccaccaggttgtgatctctttctctctttctttcaatctttggcttgatacgagcgaaaacaaagacaccaatcagacatatattatactcgtattgcataggggataaaaccaaacttctgcaggcacaaatttactcccaaacattgacagtgaaatagcaatcttttactaaatttactcccaaacattgtgatttcatagggtccattgcacgcacatggtaatctgtgcagccactatcgatctattaaaaaaaatcctaagttaattttaatttttgagaggcaccaaacatagagaataacttgggaggagaaggtaattggctatggaacagaggaattccacttaccgctacttcatcgtcaaattccggtcgctggccttcgtcagccattaaaatctttgccttttcgcccacagttgtccggatggaactcaacatagattcacatttgtcttacacaggagcagcaagggagacgtgatccggatgagtttgcggagggggcagaggagtcgcggcggacacaagatgtcgagggatcgacggcggccggactgcgggtaatcgacggcgaggtgtggtggagacgcgagggcgatgcggctcgatggagaccagacggcgacggatcgacggcgcccagatagtggggatccagccagcgaggcagcgagggcgaggcaaaggctagggtttacgggatcggggaccctgcttgtgggctgcggctgaggtgggcaggcgtgacgggacgtgaggagaggtggagagggcggcgcgggagaggagcgggcggagggaagcggcggtgcggcatggggagaacgacggtgcaggcggagggaatcggcggcgcaggcgtgcggggccaggcggaggttagcggcgatgcaaacgtgcgggagcggatggattttcgtttttgttttcttttttgtgcgcggtttttcgggtgtagagggtgaggggttggtcccacacgatagtggaaccgaaggattggaggattggggatgaactcgtactttttatattagtatagataaataaactaccctcaaaactagaattgtgacatagaagaccaagactccctttctagtcagtccccagcaggtacccacggcaatggttcttccagccgttcttgttttcctagtcgaagacttattattttgttccttccaaattacataagcaatcaggaccgcaactgtattgaagcctctttgttcataaccttggaatccttttcacacacctgcaactcaaatgtgacaacaatgaataagtaaattaagctagaggatgcattgcgacaaaggctaatcaattcaatcaaagtcaaaattttattgtaacaattacaagaaaagtttgctatctttgaggtaagtagcaaagaatacaattttaagtattccaccaatgttggtccactcaaaataccgtggagttaaacaggttatacaacaaaacagcagttcagaaaaaaaatgcatttagttacctccaaatatccatatgccaacttcatctattacacctagccaaccatcacaacacacgagctatagatatgcattttcaccacttgtctgcaccttaagattaataaagatgaccttgtcaaaaggatagaaatatgaggtttatcttaatattgccacatctaacaaaacaacacatggaaggcaattatctgagttaatgcatcccaatagaaatattaagaaacatgttctttccaatacccgtttaaggtatcggcaatcccttttttacattcacatcaagggaccaagcagctggtagatcagatagaaggctataactatacacatgctttgttgataactgtaatggagatgtcacggccaaagttcagaaaataggactatctctagatttgtcaggttcagataagaagttggcaatgtgggcggcgattagacgacttgacttaaagggaatccaatggctcacagcgtaaaggatgagaacgatggttcatgtgagacatgggttttctccaggctgtcccgttgacatcatgtttttatcgggatgtgtttaacccgttcttaatttcagaacttttctttcattacacttgattgtaatcaactaattaaacccggcctatatatatatcatgggagttgggtggaatgtgaactaagaaaatcatattcctagtccctttagtagtacaatagccagcttagaacactatgatttatccccaattctcttaattccaaatctgagcacaagctgataggagacctacaacagcatggtggctcaaagccagcggcagtgtgggaactcgagcccatgaagtcctaacttcagtatgcacagatcaattagatacggaaattcatgactgcatttaaaatggaacggaaggagtaaatgaaattttaacgtaacaaacgaaattttctccaccgcaacaatggttaactgaatgaagaacggataaacttataaggtcatgagatactgcggtaggcatccgagatactccctccctccgtcccaaaataaaccaacctcgtacggaatgtgacacatcctagtatatccagattcgtagtactatgatgtgccaaatcttgtataagattaatttattttgggactaagggagtaggcgcactgagatgaaacatgttctatctaaatgaccaaacgacaagaaccgtatccgagagtgacgtggtttcaattactaagcctccagtccacatgatgttgagtcatcccagccctttttacagcacatgatagttttttttctttctttttgagaggacaacatgataggtacttgtgttttatcccaaccaagaaaaggtctaatgcatattcgcttcctgcgtttctcctgaccatatgtatatctctaaccatttctggaagctatcttgtggagtgggaaataatatggaaaaaattcgtcctcacaatgccttgcaggattgaggccgatggaagaataagcagcatggtctaggatggtttctcatctcgttggcttcagttttattgattgagatgctgaagtcagattcataaaccatcactcattggtatacagagaataacaatgcaatcaccatcacaaatcacaaccacaactgcgaagctcattacagcagcatgagcaaattgcagtttcatactttcatgccagtagttctacttttttttttctaggttttgcaatgagcttgtacaaataattggcccatattttatacggatctgcctgatcctattattatcaactttgcatcatttgctacaaattgtgccatacattatggatctatccatatagcagtatatatttgtttcaaaatgtgacagtaatccacttcttttataggaaaaagagtttcttctggtcctcttggcgcagggttgagaactttaatgaatggtccaaaagaaggtacaatcaaatatggcacactgaattctcattgagaagcagttatgcagggttgagaactttaatgaatggtccaaaagaaggtacaatcaaatatggctcactgaattctcattgagaagcagttatcagaatgtgagtaacatacatgctatgtcaacatcttggaaggatcacaattataaagtatctatactgcattaaaagaacttgagtataccataacataaaaaggattatttcacatgacaatctcaggtttcaggatgcttgatttgatctctttgtgcgggagaataacaccgccgttggtatagacctcatcacctacatgtacgtcctctcctaggatagtcatattttctatccgtgcccattgtccaacagttgagtgccatccaataatgctgtttgatatgcaagcatgcttcttaatacgcacgccacgcatcaccgtgcaacgggaaagcctcacaccatcctccacgacgcatccaggaccaatagcaacatcaggaccaatcagacagccttcgccaatcttcgcactctcgtgaactagcacattcccaacaatgtgtgctccagtggctaacctgttggctgatctcttcctaagtgaatccagataaaggcgcaagcctgtaatgtaatcccttggttggccaacatccatccaaaaacctggaaggaccatagcaaagagctttgcatcagctgagattcgaggaaagacctctttctcaattgaagttggctttagctcgatgcggtccaggacagacgggttcaacaagtaaattcctgcattgatcttgttgcctacaaatatttttggtttctcaacaaatttttccaccattccagtggcctcctccataaccacaacaccatattttgatggttcgtccacctacattgaaataatagtcagtatacacaatcaacgagtttataatccaagaaagtggtcaaagaaaggatctaccttggtgaccataattgttgcctcaccaccatggttcttgtgaaattttatgagctcagcaaaagggtattcacttatgacgtcactgttgaggacaaagaatggctcaccagatccatccacaagcttgtcccttgctagagcaagagggccagcagttcccaagggctcagtctcttgggaacacgtgattgtgatgccaagcttatcctcaaagtccttcaggaaattgagcattacctaaaagacggatacagaacaaaccaattagaatgcgaagatagttatacttataccatgagacaacagtaaaatattatctcctttttacctccgggcggtagttgatggctaaaacaacttctgttactccaacttctttcaaggcctcaatctgcataaaccagaaaacttttaattcagagctcattactctcctcaatcctcatgctcatgtttgctggagccaacattttggatataaatgaagtactcttgataactgattggaattttcaaggacagaaaatttggtgtgataccaaaagagttctccaaaatcatgtaaccaaattgataaggaaagaaacagttgaatagtaaaaaggtgcattcaatcacatgcaaatgccacctatcatggatgtttagttgttacaccatgtttatgtgggggttataaacaaatcaaatagtattaatgttctttgaccagtttaacaccctctccctcctttcatggagaggccagtgtcagtgttggaatgttggtaaagaatactgtactaattaacttgtgcccaattcatcgattggcattgcaaattaagtgctcttattactccatcagagtactagcgaaaccacatattacctgatgcagaatcatgggcttgttcgcgaaatcaacaagaggctttgggaaactgagcgttaaaggccgaaggcgagtgccgaagcctccaaccagaatgagcgccttcatggtgaatcgcctcctgttcttccctccctaatccctactccggcggagggatcctcaagcaaggcttgggaaggggaacctgccattgcaacagacaaaatcaaatgtgaaactaggttggagcatcaataaaaaagaaagaaagatttcgatttgattgctcgcggtcgtggcaaagctccagtgagctgctttcgtaccaatagaagggatcagcctggaagatctctcttccttctccacgaccagccccattggaggtaggtagcacagctgcggtcgaaggaggagcctttgtgctgtgctagattgggaatcgagaattggatgggactttatagaggcgaagtggagaggcgacgcgaggaggggaagggggcccacagtagagatgcggttgtgtacttgtgtgtgtctcgctctcgcgaaagaaaattcgcgaccacaggtgacacgtgttccatcacaaatctcaaagcaaatcccatcatctccacaatcttgtgtttggtttatgggtaaggtatgatacgttaaactcatcaagttattggatatctatatatctatatagaaacgacggacgaagcggactaatggaagccttacgaatttttttattagatatagatatctatatacctaattaaaaaataagtaaggcttccggttaatcttttcgtccgtcattaagagtgggcccacacgataattcgtcgctaatccatgatccgaaagcgtggccacgatctcttacgcctgcaaataaaggagaaaagaaaaataaaaagagaaaaccttgtttgtggagcagcccatccaaagcagcccggattggattagtgacgaggcagcccacccaaagcagcagcaggccggcccagatagcagccgcagcccaccagcgagcccacagagcggaggagaagcagcccaccagcccagcacagtactgcacaacactgtagcaaccgaacacgaataaagtttggactcacgccaagcaggaatcggataataaaagaagcgattttattacttaaaacatgtagtcaccaatgtagtcaccaataaaatgaattatttaccgacaaaataaattattttttaaaataaaaataatcacatgtgtctttctttttttaaaaaaagaagtaatcaccaacaaaatgaatcgtgtttacatttggatttttttcccctcatcaattgctcattcgccataggacacctaatcacatcacttttttttccattcattatataatttcttctattatttagagtgaaagttattctgcgatataccacatttttttctttccttctaattatttaagtgaaaggttatgcaattggagtgcaatgaggttgatctgatagctagcaaaaaattatttcttgtattatggctactctttacaatatgaaaaaaatgcttatcaatatcgagtaccaaaaaaataacaaagtactgcaattgactcataataatacatgacaaaaaagtaaatattttttgtggtttcaaactttagtatccatgtcagtgcatttagagcagcaaataattatatcatgttagcgtcttatttgcactagaaagattcgattcgactataaagacctcaatttacctggtggttttatgctcccacacactaattactatttctgtcttcacccaatgcaacgcatgggcattttgctagtagatatagatatagatatagattagatatagatagatatctacctacctatattataattaataatataataaaaatataaatctatcatatacctacccctaattaaaaaattcagtccgcttcgtctgtcatctgtatgttttgagtccaagtcggtcttcaaggaaaaaaaaatccccgtgctagatacccaaattaatcaatcaaccaaaaacagcacgaaaataccaaatttaacctagatatcatgaatttgatcccaagaaatctaatcccccaattcgatccatctgagccaagacacaatacataaacgatagaaaatgaatcacgaaatcacaaatccaaaatcatccagggaaaattaactcacaaaaactaaatcagcgacgccactggtcatgggaggcgaggacgccgcttctacgaggagggtgccgccgccgaggctgtcgataccgtccgttgtgttgtggcggagaagagggtgaggacgccgccgaggagccagggggagggcaccgcggctgagacgccggctgccaagggaagggaagggcgccctgggtgagtggtaggggaagcgacgtcctcggtggggggagagggagggcgcgctggctgaagggtaggggaagcggcgttgccggtgggggaggagggggccggagagagggactgagggagaggaattaacgcgccgcggagagaggagagaaggtggggaaggaaagagataataaggtcgatggggccaagcattgagacgccgctctcttctctagtctagtctcatcccaaacacttgatttcctctaaagcgacacatgtcccccctccttctctcctaccatgtggttcccaattctttatttttttttctcccggtgagatgcagggtttcccaaaccaccagagccggggttaccgtgccccggcggtaagcacggttaccacacggtaaccgtggtaactgtgaaaaaccgtacaaaaccgtgcaaaatttatcaaaaatttaaattattttttaaatttatttaaatttaaggaggttaccgcggtatttatattaccgtatccccgcggtaagcccggttaccggcggtaagggaaaccctggtgagatgttgagcttgggtcggaccatccacgcggtgttgagcgccattgagctcatagtggcagccgggaattggagtcaaggcatcaagctaagccctaccaactttttcttcaaacttccaacttttccatcacatcaaaactttcctacacacataaactttcaacttttttcttcaaactttcaattttaagttaaacttccaattttcgcatggaacacaccgtgctgccgtcctactgaatgaaagataaatcacgtgcatgcgttatctttttttttcgaacagtcagaccgttgccgacgttttatataaagaagaatgtgtctcattttaagaagaaaacgagacaaaaccttacaatgcgcagttaattaggaaaaactggacgaaaaccacaacactctaacataagctaccaacaccgcgaaaaaagaaagaatggcgaagcccaaaacagccatcgataaagagcttgttgaaagcgacacaaaggcttcgacttcgcgtggcaagtgttatcgttgccgagcttgtcacctagcgacacagcagcttcgactccacagctatcacatcatcgttaccaaaggcatcgcagaaaacgagcaagacaccgactgtccactttgaacatcaacccaagccacttgagcactactacttgtacacagctaacaccaacctccctcgaaaacttcaacgtgttatcgttgtcaagcttcatcgcaccccgataaagtagctccgacttcacctagaagaaaacggaga

SEQ ID NO: 4918 - DNA, 43026 bp, Oryza sativa
tgtcacatccccttctaggttgagttttttttagatggaggaagtaaactataagtaaaaaaaacaattgtaattacctggagtatatagcagtgctctatgattggaatgttgcacaagcttaactgccacacttcctcccaaacttgatattaaccacagccaaattaattagggcaagaagctaggtcgcttagataaaaagaatataattttgggatgtggtatgattttcgtcaaggaatttttagggatgtagaaatggagaacgaaccattagttactgacatcacaaatctactagtaactcttataactctatatattaaaagtatgtatcttttttggcagttggtacaccaaaagcaagctttatttgtccatttgggttagtgatgaaatggatgagcaatgaggtagtacatgttctctcaaaaaaaaaaggaaaaaaaatgggaagacataactaagcatttgaaagaagagaaatgacattctttcttttccccttcacatctgcccttcaattctcagaggagaaagatgatagggaaacatcagtcattgtcactgttgcaacctctgatcaccactttgtgatgtagaaatctccactagtgacagctaatgatttgcctctctcagggatacttaatgaggaaatatcaaacacaagagtaaaaactttcactggctggctccaaggtttaaaaaaaaaagagattagtcttgccctctctgtctcaagatgctatttaggctgtgtttaggagtaaggattgggaacccttctctcctgcacataaaacaaagcatgcattagcgcatgattaattgagtgttaactaaaataaactttaaaaaattaatatgatattttaaagcaacttttctataaaaaaaacttttataaaaacacaccgttcagtactttggaaagtatatcaaaaaaaaatgagggaggtgagttaggaaaagagagggaagaatacaaccttaggaccactttgaaacaccgttcagaaaaccgccacaaatattttataaaaaagtttaagcactccaaaaagcgaaatatggataccagaatttgaaccatatcatcatcgaaaaaggataataccagattatgctaccagagtcctggtgactgtgaaaggtcactgcctcactggtgtcaacatccgttgtcgtgttaggtcaaactcgaaggagcctctgtgctccttgcaaacattgtgagtttttactggacatccgccaatcatccacttgcaaacatttgagcttttataatgcttctattttatatccctccaaaaattcatcacccaagtagattaaggtttagagttacttttggtaagttcatctcatcacaaaaacacttgtatgcaaacataatcttgctctgactccgagtgagatattgtacttccgtggtcagtaaaaactcaaaactggggcacacgcttgcattagaatatgacaaaagttaggctgatcatatcacatcaaaatatgaacttaataaacacgagcaggtaagaggccatcaggctcaagctcaactcacattcagaataacacaagccattttcatgagcaagtatttgcaagaatgtaacaattctcagataaatgaacagatgtttacacacgaaaacaaaataatcacatgttactgagattttacagtgttggcactctgctgtacatacttctcgttccctcatgcccattagaaaaaaaaataaaaaaggacacaccagggtagattaatacaaaactgcaagcctcaaaaccaaacctgtgtgaccctcgaaccagtactgaacgcttggtaaaatgggagatggtaagagggcacacctatgaatcgaaagaataagccgaaactagcaaaggcaaactcagactaaggaaaaatggaggactcatcccacacaatgtgaaaatagacacattgcacaacgaccatggctgccaagggctattcaggcatatacaagttgacttgtacgatcaaacagtgctttagctggaggttgaatgaggaaattttaagcatgattcaagctaaaaaagttggagagcgatcttcattctattttgcttccactttggaagcttgctgaatgcttcctttgtcattccaaacttgtctttgaattcagccgaagataagtaggtctgcatttagttcaaaatggggtatgtggtcattacctggtctgaggataagtaatacgaagtagctaagtatcgaaaagatcatatattcacctctcgcctggtaacgtcaatttcagtgacaggatcagcagctgtagttatcaggcgatcatatgggtatactgggagcccctcgtcatcttctggttcattttcttttacatcttcattaatagtgagagattcaactctactggtcatggtgttaatgccttcttttgcatcttcctcttgctttggcttctccaactcagatccatcttaatttgtacagaattttacaaacaacaagaaatcattaacccttcctctgtttaaaggcaattttatgttccaagataagtgtatcacataccttttactgatttagggcgatcaaaagaaccagtgagagaagcagttgcagatgacttagacggtgcacttgatgagtcaggtgtggcagattttgggtaaagttttttaactacgggtggaggggtggaaagatttctgctgtttgcactttcaaagttagcagccaatgcagtgaatgccggagatcttcccctaacacggacacgttcagggctgaaagacatactcctcgagcgctgagatttgtcttgtacagtgcttctccctgaatatgttggtgttcgtcgctttggtttctggtaacaagttagaaagattgtaaatgcaaaggttccacatccacagataggtctgctaactacagaaaaacacttacagaccacagacttacaactagaaatgttataaataggtggttccatgattgtacacacaaaagataaacagaacactgttgtctagcagaaaacgagtttgcaacaaagaataccatatatggttatttcgacatggcagactatcataagacaactaaagtttgtacatatcttacatccaaagcaggagaacctccaccctttacaatggaaagcttcctctggtatgaattgccatgcatctacaagagaaacaagagtgagtacaacacattgaagatgaaaacaaggagcattatggtgcttctgccaaaaggaacacaaactacagttgttcatcttatgaatattctacttacaagtgactttgctgagtcccaagtgaagaaccttgtgaaaaatgtaggctcacttccttccatgataacaaaaattggtgtgtcgctggatagattttccatcaggaaatcaagcttaacgaatttctgatgcagtattaaaaataatagtcagtgaccaaaagaaaaggagatgccacctaaagtgcttcagcatggaaaaacaaatcattacctcaccaatgtccagagcttgtaatcgcactttgacatctacctgctggccaacccaaacaaatatatctgagtgacagtccagaatgaatacatcttctgtcatcagatcatcttgagtgaagtggtatatttctttgatctgctcaaatagatttcacagctcagtcagtgttaaatgcaaaaacagagaatatgtgcagacctgtatatgtcacaattttactttattacctttaaattgccttcatggaccccaataggtgttgttggcagaatagaagagcagatatatatcagaaaactcgaagagcaatgtgaactgaataaattataatagaatggtcaattcatggttacctttgggtaggatacatgagaaaagatggggatcactttcatttgcccttcctatcttttgacttggatactcagatttgcctccaagtaagctccaaaattgatctgtttctgacccttctttctgcgatctggactgcgaatttggctgtgatgaagaaagcaaagcacgaacaattctattgtcactacttgatagatatcataagcaagaaggaacacaagtatgcggtacacaacaaatttcaaataataagacttgcaagtattcctagtaagggaatagaaaactgctgggaaccagcctgcactagaaattctcaattctgtcattctgggattgggctaagtggagccaaatcatcccaagtttcagttagttatgcaaaacaaagttccaggttatgcacaacagaagacccaggttaatgcaaacaaagagagctaggagaagatgtccgtcaagtcactagtgcttgggatatgagctgtggtctggctatgctctcagtctttgtctacctggtgtcccttgtaggtgctctaggtgttgcgcgtgtcagtctgatctgtctagtttccaggatgctgcatttcctgtctttgttttgttcttttgagctgggctgtgctaagtctgatctatctagttttagtttttaagccgggtgtgtgcgcctcatgcctcatgggaagtttcattaaaccgggtgtaaaagcctttcctctaaaagaagttgcacttggtctgatatataagaaagtctatactcggttcctcaattcttcattggtttaattttcattcctcaatgcaataccaaacggaatccatcccccaactatcaaaaccatgcaaataatatccctatgattgttttgcaagtgattttgagtgtggtggcttgccacatcatccttttttaccatgtcatctgccacgtcctgtgtgttagtcctttctcttcctttttaatagaaaacaaataatgaaaaagaagatgcaaataatatgcctagtagatggatgatctaacaggttcctttgttttatcatttcccctgacatcttcatagtgtactgtggtaaacctttgcagggagtaattactcaagatgttaatgcaatatttgttttccaaaataacaataggaattgatcaagtacaacttcaaaagtgtgtatgccttatcaaggaggattgttccataccttaattatgtctagctgcctctcaactacctcttgatctaatgacgtagtaaggtttccagtccaagtgaatacagtatttccatcatgtaggatgtacgaataggatgaattcaaagacgatgccgcctaatgaaagagcatgatcaagttaccttggaagcaatataatctaattccaaaaggagttcaaacatatctttaggaatgaaaatgtgagaacttacagcatcaacttgaattgcctgcatgttttctggtcctgaaccttgaattcggaagagcgcaagtccatcttccaaataagtgtcatcatcaataccattttcagcaataaatttcttgtatccagagcttagaccaccctataatgaaaaagggaaagaaactaagaattggatgttgtgttcaacctgagctaacagtattttatagaagggaaccttaaacacttggaagctttgaaatatgacgaagaattgaattggttcttttccctcatatagtcgtgtctgcatgtaaccaagaacaattagatacacaaggaagtcatgtctggttcactaatgaaatatggagaaactagtaggttacctggacagcctgaaatttcgcagactcaaccatcttgcttgcaagtgaaatagcagttaccctatcctcctgaatccaaattgaaatattttttaacacctacattttctagtatgcactaacagaacatgtaacaaccgcatgctgttatccaaaatgccacttcttaacagaaacagatagatcattgtggcttccagttcataaatcaaaaggatggaaaacagaagcatatgctgtccatagaaccttctaagttctttcttcattgtcctaaagtccggacttcattgataacttaattaaaaactaattgtgagctataaggtggaaactctaaatacaatcttataactatgaacatgaaatcaaagataaattttacctcaatgctcttcttcccaaaccaacttccaataagacactcctccttgtcatctccagggtacatatattgaaatatgtagcaatcgccagtgtaaaattttgattggtcagcagatggcagaagtatcttgtccttatcatttatgcgccagacctgataacagatatagaaaaaagaaaaatgtgtggacattttagctctcagagacccagaaattgaacatatagagcagaaataaaatcttgacaggaaaacattcttgtaaaaattaaaaaatttaggagacaataaacataagataatataaaaggccaaaatattcaagtgatactaaagatctgaaaatttttcaggcaaatgagatgatgttaaaaacactattgttgagaattgacaagtcagatagtgcagaaacacacctgcaaactgccagtgcaatcaatgtaagcttggggttcttcttttgcaggagcagctttcatcaggcccttaacatttaagccctggcgtttcagaagagcttcgagaaaattaatagaaaaaaggtcagaacattttatcaatggaaaagaaacagtgaattgacaagattgcatataataacctgcaacttttcctcttccatcctcagatgacaatttcaagtcaggtgtctgtggccactctttaaattttgacttgaacataactgtctcaaacccctcaattactttgattacatgtgtttttgttcggttatcatcagagagcaatttctgcatacacaaacaaacattaagtatgacggcaaaatagttcaagatccagaattaatttgagatatattagatgtataaaattatgtgatatatttctccagaaaaagtttatgttcttttctgggtgatctggactaagtaaccaaatttctaaaattcagcagaattattggctcatcatttcatcaatgccacaatgaaaatgcaagcatgttggaaaattctggtttcattcctccaagctttcaagcttatgtgattactggaaaaaatgcccgtgcattgcaacggaagaaaacatgagaaatttaagaaaaggttaagaaaaatttacattatgtaattaattaaaatataaaatcacaactatacatgtatacgatgttgaagaaaagaaaggctcgtaaaaatcaaggtaaatgtggaaaaataaaattttccaaataaactatggctggatttattttttattaaattctccatgattaattacactatgtgaaatttttccgatattttcagagcaccattgctaattttaataatacaaacatcattttagcatttatttaaatggaaatctaaatgaaaaccctcctttctccctgggccattttgagcccattctttctttagcccgtagctgagccggcccattaacctcacttctcctcccttccacctcggcctgcaagcgcgcatccagcccatcaagcaaccacaaagtctaatcagcatcccttctcctcctctcactgtcgcgtgggtcccagtgctacagggtcgtcccctacctccgtccgactccgcagcttcccaacaccgccggaaaccgccccctccatgaaatccgttcgcatccacggagataatccaaaattgattgaggggttttgatccttatctctttctctttccctttttccaagaattagagcaaaatcgcatcatatcgacctcggaatcaagccatatagcaaaccacctagagttgtccgtttcgcgtacggggagagaatcggactggcgcctccagggacgacgtaccaaaaaagttggcaaaaacatcttaaacttttataataggtaaagataaagatatttctgtttcacaagaatgtgatgacattacataagtatttcttgaaagaagaacatgttacctcagcagcttcactggcactcttcctctcctgcaaagatgtggttctgcccatccaaacaaataattcgacaccacaatctaacaagtaacacttatttgtcttgagcaactcgtgcaataaggattcataattgataggctccaactttccttggttaaaactgaaaagatgcatttcataaatattgactgacctcaagtgaaaattgttgtcttcaacaaatgaacacagggtttgtatataaatagcacatttccaattaattaccagagcaatttgaaaacagtttcttcatatttctcattatcttctacaggggctctccttggtagaggggcaaagccaccaaaaaaaccccaaaattcaccagcttcagcatcggccatcaacctgccatcctctatgaaaaaagtacaatcaaacatatgcggaaaatatcattgttccagtactatgaacacacaaggacctgaaatagaataacttaccaacagctgcaacttcacacttgccctcgtgaaatgtatctttgatgtactgcacgacttcaagagcctttgcacgctcttgaatagacgaattggagccattgaactggaaaattttggacttcgtgtccagaataaatatgtcatcatgattcagggacgatcgagcaaaaggaacctagtaattgaatagaaagtctgatcaagacatgaatagaaagcccctttctgaagaagaaaacagttatctagatagcttgcctctttgacatgaacaacacgattccctgtacagacatacagacgggtttcgtgctcctgctcattgacctcaacatgcttgaacccagatgccactcctcctggctgtggcatgatgcatggtctaaaatatgagaggaacttatctgtttcattgccttgtatctctcggtattgaacagcgcgtccaccaagtgcagcatcaagctcaactgttaaaattgctgcagttccagattcatcctaccatgcatagaattggtttcaacaaacttttgaagaactgaaagtctgcatcatctaattatgagaattttacctgactagtatctttgccaatccagtaatgaatgtcatgtcgaagagaaccatttttcaaggcagttgtctaggaagaaaaaaagagcacgatgaaacattattacattgattgagaattatgcagcaaagcatttccctttttccatgagaattagatgcaaaacagtaaatttcagaagatagtttatgtcataatatggtaataagagatttagagctgtggtgtcagagaaaatttaagaaactatttcagtttcctaaaaccatgagagaacagtacatatgaatgaaactgtcatattgcagtaacatgggggcaaacacttgggagctttttatgaggcttgctagatactccctccgtcccataatataagggattttgagtttttgcttgtaacgtttgaccactcgtcttattcaaaattttttgaaattattaattattttatttgtgacttactttattatctatagtactttaagcacaacttttcattttttatatttgcaaaaaaaatttgaataagacgagtggtcaaacgttacaagcaaaaactgaaaatcccttatattgtgggacggagggagtaccatgaaaatgctaaacaattttgccatgtaaaacaggcgaacatttatatggttgagcaagctatagaataagcataaatttatactctataactgaacatggatagactattttaggcaaaagactaatgatatgaataagaggacaaaagagaggatgatatatggattatgagttatgacaccatataatatgtacttggataccttcaagatgatgtaagaatcacccatgaaaaattttccatatgaagacgcaggaataggaactggcttgaagttctcgatgcgccatatttccaagcctctgtagtgtattaaggataatcgtggctttgtacattgattggactaggaccaataaaatagtgaactgaacagattgtcaattgtaaatactcaaaaaagatcaagagtttaatgaatatttaaagaaaaaaaggcttctgctaaatcactacagaccctgtgatcattgttatctcattaacttctactctgctaatgctaatgtctagcatattgtcaagaagcttgcacctgtcaggatacttcatatgtgtgcacagtagcattgcaaattcatgatcatctagcaaacaaatgcattttacttgttttagcagaagtgtacaattaaattatcttcttaggaccaattaattcaacatggtagatagtgttcactcaacttatggacaaaaaacaactaaaccacaaattcagagtttcaacatgcacaaagaagttttcctggttgacttaagtaatgttatcttgcaaattaagtgacttcaatcaaggtgaagataatgaaagcaatagaggaaagtacactaaggtgaaattaaaaaaaaggatactccttttgcccagcaccacgaaaagctggatccaaatccttcatagaaaccgacatccttgatgttaaagaaacctctcaattcttctctttcacaggagagctaatagtatgctgtaaacaggggtagaaaaggtgggcagtaattaattagcaaacgaaaatgcacttggttttccttttttacgaaaattaaactagatagttcagttgttaagaaacacgaccgaagacatgccaagtattaggtattctggttatataaagaaagtcagctttgatgatacaatgtctactaacattaaagtaaggatgaaccaaaacaggcatactatcatatcactaatggtgactacatgccccatatagaatgtgaaaaatatgcagtacgccatttccgcatcgaaatacacactccaatgtattgtagaagtctgactagcacatttgcatttcacaaccaacatgaccatgggacatgaccctaagttccccaaacaatgactagaactgtcaaagcaatgcagcaagctaagaagtttgcgcttcctaagggttatgtctacacaattgaacaatgatccaattccaaatggttaagcaggcaccgagaggcacgaatctggatcaatcaatcaaatgagcactcccagtctcccaaccactaggcgccgcccgccgcgcgaggctggacagaacacagctcactgaagcatcaccaccccccaaaccattcctcccctcatagcaaccaagcttaaaacctcacgcgattagcccccacccaacccggctccatacctcccaaataaccagcaaatgcgaagctccccgccgcaactccaccccaccccccaccccctcctgaaccccgtctcctcctaccctaaccagggccgcctccccccctccgctcacctccggatacctccacgcgcatgccgccgcgataagcggcgagtccaccattagtccaccaaagctcaagcaaactatctccaaaaaaaaacaaaaaaaaaaagcaagcggcggaagatcgagagcaccgacctgggagggaggcggcggagatcggagcggggaattcgcgcgggcgaggtgggggggggaatcgatctggagcggcgagaggggaggtggagtagaggaggaagaggaagaggaagaggaaggctcgagagagaaaggaaagggaaaaagaggcaaagcgggcagacagaacagaagcgagagagagcgcaccttttgttttgcgcgttttatgctttggtccctctgattgtccctatttttgttccggtgaatccacgagtttgaggatctggatgttagatgtagctgtacctcgtgacttgtgtggcaagaggtcggtgggttttttatgctttcggactttcggtcttaaaaaataataataaataaatctaaacctaattatgtgagatcacctaattatatgtataattttttacgaatagagtattccttcgtaaaaaaaataaattagaattggaggtgaagtatgctaatattcattgtattagaatacatcacatctaattttaggtttgcttttagagacaaagttattcattatggtactgagatacgtcacatataattccaggtttttatagagaaagtatttatgttagacttttagtctatttttttatgtttatcgaatttgtagtgttgtacctcatattctagctaagtctatagtttatgaagttgatgctatatggactgtaaataatatttagtagggcctctattatatcccctaagatagaaaggcatcaaaatcacccttgactacagcccctattcttgaggctctatgccacagtccctatacactattcattagcgcagaaagacatttttcctcacctatttgttccctctcctccctaccatgcaccgtacctccgccatgctgccgccccaccgtccaacatcctcactattgccccttcacccctctttcgtcgatgcatgctagaagaatagatcgatggttcattgtcatccccaatcttcgttgtccttatcttcaagctccctagatgttgtgttgcaaccaggttccacattagccttcgagctcctccgtcctagtccgccgcaactcttttatttgtcccctatgacatcctctaccgacgccatgttgttgcttggatagacttcaaataactatgaactatgtggtgtcttaaacatttgctactcgtattttgtcattccatatttaaaagttttaaatttaaatttgagttgtggtctttgaaattgtgaatttgtatatgatcagattatatgcattagaaatatttatgttcaattattctatgttaactaataatagtaacataaagtgtatgttgatatagaagagaagaaaattgggggcttgaaaatggagacatcctagaaatgaatgctccgttggagttggaggtattttttaagtagttacttcctaggaaatatggatatcccgtaattgatttttagggctctataatgggggcttcgatcattgccaaaattttcttaccaaattaaagcattttgatatttaattaagacaatttatttggtgctatcaatttttaaaagcaaacaaattgatcaaatgatttattttctcctaatttcttctataaaaatattccctccatcccatcccaaaataaattgatttatattttttttaaatgatctattttgtttaaatgtttttatgtttttttattttattctataaatgatttaattaataagtttctataaaacctcatgcatttatttataaccagtaattagacacatagtacatgaatgatgacatactcaagagaatgagtttaacaagtgaaatttggataacttggagagtagcacacataagtaagttaattctacatcatgcctatcaacttgtgtatagagaaagttctatctcctacctattcatccatcaatactatttttctattacgagtgataatttcatattttctcttcaccattgtatgctcccttcgatgttaggaatgttcttattttgggatataattaatattgtattaaagagcaataaccagttgccctactttggatccaagcatgagccttttgtccatttccgtcatggctagtatagcattatattggaaattattgtcaatcttttgttgaaaacacttgaactcttcgatagccgtagggcctcctcaccttatatagcaaattacagtctatttttacaagttatgattatacgtctatttatctcaaatattttcaccatttactgttcatctaatttgtatacacatcgtttttatttaagaaatcattgacttgatgattggagaaaaagaatcatgagatcaaaagcaaaattatctctaaagcgaaggcactgaaagcaattttggaacaataccaaatcggtggttattggctaacttgctcagagaagttggaggatctaggttcaattttgtgcagagataaagggggtatctgaaaagcaaagctggaacggtacacggcagcaagggtggcaaatgatggactggagcgtgcgtgccactaagcaacacctacaatacagaacacacttatcttttctatcagaatatttttcaaaactgctctaaattgcaaagttaatagtatattcatcacataagtattaaactagacattttcttctttttatatattgcacatatgtgcacacgccacaacttatagtcaacattatatttcacagcatctgctgagttaactaagacttattaattctatctttccaatctagatatttttcaaaactgttttaaatcagaaatccagtcatatattaaaatgttttaaatacaaaatcggttttctcatgtttgcacacgccatggttcaagaatcaagagtcaaaacttcacggaatctgatgagttgattattaagatgtattgattttttatctatgagactatgacaggtgactttggagaattggagtacatttttaattaatttgggaatttcatttgcatttgatattcggaggatatttggggcggtgtcctgtgtctcctcattaatagtctgacctcatagagatgtaatatatatactccatgagggaaatgatagtacttaggccagtgttaatttatcatgtgctactcatgcagctgagaaagtaccacacttattagtagcactatgtactccacaagtccattgattttggaggccctgtggtacttagtttcattggaaaggaagttgggcaaatgcaaagatgcattgatcatcatttgctaatcgatcacctgttttaccagtcatatgggaccagatgacagtagggacatatatagggggacataggaaattggtttctgggttggcactttggcagatccccattctttgttctgttttgggtcctacctccacatttggttattgctttggtatgatatgaagttgatagtttgctttttcttcattacttggaaaatgtaataagtcaaaagatcgatggtcatgaatggcgatattttatatttgatctgataatatagataaggatcttttgcttctctttattagcttacgggtgtgtttgatagtagcggttgtgaacctttcctcattgcacgaaaaacagagtgatagattagcatatactcactccgtttcacaatgtaagtcattctagcatttcccatattcatattaatgttaataaatctagatagatatatatgtctagattcattaacatcaatatgaatgtggaaaatgctagaatgacttacattgtgaaatggagagagtaacaaattaaatattagctaaaaattgaaaaataaattaatataaattttaaagaaactttcctatatatctttttaataaaaaacatatcgtttagcagttcgggaagctatgaaaaaaacaaagacagtataagttcggaagaggtagtatagaacatgcaagtctattgataaattgatcggtgcatgcaacctagcaaattagggaaatatagtcacccttcttcttcacttgcttaaacttttaggtaaaccgactaatgtaatgtaagtgactttaatgttttggattacttaaagggcgatgaagttgcgcatgagtctaacaccccgcgggagcctggattgtcaagggctccttccttttgatattttgaggggttgttgagttctctacccaaatttgcccttcctaataagaaggtagtgctaatatgaccctcggcccttgatccatttaatcggtcaaaaaataaatttcacaaaacctagtatatttgtttcaagtagtacaaaactaaatgtttggaatattgcgtatcattaataaaaaacatttttttccagacgtaccaaaaatggtttttgcatgtggaactctagcctgtctatccgaaaggatatgcaaaaatcgctcttttttcatgtgggtgctttatgtcgtccgcacgcaaaaataaaaatccaaataataataaaaaaactagctccaccgtcagatcctcccgccgccgcccgcggatctggtcgtcatgggcccggtggaggcggatccgcccgtcaccgccggccgcgcccaccgcctgccgccatccatcgtcggccgcgccgcccaccgccggccgtgagagaagagtgagagaggagcgccgctcgcgacagaggagtggagagaagaaaaagaggcgagagagtttagtggaaaggaggtaagagagatgaatggataagaatgaaaaattttgaaatgttaagagggaaatgaggaggtaactcggactttaggtgattacttaagaggtccgtctgcgaaaatatattttcgtgtgtggcccattaagaggtccgcctgcaaaaataagcttatttttgcgtgcggacccttaagagacccgcttgcgaaaattgatttttccgcaaggtcctcttaagaagccgtatacgaaaatagaggacgatttttgtagatgcgactagttatggtccgtctgcaatctaaagagggtctcgtccaaaaaattcatttctgtagcagtgtataaccacatatattagtattatggttatatagtttgtcaaacattttcttaacctattgtacatttgaattctatacttatattcaaaatttgagttcgttcaatccatcgccaaaatattggagtatagccatgtaagtaaaatattttttcttatgctacaatatcgagtaaaactagttaatggtgcggttttttgaaaccttaagaccataataactgcagttatatatgtgacatgtccaaactaacaaggttcttttacaactcaagccataataatataatacatacatgtgaatctataaaatttactcaaaagaatttattgccaaaaaattggctaacaaactgtcaatttgagtctaagcatacctcctatacatgagtttgtgcctttcggtatatggaaataccatatagccaatagtatacgtgaatgtatccttttattaagaaaatacgatgaatagagaaggaaattatcttcctaaaataggaggcgttagagttatagtcgggaagataatgcctccttagtccgtatcatattctatctctccggattcttcttggagaggaagatgatgttcgatataatacaagaccctagaaggagagggaacataccaacaaaatacaagccaatacagataagagctatgaaggctgacatgagggattagagctacctgcaatctcgatgagttcatattcaaagacgaatactacactagctgtcgactacgtgtgagagctacatgatgtcaaaccgacaaaaaaaactagattaggtgatcccaaatattatactcatgtgatactgaaggtagactagattaggtcatcctaaatactgtactcatgtgataccgaggctattacctgtcagttaaggggcccgaacctatataaaattctgtctcctatctctttttaccgtaatctcgcatataccttggttacaacgacagccatactataaatacagtaggcgagtataacccgtcaatacaaaccccactaattaaaacgcaaacatttctatttcttttgaactccgcacgtctcaatttttttggagaggaaaagaactttccattaacttaaggactcagcaaaatcgctggccaccaagtcctccatgcccggaggcatactgtcccatggttcaacggtattccgaggacatttacaacccaaagctgctaaagcatgcgctactctattacatttttgtggtgcaaaaacaaagaaacaggaaaggaaactacttccaatcagctatttcgttgaatatagtattttaccaaaatttttgggaacaacatattgtaccaatttcgttgaatatagtattttaccaaaattcgtcaaaatctgtatagacctgtacgggcaataaaccaaagaaatcctttttccaaaggaaaaagtacaccgaaggtccctcaacttgtcatcgagttacaaaatcgtcccctaatcacaaaaccggatacaacgcatcccctaacttacaaaaccagtgcaaactagatccctcggtggttttgactccggttttaaccgacatgatagctgacttagcgtgggacccacgtgagccccacatgtcagcgtggccacctcagcctcctctcttccccctattctctcccttcctcctctgtccctctctctcacttcgccgaacaacggaccgatgccggcggcggtccagagcagcagtcgtgcctccgcacccaccaccgcggtggcgcccgcttctaccttcgcgcccaccgccgtggcggtcgagcggtccacgtggtggtgcgacgttgagcggcccgggacagcggcgtggcgccggtggcggtcgagcggcctgggctgccaccatcgtcgtccgtatgcaaccaatcgcaaatctggggatgaatctattgatgggagagggagacgacgaggcacgttgctgcatcaagacagagacaaggagcaccggtcaccaaggacatcgggctagcagtaggcggtggtgcatcgtgtgtgtcttttcatcactgaagtcttgtggagatgaagagttgaatacacagaagataagcgtgcgctgtggggcagcaaggacggcgtgcagctgccaccgactttcgcccccacaacgcttgtcacgctgcctcggccggcctccgccgccgctgaccgtgcgctgtaccctataggtagcctctccatgccgtccgggtcgaggtgcaccgccgccgcgtgagagccctccccatctctccttttctcgagctcggctcgccggacccgtgttgtcatcgtcgctgtcgctgtccgcttccacccaccaaacgcgtccctctccttcgacggtgggcacgtcgtgcgcgcatgcggggtgggaggaacggcgtgacaagacggacggcaaagagtatatgggcacggcggacgcgggcggctgccgatgagggaggagatgccaccggcggcggcggcggcggcgactctccgctggctagcgtccagcccgcggtgacaacgacggccgcacgccgcactcccccacacaccccgcgcgcggcgcccgacgcctccgacatgccgccgcccacgaccgcgaaccacccgtagcaacccggccctcagcccctcgtccgcctccttcgccgacgacgacgccgcccgacgcacacgcggtcgagactgcctgctagcccctgcccggttttgcagttttcaccaactcgccgggagctcgcttcggaggatgaagacgacgccgacgccgcacgcgaacgaaagcgaggtcgcagcccgcctcgctcgcctgctccgcggttctcctgcgcatgcggcgaacagctccgcggtcggggcacccgccgagtccatcgccgccgcgtggccccttctcccgtgtcgccgcgccgccgtgtcgccccttctcccgcgtccccgcgtcacctatcgccggcgccgcccagctcctcccccgctggcgccgcccagtttttacgcaccagccatccgccgcgccagccgaaccgtacccagctggccagctgctttcgtgggaggagagagaggaagagaggtggagatgggaggggaagtagaggctgacacgtgggacccatgtgggtcccatgctgagtcagctgctacgtcagttaaaaccggagtcaaaaccgtcgagggatctagttttcactggttttataagttagaggaggtattatatccggttttacggttcggagacgattttgtaactcgatgacaagctgagggaccttcggtgtactttttccttttccaaattgtaacgggccgagtgggccggaaatggcatgaacgccaacttaacgcatttccattttcgaaagaaaaaaaaaaccacacgaattcccaatttcaaacgccgatctctccgtctcgccggccaccgcaaccacccacccacccactctaccacccatggaccacgccgccgaccacctcgacccggcggcgccgccgtccgggcccgcctcctcgtccgccgccgtcgccgaggtcaacgcgtggttggcctccctcgcggcggaggccggaggggccgggggaggcggggtcggggctccgggagggcgcggcggcgtcgtcggcgtcggcggtggtggggcggcaccggagctctcgctggggcccgagcccacgccgcgcggggtggcctacctccgcgcgctggcggccgcgtcgcaggcgaggtcccgcgcggcggggatcgcggccgcggggctgcgcgcgcaggccgcggagtaccgcgccgaggcggcgcgcctgcgggaggcgctggagcgggcagggctcgcgcgggacgcgctctcgccgcccgcggccgtgtccgcgcgcgccgtggccgccgtcgccaacctcctcgccatccgcgacacggagatgagcaggtggagggggctagggttctcagtttttcttcttcttcttctgcgtgcttaattctcgaatgaataagactatttgttctgccattcgcattgccagtgagagatatgaacatctaacaagtcgatctgtttagcatatgcggttttatcctcggcattgggtgaacttcgatgaagttgtaattccagtaggcagttctgttatgcgtaatgctgttagtttagtaggccaaatagcaggaacatgtaatatgtctggagcacatgctagtttagctttcatgtttggttctaatgcagacaaaaacttagtttgggatgcattattgcaacaagaaacaaacaatttgatggtggagaacagtaatgttaggcttcatactttcatagtgagtgttctggtgattctttccttttgttttcattgttctctgattactttgaaatggtggttgtgcagctttgttgtggccagtgcggacctgtcgctgaggagagcagaggtggaggagaagagggacaaggtgcataaggaatcaaaggcgcttcttgattacacaaggaaggccatcaccaagcttactgagctcaagaagtgagtggaaaactattcactttcagtatacttaaggagatttgtgcaaccacttatatctcttgaggaaaatataatgaacaatgtatcatttgaaggatgctggaaaaatttaaaaatgatgtggagaagcaacaagcagaacagatgacggattggcagacaaagttggttatgatggactcaaaggaacgccaatatatactccaagtctccaattataaggtgactagtttttcttcttttgcaagtggtgtaatcagtatatggttttagttcttcttttgacctgatagttttggccgactaccactaaacaaagcagtttctgttgctgaagcagcatatggtgtttgctagagattgtcaactgttagaacttagaagtatatagtcagttatcatttatcaatacttgtgcttgtgagtttagcaggatgctgcaggacatgacatactattatcaagctaaccgtacaactttgaaatcatttcaatccacatatttcctgaatcttgacctgaagaggctgttgatcagatgcttatctgcgcttttatgcactctctgctctatctttgattggttttgtaagatagggcaataactgtatatagcttgtgtgtgttttgggggtagctgtgaaattgttcaatgttgaaataatgatgtatctaactaataggtagaatttggtttgaacatgcatttccatcacttgtttctgctgatgttaccgtttgctagtgacgaagttagtcatatgatgagttgaatagtttcacatcatgatctgatgttgatagtacaaacatgtgttacttctaattttaagggcttatgtgatattatactattcttgttattcttaccttaacagcttggctatctagagctatccatcccccttttagtccgattgcatgtatgccgcaacacactgttctttgatttggtaatatacaatgacacattttagattcactctccttttctatctgttaggcaatgctcaaccgagtgggatatacaccggagatcaatcatggtgtgctgatggaaatggcagagcataagaaggatctagagagaaagactaaacccattgcagacacattgagaagctaccaggacttgccaccagtatgccttttgctttctgttttgttccttttcttcagacataaatctttacttattcttggtattttttgtgactgtcatcaggacaaagctctagcagctctagctatagaggacaaaaaaagacagtatgcggcggcagagaagtatctggaagatgtgttacagtctgcattaaccacacctggcctatgatgtgtgtgtgtgtgtgtgtgtgtgtgtgtgtgtgtgtgtgtgtgttattaagtttgtaatactatttggtctgacatgccattgattgatagtgctatgcagtaatggccattgatttcttgtaagttgtaacttgattctatgatcctgtaaaatgcatgttctactgtttacctaaccacagcatatttcaccacacaaacttatttctgttgcagctactgagctaccatgtcatcgacaaccaggatgcctctgaacatcttggcctgtttgctgtatatcattttgcattgatgtctatgtgattatggatagtcatgatgattcatgggatcaattgatgctatatgctagtagattaggtaaatgtgatcatatgccatatgaacatgccatttgtctttcatctgtccttgcatctttcatagagttaaccagatttgttggctttattccaattgaattcttatgctcatattaaatgttagtactttctgcgatttctattagatgtttagcgcttcttttttccccaaataccataacaaaatgtgttctgctacaacttccagaatatttctttcaggtgaattcaggtattatttgttctctcatcttccattggctaatgatatagcttaatttgggctctttaccaagttattaaactagatattgagctgattgccgaatcaggttggttctcttgagctgcaaataaaatgagggagtaatgaagactacctatattcctgagcaaattttggactttggagacatcctgaatggtggttccatacttccaagaaataggtgggtgactttatcctgaaattgatgtgctttcacactatctgtaatactagaataattatatccatttttcttgatgcctgattattttatttctataggaattgtgtttgcactgtattttgtattcctttctagatctgccttgcctgtcgacaatacaacaatatcttattagcatgttttttattgttggagctagatgacaccatgacaaagtgagaacatctttaggaaatgttctacatgaagaaatcctatagtattaaatattcattgccaattgtgctttctagttatgttgataaatatgtaattatcttgtctatctcttcattaaaaagtgaatgctgtcttgctaacttgctatatatatattgaatcgaaagctctgttgtctgttgctatgttttctggtagacccaatagctaaaggcaattccatacagaatattcaaaattagaacactcaggtagaagctgacataaagaagctggagttgttatcaagtggacttgtgcttcccacttcccagtaggatctaaatattgcaataataatatttttcagaaattgttctttgtttgaatagatgttcttaagccctgactctgaaactcttttcagtcggcctgtaaattgggaacaatgatctgtccttcaaatgtgccttcgcctgattagcacaactggctcatgaacattaaacttggcactcggcagccatttagtgtaacatgctaacacattacaaaaaccatatttggctatagctgataggacactgcaaatctgcaatattgtgacaatttaccttgggtcactattcattataatcgcatcatttccagctgaggaagtgaatatctccctgagctctgattgaacaccatcaaaatatcatttggtttggactgaatggtggtgtggttgacctccccagttttataaatgtattgcctatattttgtattgcagtccctagcatattgtgctttgaaggcctggatgcatgattcccctggttttactctgcatagaaatgagaagtcctggttgcaaagctgtttccagtgctgcctcttagtgaaagaaggaatgctgattcccctcttgcatacaaccttacaattgaaggtcagtattacttttttttttttgctgatatgagcacaaaatagttggcttaaatttcttccattttagtgacttgcttcatatcttagcatggaagttacatggtaagcttatatttactactataaatgggccagctgacttagatttctttgatttaagtagtttgctgcataaatggattatttgacttttcgttggcactactaatagttaaatttgtcattctctattaatccagctcagctcattgtgtttttttagtgtaatgtttttgatattctgggatcaatatatgggtgcgaaggggtttgattcttttttgattattttcctcaaacaaatgtgcaaaagaaaaaaaaaactcagctaccctttctatcagctaactgaaatacttctactgtgacccgcactctgggggatacccatttgggtacctccttgagtcagtgcagtaatcataaatcttgtagttatcatctacgtccttaagtttctgcttcccttcctcatccaaatcctgggtaaaccagctgctgtcattagacccttggctgcaaatccaggcagttttgtacggaatgcaggcgttagcttggtagttccggaagaatgcggtaaatggtgcttgagaccagtcggttttgatacgcccaccctgcgttgcccagtcatcggcatcccagatgctggcgtacagcctcattggttgatatagcgggaagggtatatcattccttagctgattcttcatctgccgaattggtgtgccatcaacaagtattctgcaacaacagaccaaacaaattaatttatgcttagctctaataaagaatacaccttcctagctgtgataaaacctttccacaatcgcttacgtataggacggtattacccaaatgaggactattaatgctgcatatataagaactgatgactctaggaagagaggtaacttacaagatcatctgcgggttccagatgatggtgtaggtatggaagtcttctgttggatcaaaccaaagccggtactgcttttctcggccacctgttcctctggcatagatgttagtgtgcaaggtgtagggctcaccggtggtgttccccaagaactcgagatcaatctcatcatgtatgtcccacagcccctcagttatcatctattcccaagttccggtacaaaggaatggttagtctaaggattcaaggtatattgcagtagcatcacttgtttcttacttacatataatgtggtgacagtgccggctgagtccttggcaacaagcttgatgtccatgtcaatcctcgcaaagagatacttagtctttgagcggaatgcagaagtagtccagcggtcaagggacagtgatacaatttggtggccagtgctgtcatagagcacctgtgtattgccccacagcatgtcaaggctgtcggtcatgtcgctgattactggggaggtggctaggatgagatacaaagctgccatggacatggagggtaggagttgagccctaggttgccccatggcttttgctaatgcgaagtgcctaagtgagtaggcagactgtggagtgtgctgtgttgaaatgttgtagactttatatagactcatgtgaagaggaaaccaggtgttcaagtctaaacaagatctaggtctgacatactattaccttagattcttggaaggtgtatgaactggacatcattggctgacatgaagaagtgggcataaaaaaaatgataaaaattggcctgaaccatagcttgagcaggaatgatccagcctggattctgtagtctggagttgacttactggttctgtcatccaaccaatttgcaagccgccccatggtggcttctgacgaactcacctggccttaagcaagttgaaagcttatggtttagagggttttagccaccatgcagtgcagttcttgtaggtaaattactagatgaactcaattatgaaatatgtgctcagttatggtctagaggtttttggtcgccacacagtgcagttcttgtaggtgaaattactagttgaactcaattatgaaatatgtacatagttataaagcatctggagaattgctagctttatgcagtcctgccacattgatctgtttacttttcatcaaatgctgattttcctcttcatggatgttcgtgatgagggatcgaactgcaactattttttgtggtcgattacattggtccatcaatgacttccataaagaatgaaattatccagatgtaaacagacatttaataagtgatgcttatctttgttaaacaactcaaattatgtgcaagtcagacaagcaagtgacctgtaaacacaaggccatctagtcatgcacactgaagtcccactgggaatttcacacttcacacgtatttgtaaggtcattgtgtcagtgcactgctgcttataggctagtttgtacataactatcttgaattccactgtctaaaaattcctataatactatttgatacacaggccttagttgacattgtaacaacggaagtcgtacctagttatttaacgttgtttgtgttgatagccgtgatactggcacgaatgtgcaggcattgtgagctgtaattttcgatatatgcaacaatagagtactaattctttatccctaataaacggtgcctgtgtttttaatactttatgtttctaggcagtcacatagagattgctttgattcaggttctgtttggcattgcagtggactatgagttttggttcaactgcttttatacattttggtgcttgtaaactgtcttctgtttcaatctaatctcaaatgataatatatagtgctatgcaaatatgaataaaaaaaagagtcatgacagattgataaatattttgtttagctttcatttgattcataaacaaaactacaaccgttttagatttatttttctacagcaacttttagaaaagggaaaaatatgcacagtgcaatatagcacaacaaccacgaattgagcctcaatactttgtagtttggattaacacctttcttaggggccatgttcaacttttgaaatgtttattcagttgatatgtgatagagtgggcaatgcagtaggctgttgatactctgagactctgggcatgcagaaaaaaattgcgatgacatttttatttgagtaaatttcacaagactacatgtgctttgtacaatctatcacaaaactgcagacttagtgtctccattatcacaaaactacatggtttaaccttgcccgttagatgcaccagcacctttgtgcgggacccacctgcagtctccggaaactacagaagtacatatttactcaaagcatccacatgctgatcaggtcaaagcatccgtgcagaggtaacacaaaagcatgtaggcgcatatagctaacacttgattatagaagcatcaaaatgcagaaatctaatacctaattactgatcgcttcatgagacttcaggtgggtcccaaacatcaggtgtcaatgcgtgtaatgggtaaggctaaaactgtagttttgtgataacggagacactcaatctgtagttttataagacaagttcttaaatttgtagtactgtgatagactagcataatacctgtgagttgcaacagatatcttttaagaaaaatagctcatcgtatatattctaaagcccacaataattgttcttattgcctaatattatcatcatgttacttttgcagtcactttctaggtgtctattgagctagagttctcagggtctgtggccttgggggttgggaaataggcaaagtctccctgtttatgggtcccacatggttattgggtacttgggtggtgattcaccaccactaccactaccatcttttacattagcacagatatagattgtgcaaagtacctgttgtcttgtgaaatttaatcattttcttttatggcagcctccttatgcacattatcctactgacatgtgggcccagacccaccttgtgagttgtgagtgatgcaacaaatgatttgcaaatttaagtttgcatttatgtagttatatttgtgagtgatacacaaatgatttgcaaatttaagcatgcatttatgtaattatattttttagtttatatagaagtaacacttggggtaatatggaaagaacaagataagttatacattgggtctggaactctaaataacaataagcaactttttattgagcaggttgaggatggaattgtatttctcacattaatattaaatgttaactactaatctttttgtgataaataggtttattgccaagtactgacatggtgatggtagtttggcactgctgcaatggactccagtgtaaaggaattggtgggatgatatctgctcattccaccactcttctgttatcaaaagcatacccataagtccagagatgctgtgattcagaaggaaggcatgggaggatgcacagagccaattgatacttgatagttgatactacctccgtccctaaatatttgatgccgttgacttttctaaacatgtttgaccgttcgtcttattcaaaaaatttaagtaattattaattatttttctatcttttgattcattgttaaatatactactagtactcaagtttttaaataatattcacaaaagtttttgaataagacgaacggtcaaacatatttaaaaatatcaacgacgtcaaatatttagggacagagggagtactacgtaaaggtaattaccacaatgttcggtcacgtgggttctgtgtgatgtgttactgcaggttgacaagattagaaaaggctataggggatgcagaaattatttagtttttaaagtatttcttagaggatcttggtagtaccttattgcccagggttactagctatatatgtggattagagagttgcgaggataacatgtaaaattattcaataccctgggatatatttattggtgcaaagtttaccttttatgagggcacttagatattcatcctcaaccagctacaattttcactagctgaatttctagccacaccttaatttctggaattagagatggagctctatagctcagcaggatctaattgtaacacacatttgcttccagaaatgatatgaatattgtgaatctttttactgatgaattcatgcgctttaaacttgaatcctttactgccatgctcactctccacatcaagaaaatggtaaccttcatggtcagatattatttttctgtagtgttgatatcaaagcatattattagaggacaagaacaaggcttaaatatttgttctggatacaaagtcctctgaaacacgctacttcctctgataataaggaatgagatgtgttttgcattcaatatctttgtggcaatacattgaagcacagcaaacaaggggtctaactgaaaactgctgtatttccaggttgatcttaccagttacatgtgaggtatgtaagtaatcaagcataatatttagtgatgcaaacacaaatgattttataccatgttattcatataacatccttcatatcttgtttgcaaattgcataattgtgtttatattttacactgacatctatgagttgactggcttttaattgcaactatttgcaaatgtttcagttagccttcacataattaacactagcttgactagaaagcctttacatagttagctcactgcacatgagttgctgatcatatttcatttgctatatgtacagccaacaatttattttcattttaaagtagagtgcttccctgatgcttcttgtaataaggaagatttaggtttcttctgtaagaatgcaatggacaatacatttgttatactgttcatacttggaaagaatgaaccgaatcatccaatacacctctcaccctttctatctgctaattgaattacttctagtttatcgtacactctttggggagattatctttgaacctcttggtgtcagtgcagtaatcgtagatcttgtagttggcatccacctcctgtagttgctgtttccgtgtcacgtccagctcctggttgaaccaatttccggagctctggccgcagagtggggagctctgttgtggggggcaagcgatagccctgtagttccggaagtatgctgtgaatggcgcctgcgaccagtcagtcttcacccgccctcccattgttgcccagtcatcggcattccagatgctgccatataccctcattggctgataggttgggtacgggacactgtacatcaaattgttcttgatctgccggatcagcttgtcatcaacaaggattctgcaacccaacagcattcttattgttaaggtttgtgcctttcaaataaatgggctgcataagatgattttcttgatactattttttctttctttctactacctccttttcatatgtcgctttgatttttttttctatgttaaacttcttttaactttgactaaatttatagaaaaatataacaatatttttaacataaaacaagaaactatcaaaatatatttaaaatgttagatttaataaaactaatttggtgctctaaatattcctatatttttctataaacttggtaaaactttcaaaaagttttgacttaaaaaaatcaaagcgacttataatacgaaaccgagggagtaacatttatttgccatgtagtattgcttatcaaataattgtgaaactggtactaattctgcacaatataagtttaactggataggttgggggagcttacaggatatttctttggttccagatgatggtgtaggtatggaagtctgcagtgggatcaaaccagagcttgtaccgcttctctctgccacctttccctctggcatacaggttagtgtgcagggtgtacggctcgccagtggagttccccaagaactcaaggtcaatctcgtcgtggaattgccataggccctctgttatcatctgttccaagatcgcaacacaagagaatggttagtctaaaagatctgcaagtgacaccaatgctaatacagtaatctgttcattccctggccacttacataaagagtagtcacggttccagctgagtctccagcaacgagcttgatgtccatgtcgatcctactgaagaggtatgtgctcttcgaccggaatgcggaggtcgtccagcggtcaagagtcagtgagatagtctgtttgccggagttgtcatagaacacctttgagtttccccacagtatgtcgaggtcattggtgaggtcgccagtgaccatggagattgctaggatgaggtagaaagcccacagggaggctaggaggtgagccctagcctgccccatggcttttggtggtatgggagagtgagcagagtgagtgggtgtgctgtgtctcaaatggtgtgccctttatagactgaggtgaagggagacttggttgtgcgagcgcgtctaaacaactaaacaatatctagcttgccagtgactttgattcttggaagatgtaagaaactgaagagaatcgtctggctgctgaataagttgtgtaaaaaatggtgatgaaagtggcttccattaaagccagaatggtgatcaagttgactaactggttctagggttcgatcttggctccaaatctgcgagccgtcccacggggtcttctgacaagctaaggtggttctcaagcaagttgctgaaggcttatgttatgatgacaaaagagttttaggatccctttggccattgtggtgcaatctgtcactagatccacataaaaggtaattattagttcagctataaggcatctaatcttgcttgctggtttctcatgttatatgacatctactaggttgtgaaaggctggaagtacacaaaaatgatatgcagttacaagttgtttccagtcaatgccttcggaacagttaccaatgatttgctgttgttcaactcagtccctcattattgtcaggtttgtgcagctccaatagatatcagtcgttcctcagaggaatctttcaaaggagttactcctgactggtggattaatttgattgatctgatggtttttgtgtagaccgacactctggtctagaaacccaactaatgcaagtgacgcggtgaactgttcttccatagacaaattgatctgcaagtcagaaagggtaagtcagttgtggattacgaggtgatgcataccaaaattccaccagtaaattcagacctccaagtttcagactaagccctatgtgcggctgtgcactcatattcttttttcatggatgctcatgggaacaaaaccccagaacttgtgctataaacaatttgcaaatttataacggtacatcttagtacaagttcatcacatatccgtactttgagaagctcaaatgttgtcttgggacaaagtcaactggatttgctttaaatgatcgtaaaaatgtcaacatagcacttgtttgagttaaatctgatgtttgcttttgtatttttcccaaattgaaacaaatcttttgcgcttactgcatcctgccgtaccactcatgtttaagttgtctgatttttatctgtattttctgaataaatataattctcatatacatttttgttctccaggatggtaatgatactaatgaagtatggaattaatcactgaagttgttggggctttgattaattgctggacaaattatactactgaattcaagtaaaaagaaaactataccactgaaattacaccaagcatctggtgagtgatcgcatcaatttatcaattcttttcatgtgtttctacaatctctgacaaaagctacatacatctctgcatcttattcatggatcagcatttcttcattccatcttctggaatttggcgcaggatgccagtatttttcacttgccagtttgtcattcttacagatcttgcgttgactccacttacagtcagtgtgccattttattttaaccacatgtctgtgtagaagaccgtgaagcttgcagcttgcaggggcttgcagtattaaccaaattaacatggcacatgggccgtaatttctcgatgtacgtatttcctacctcctctagttaatggctactgtttttttatatgtgtgagatcgcatcgattcatgctgctgtgatttggattagtaaaaggcattttgatcaggttcgtttctggctttgcaaatgtctaggcacatgagagttgtcggcgtcatttctgtcaatggaagatggcaccggcggtgcttccggtgccaagcttggcatgtgtacgtaccgtatgctcagaggtaaaggaaactgcgtcttagcttccctttgtttaatacggctcttctcggaatttattccttgggttttatgatatgcttgataggggaaaaattactttcaaacaatattggatatgagcatgatttgccaagggatttaacgagtgaagggcgaggtcggttatgtctggtacccgagagttttcactccctctgttatttttttatttatcgtttaatttgcagatcgacaaatcgtttaattcacgtgtttgatcagtatatttttacgtgataaaaaagacattttaaacacagaattactaaactgctttttgaggtctgtcttccactcttcatacatgatgactacgtattgtgagtcagaaatatcttttggttttcggtcgaagcccagggcggtccatcgaaaaaagctgggccatggtcttgattcttttttgggctgttctgctcctgcacgatttgagtcttggccaacacaggctacggccattttaggtctctcaattaaggctacatccatagtccattttaggaggtttttacctgtatgccattaagaaagatggtgcttgtctctgtgccactaaaaagttcgagcctccctctatgccatcgttgaactttactgcgctctccacaccattccgtcactattttgttaaggttcacctatttggcagctctgacatgtgggggctcgcgtgtgggagggtaaccaaggacagcctaccaaaccctctctacctcatccaccaccacgtccaatccttcggtccttccaccctatccgtgaggacaagctcggccgccgcgtccccgccatcaacgcggtaccggcgacggaggagccagccgacaacgcagcgatgctccatccgttgtagcatcctctcaccaagctcacgccgccgtggcgcccagaagctgctaccagcgctaactttccccaccaccatggcggtcaccgcgcatgctccgctccgtgtggcgggctcgcccgtcgccgctggcgctctgctccgccgccactgctctgctcgccgaggccaccctctctctcgcaatggcggcagcatcatcaatgtcatggcttcctattcgactatgcgccaaccgccacagtgcctgcctctacttccatgcccaccgctgtggcgccatctgctcccggctcgccattgccacgtcaccccttctccagtttcgccgcgccaccgcaccgcccgtcgccgcccgctctttcccacctcaccccaccaaccctatgaggagaataatgagaaagatagagaggaggaagggagagaagaggggaaatagatgacgacgatgtggtgaccctgatgtgtggggcccatgttgagtcagctgccacgtcggataaaaccggagtcaaaaccgtcgagggacctagtttttactggttttgtaagttggaggatgtgttgtatccggtgttgcggttgggggacgattttgtaactcgatgataagttgagggagcttcggtgtacttatccacaaaaaaaaaaaaccaggcgtgaactgggcctgcagcagcttgggctcgatgcccaggctgcggacgatgggaaaaaaaccaggcgtgaagagagaagcccaacccgtggcttatgggacgatgggaaactggagccctcgatctctccccctcaccttgtcgcttcctcctcccccgacgccgccgcttccccaattccggctccggcggcgagcagcaggctgcggacgcgccgtcgaagctccaggaggatgtggatctccggtgtagtctccgtggcatgcctacatcggcggcgcgaatattcagcaccggcttagatcgatggcgcccctcgccgccgggcttccgtggagagcaggtatgcttccgcctctactcctaggtcggtctgcgccgctgttctttggctccgactgaatccatccaacaattagttttgtaccatatcgccgattctgagacaacacgacctgtttattagctcgatttgattccattccatcgccaccccagaggcacccaccccgactgcaatgggcagcggtagggcgtgtatccgcactaccgtttcagctgcaaaaaaaaaaaaaaagcagtgaaaagatcccctactggggcacggcaggcgaccccctgccaaaaagatgccctatagaggcacacagtcgggtctctcggtggaggcagcgctagacactagcgcttggctttttgaaatttgtaacattagatttttttcccctgttgaactcatagctactcatgggataattgaaccaattgcaaaaatagttcgattacttcgtaacactcctccatatacaacatactccatgcgcacaataatctgaaaaccgtttcataagcagagagagaagcttaatgtcttcaaacattattaagatagggtaggagaggagatgtgatagtatatagactgatcatccaataatttcagtagatgtttgactgaaacatccaatattttcagcgagttgtctgaagatgtgaataccaaggttccaaatgactagcggcaagatcaggtatgtgcagacgacctccgagactgaaccaaactcatccaggcatggaatgcggaaaaaaaatagaccatagctcatctcggcatgaatgaagaatctcacattttgaagagtctttttgatgctcagggattcatgtaagcaattatttcttatccctaacacaaataatttgtctcggcttttgtttctgaaaatgatattttttttccatttttctcagagtgcaattaatcacgatgccataatgcatgctaatgatgaccagaagcttgacgccaatcggaagtcatgatagttttttttggttgctagttcgactggtaagagctggtgctgccgagacaccatcctcagtgttcttgaagtttaagtcaacactcaataggcattggtttatttagttcttctcagccatcagaaacttcaaatagcagggccaaagtctgcaaacttttaggtaggatgcacttagaacatctcttgcatattcgctacaaagaaaaagatgatctagggactagcttctaatcacacaccaagtttatcatagaaaggtcatgcatcaagctcttctactaggaacattatcatgcaacctcaagtcctaatttaccaatatgcaccttcaggcttcagccagctcaacaagcattaaccaggcattttaagaactccattatgtccaaggatatgctgctatttaagaatctgctgaaggaaatagcaatgttgcaaagatgcaaaaatgatgcaacatggatgctcaaaccttactaccagtaattttagctgtacttgagtggaacaatatttggctaggtctggtgtgctgcataaattagtttcattcagataggacatgcaaattagagatagggggaatgtttccaacatctttttgaaaccttttggcattgctgactgattctttttgtaagaaaggaacaaatctgaaacaagagcatgttaggtgacatgtggcaaatagatgaatacaaacatttatcaccggaaggattggtggcgatttttttttttcaaaacaaacttgtgggaggactgcggcaattcgttcttcccccaacttgtagtgttatacacgaaacatgataggcatgttgaagcatgaaaatacgtccttcacactttgttttttcctcattttttagatttccagctgcaacaaatttggtgcaaaattgcttatggggacctggttggactggtgaaaggaagctcaaacaacaatctttatttaattttcgtttgctttgagacaggaagaagtaactgaaataactattccctccgtactcgtaaaggaaattgtgttggacagcgacacggtctccaaaacacaactttgacttcttgtttctataaaaatatttattgaaaagtgatatatgtatacttttatgaaagtattttttatgacaaatctattcatataatttttacattttcaaactcaacaacttgagagttattcatgatttatatttcgaaagtttgacttaaacattgtcctaaacgacttctaatacgaacgagtatggagggagtacttgactaataccaacatttctttatcatttaatttttttttgtcttgattgccaatgcagggccttgttattcagctttgatgtttcgtgtgttcgtttcacctatttcctattttacattttcctgatactatattatcatcgaccttgttgtctagcaccaattctatagccaaattttggtctgcatttcaatcacttgggttcaatcacttgaccagattacgccattgacttttatgaaataacgtttgattatttgtcttatttaaaaatttggtataaatatgctaaagaataagtcatactgatacggtatcatctatttaaaaatgagagtactatgatacgatgaggttttctgcttcgaacatcagatgctagatgacagtagatgctagatgacagtggaaacccttacggatgttaattttctatgcccttgtttagttccaaaatttggtataaatatgctaaaaaatacctgtgcgttgcaacgggtgaaggctattttaattttattattgttatatggtttagttaaaatggaattcactgtgagagttaggttggatatatatatttttagaaaatcatgagctgcagttaagagtagttagcatgcgagttcttttttaaatagatttcttatatgatttcttctgtattactaaaagcataacaataataaaccatataacaataataagattaaaatagatttcatccgttgccacgtacgggtattttttctagtaatatgtataataggtaaagaaatacaaatattacatatttaactggtgaatcaccaaagaaaataatgaatacagttaaaagtggcttagtgaaaagggtacacaacacaaacgttacatgaaaaacgcatgggttgataaaattatcaaattcatcataaatcatgtacaggatcttctcccgtttatttataccaaaaagcagagaatacaacagaaaaaaaaatcattaactatttagctgggaaggagcaggaccggccaggcaggaagaagcccaagaggcctagggcgatgggcagatggcccagctggtaaaaaaaaaaaaattcaggactcacgagcgcttcctcggtcagatgcagaacagcgcctgtacatctccgtctccgagcgacgtgcggcaaccaagccgacgcgacgatggataaaaaatgggacaacgtacgaaaatttgagggcaaaaacaccttgcataaattaagttgcaacaaaataaataatatttatataattttttaataagacaaatgatcagacaaaaatcaaccaacggtatcatctatttaaaaatgagagtactatgatatgacgaggttttctgcttcgaacatcagatgctagatgacagtgaaaacccctacagatgttaattttagttctaaaatttttcttcaaacttttaacatttccatcacatcaaaacttttctacacgcataaacttcttaacttttttgtcacatcgttttaattttaataaaacttctaattttagcatgaactctacacaccctatgtctacccgtgttgctagtcgtcctggttttcttgtacgtcaaagaagtgctgctagtcattaatgattgaccccctatgttgcagttactgtttggaaagtcgtacctcatcatgctcaaatgttctgcagtgtacaaagtagtgtatgaatgcagttctctactactatcacagctcatgtgaaatgggactccagctgagaaatgcaggacatggaacttcgattcattgcataagccctgcatagatatttttcaaaagatttattcatgatgggcctccctaataaagcagcggacggtcctagagacacatggcagaaatatcttactatatactagtatttagcaagtaaaaaaaatgcatttaactttgtgttcgttcaataattaaggagacgactacacgtcggacatccggagatttgtaaaactccggacggtgtttcactacgtgttaaagagatgtcgcaatgtttcattgtttcaaaaaaaatgtttcaccatattttgcaaaacgtcggacgttattgcacgaaatgtttcacatgttacaccactcgatgaaaaatgtttcaccaattaaaggaaaatgtttcatcgcttgaacgaaattgtttcaaccaaatacaacattcgaaacacaccaattgcaacacgaagaattgatatatgcaacatcaaatcaaaagaaaacgaaacaccttaataaaataaagtgcaatagagataaataataggctgcaacatcgttaaaaatccaaacaaaaatgaacccacctttgttttcttcatctactccatccgccgaaatcaagttaatgatgcagcatgggagaggtaatggctagggaagaacacatatgagcagcctcgtgagaggagtgaccttagccagggccaccacatctgatccacgccgatggcaagtccagtgtctccctccccgacatcctcacgttctgccctcctgctgccgctattgtgtgggcaccggcgaggtcagcatcttcttgctatcttgcatcaccttgccctgccgctgcagccatggatgcctccgctatggaagaggtgaataccgtaccgaggaggaggaggatgcgaggatgtggtggcaacaggagcacgcgacggggaggaggaggaggaggaggaagaagcaaggcatgaagagagccaagaacacaagcaagcgaagagccgtgtgctcgatggctggaagtttcgaggaaggagggagagcgagaggaaaaaagttaatagaaaagatgtggaggagaaggtagttggagttttggataaggatgaagccgtccgatatttcacatgcgctcggacgtacgtcggaaagcatttttgaataattaaccctaggaactgtaccatttcaacaaactaagacaataatttggggagggataagtcagacttttcccaaatccaaatgataaatgactgattggagggacatcaaagaaatgtaatcctatggcaagtaaaaaaaaagaaatgtaatcctagatattattttcccctgtggctgtgttgagaagagtttaagattataagaaaaaaactgattgaatagttaagtttctaataaactagaaaagttagatttcataccttcttgcttcttgtttattttctgaattttataacatagattctaattaggttacgttctttagtctactttccctaacttcactttcctcgtttttctaaatggcgtgttttttttaaaaaaatttctgtagaagagttgcattaaaaacttcatattattactagccacattcgtcacccattgcgcgactatcatgacttttttcaatctctatatgtggactatggcatatgccactaagaaggactatggcatcctctatgtttgtcgtcaattttacattcatatgttgaataaattttacaacatttaatataacctaccagtgcatttgttatagtaaattcattttttactatattcaccttgttgcaaaccccgaagctaagagtttgtttatagataactttgtacttattgtatataaattttacaaaaagaattatattattgtatataaattttacaaaagaatcacatgtttaaggttattcataataattgcaagaaatataccacaaagccatgaatgcattatgaatgggttttcaatttttgtgtttgtaaatgattgagaaatgatattaatatgcatccgttgacatgtttaatatcttaaaaccattttttatttggtaaattattaaaagtggtattaagaaaagtaatctgtctagagtggtaattatctttcataaattagaaactcgcatataaattatctcttaccgtaggtaatttaccatgggcattaagattacaaatttaatcatgtttttccatttgaatcataatttacttgaatatatatatatttttcttcttttattcaatataattttgatcctcctatcttttacctttgttatatctcctattctatttttgataatcatgttattgcattgcaattatatttttcatattttcaaatattttactctcaattataaaataaccagtgtcaactcagtctctaatgcgttaataaaataaaaacccttaaattaactaacttcctttctgatcaaattacatcatgtgtaaacccaatagctacggtctatataatagtaacaggaagcttagtacgtggcctttttttttccatttgactataggtctgctactatgcttcctttctctagatcctttcccaagacctgaaccctgacctgggtcatcttttactgtccaatcctcactctagatccgacgttatctattgaatgcatgttgcatccaacggctctgattattctgatgacgtggcaaattgtgatgatgagaccacttatggagaaaccatctttactcccggttggaaacccccatttaatcccggttttccaaccggaagtaaggatccaggactaaagatgtctctgttaaaataaccgggactaaagatacatctttagtcccagttggtaccaacaactgggactaaagagaggggatctttagtcccggttgatgttaccaaccgggactaaagagacaatagcggcagtaccagatggtcgccttttctttttcttttttcctttttattttctctcgaatcaagtaggcaaatccccaaatcaatcccccaatcaaagcaacatcccaaattcatatcaccaaatacacatcacaaatcataaagttacttatacacacaaatcaaatacatcacaatatcctaaaaaattactcaaatacatcacagatccaaacaatgaatcacaaatttgtatatctcagtgaatcacaatttttttttaaaaaaacaatgccgctgctaccaccactcgccacgaccgccgggcgcggctcaccgcccgccacggccgcggccccgccgactgccgcccaccacggccgccgtcgaccgcc

SEQ ID NO: 4919 - DNA, 32568 bp, Oryza sativa
gccgccgccacaaagacgacgaagaagaacgccaccaccgccgccgccgccgaccaccacacgcggcggcaccgctcaccggaacacggcattgccatggaatattaattcttcaattgattcttcctgatcttcttgttcttgttcttgttcttgctgttgctattcgatttcgagcggaattgtatttataataaccaatcgagaacaggttgatcatcgagaagatgatagaatttgcaggaacatgcgaggcatgttcgtggggaatgtttgagataggggacatggcatgttaggattcatggggatgtcaggctggccaaacactgcaataatctgcatgcatgttgcctcgcctggaatgcatttggatgatgaacacagttgaacacacacgctggtggctcgtgcatgcaggagttcgatcaagagcttaaaagaaaaataaaaaagaacttccatggcgagcgacgaagaacacaccgttgacctagctacctaccaaatgccatgcaacctaacaaccttcatgctgcatgcacgcttaattattggctagttaagcaagtggctaattaatagcctgtgccatgtttcttgtcgaaaaatagcaaagtgtcacatggagaacattgctgattagctagctaggtacagtacacactcgtatggtttcagttcagttgatgggagccaagaaagagagaaacaaaaatgggggttgacttgttattttggagttacctatatctggcagtcagatgtcctaaaacacctgcggtctgcagatgtgcagtagataggaacaattaacttatttttgctagtttggataagcattagaaactctccaacgtgtgacaagtgatgcttagtctatcccaaattaattttcataaatactactcactttgtaaaattatgggtaggattttattattattttttttggaaagttaattcacgtgttccaaaggaggcagcgcaggaggaatcgaagcactccaaatgtcaaactgttgagttagagcctgtttgtatcgttaccctacaaaaaaaaattggtagtgcgccctaaacaagtgataaatttgtacagttaaaagtagaaaattttgacttaattagcacacaactaagaccctctttattcaagtttagacttttaagttagatttttagcttatgtgttttataagcgaatggatatgaaatcttaagtttaatgatggagtcgtacctccaccttgcataaactaaaaaatgcttcttcaatataccttttaacgtaacagtgtaagaatggttcatggctttcaaaaaatcaaactaaaaagttgcttgtttgtttaagtttaatccttttacctcataaactagaaggctgattgtttgtgctgctttgcagtcagctacagctatagttggccataaggcccgaggcccgaaggcccggcccacggcacgcctttttggcccggcccaagcacggcacggcccgacttgggtcaggcccgtgctggcccggcccgaccgtcgggccgtgcctgggcctccccaccggcacgctgggctggcccggcacggtcgggccggcccggcacgatgggccggcaggccaggcccggtacataaagtatagggactaaaaatagacatataaatgtaactgtctaaagaatagggaccttaaatagacttattttagctatttatataccccagcccaaagaagagggaggtaaaatagactttttgtagctgtacatatgtcacagcccaataggagggaggaaatttagacttattctgaggaaaagcacgacggcccatcgtgccttcgggccggcccggcacggcccgaggcgtgttgggtcgtgcctgggccgtgagtccggcacgtgggctggcacggcacggcccggtgcgtcggtcgggccgtgccggcccgacaagctcggcccaggcacggccgggcctgggccgtgccgtgccgggcggcccacatggccaactatagctacagccggggctatgttgcatgtacagtgcaaacagtaaaagaaattgtgttgggcaggggtggattcaacgtgggggtgggggccttgagttcccccaccctctctggacctatggacaacccccaccctatgccctcttcaaaaatttcgccatggatgatagagtaggaggtgcgctaggtatctggatagctagaggttgaaaaagcgtgaaattgggccgatgaatgcatttgggccaggctcacttagaaaaggaatccccttaaaaaggaataaatccactttgactccctgaaatttaacccaaatttaatgcatgaccctcaaccgcaaaaccagatatcttgacccctaaactattaaaacctgtgcaatttaactcccttggcggttttgctgacgtggtgcctacgtggcaatgttgactggtatgtggcattgacgtggcgcttaggtggtatttgaattaaaaacttatatgtgggacccatttgtcattaaaaaaattttgtggggcccacatatcatcctctctttctttctctttctctccccttcggtcgtccgcacggagcacgggctggagcggcggcgggcgggaccagagtggtggtggtcagcgggagttgaagcgacagcggtgggttggagctgaagcgggtggaggcagaggagaagaaggcggcattggactacaaggtcgcacctcctcgcggtggcagaggaggaggagaaggaggcggtcccacgccatctgctcggatgtccccctggtaccctcgggccacactagtgcccagctcttggcccgccgaagctgtcaaccgccgcccccctcgatctcgttggcatcggcatcggcgctgccatcttgtcccgcctccttgccgtccctcgagcgctagctgccgctccagctccatcccaccaccgttgccgctctagctagctcccgcgtcagagagagagagagaggaaggagggagggtcgagatatccggtattgtggttaagggatacgaattagactcggtcactagttaagggagtcatagtggacttactccccttagaaaatacttctaggctgcaggcccacaggccacatctagcccccagcggcccagcccaagtttccattccccaatccccagccccaaatccctagcactagccaaggcagtgagctccccgtgcggcggcgcaagaggtgagcggcgcgggggaggcggcgaggtaacgacgagctgcgcagcggagcgcgctctggcgaggcagcaggcggaagcgtgcggcgcggcggcgggcggcggcaggtagcaggcgaagcgcgcggcgccgcgagcgcgagcagccgagcaggtgcagcagcaggccagcggcggcggcggaggctgcaggccggtgctggcgacgccacgggagcacgcgagcaagaggcaggaccaggcgagcaacaggcaggcagcagctggccaacggctgcaaaataactaaacaaggtatgtaatgcttagaattttatgcaaatatgcaatgcaactgtgattactgattacttaattggaaatttggaatgattcaatccattaacaatttagcacagtttctttctttctttttttttgtctagactagaatctcagcatgtcgaaaagaacattgttcaactattattcaagtggcagcagcagtactcctactgcatcagaggatgatgagaacacaagacaacaaaaattggcaagggtagagtttacttgcttagatattgttagtgatccaggaacgtgcaaaccaattgatgagtatccatttgagattagagatcaagtgaagagggcatttgttttaaggggtccaactcaaccagttggttatacatttccttgcaaatggcaaagtggtgaatggagatctttccaacaacgttggttggagatctatgattggttagagtatagtgaatcaaaggatgcagcattttgcttgtactgttatgttttctttgagccaggaaaacctgaaaaatttgggagtaatgtctttcaaaggttgagcgcccccccacccccccaccccaatctttcattcctggatccgcccctggtgttgggtttggtgatgctactgctgcagctgcatagccgcagtaatatctcccgatcagcccctagcttataagtctaaacaaaagaggatacaaagtgtcttagaaaatggaacagagggaacacctggtggtatacagtgatgcctagtagttaagtagcaaggatgacagtttcagtttccgaataaagtggagttcaaaattcaattacctaagcccattgggccatcttttccccgactcattcctgcatgtgtttcggcccaagtcccataaccaaaccatcaaatcgtctccgcaggcggcggcgaatcgagcggcgcggcggctgccaggcgaggccggccggtggggcgccatccagcggcagagcagcgtgctccaggctaaacctcatctctctctctctctctccgtccggcgttgtccacggcccaagcctcaaagggccacgcgcgccacgcagcgaggctaggtcaccggcgctcgctgcagcctacggtggatgcccgcgggcggcgtcctgggctggcgcggtggctgggggtcaccgttcccagttcaggtagcaagcaggtgaatcccaattttttccccactcaatttttttttgttcaattcgagatggtgaatcagtgaacgggccatttttatcctagcaagaataagttgggttaggctagaatgctagatcacttccatcctgaagaaatagaaatttgaagcaaacaagaacctcaactcctcaagtataaacttgtttacaagctttgcagatttgtgccaactagctgaacttcccgagcgattagatcacacatttttcttgcatttagaaacatagttgtatttgctacacaagatgtaatttgtagctgatttttttgctgttatcaatctttgaacagtaactttatttataactctgaaatcctggggaggtccatttggattttggttgatttctcctattttaaggaacccttagattgctgtaatgctgtggctgtgaggaatcaaatccaaaatcttattctccgttcatttagttttagccttttagatttttattttctccatggtgccatccttaccagtcttatccatctatcctttgtttgatgatttatgtgcttcttcttcagcgagcaagattgatcccaaggtgcgggtgcagattatcttccaaacatgtttggggctctactgggactccatggcacatgttaagtgctctggatcgcttgctattttctgctcctcaatcgtgctcattggctcacacatggacggcttcagttatgcacaaccgtcttgtacgtggctgtttcagcagtttttcagcagcagcagcatcggctattcgtgtacctgttgcaagctatgggacttctgcagcacaaagcacatcaaaggaccagcatggcagcaacatcaacagtgcgctaaaagttttgaatcttgtaccaagaaaggctgactatgacaaagtgggaggtccatgccatcaccaactaatccatgactgcatgaatgacatcttgggggttcaatcaaatcatactatacacaagggaaatggtgtcacttttaactcatgcagcaatcctgcacaggctaaatttgatagctttgtttcaaataatggctcggctttgcgttccaggactagattcataaaggaggacatgtttatgctgataatggagctgcacaggaaaggagaaaccagtacagatcaatctattttggcagctgccatgagttcctgtgctgataggcaaatgttcacccaaggcacacagcttcatggtctattggttaaagttggctgtgattcaactgtctttattggcagctcacttatcaccttatattcgaggtgtagccagttggaaagttcgtacttggttttccagaccatgccaaccaaaaacacagtgtcatggacagcaatgatttctggttttgcgctacataatcgggttgaaccatgtctccatttgtttgcgtcaatgaggctttcaagttgcaagccaaatgacatcacatttgccactctttttagtgtgtgcactaaccacgcacttctagcacttggtaaaagtgttcatgctttacaaatgagaatgggtttccattcatatgtgcatgtttccaatgccctgctgtccatgtatgcaaagtgtgggtgcatagatgaagcccagtccatatttggcttcattgcctgtaaagaccttgtttcgtggaatgccatgatctttggatgttcgcagtatggccttgctaagcattgccttgacttgctgaaagaaatggagaggcaacacatagtaccagatgctctctccttccttggtgtcctttcttcatgccggcatgcacgccttgtggaggaaggccgacactgcttcaagacaatgattgaacatggaataaaaccagggctcgatcactactcatgtatggtcgaccttcttgggcgcgcaggattgcttgaagaagcgtgggatttgatccaaacaatgtctatccctccaaatgccgtcatatggggctctctgctgggttcctgtagggtgcatgggaacatttcgatcggcatccaggctgcagagcaccgtcttaaacttgagccaggttgtgctgcaactcatatacaactagcaaatctgtatgccacaattggttgctggagtgatgtggccagagtgaggatggcaatgaaggcgagaggcctaaagacgaacattgggtgtagctggatagaagtcggtgataaggtttattccttcacggcagagaacagatcaaagagccaccaagtaaacaatgtcctggctattcttgattgcttgcaagctcacatggaatgcaagtatgatatgcttacagaaagcctggagtagtggagtgtgatggctgtgaacatgtcaagacgactataaacactgtatatattaagaggaatcctaaagaagatccattgatgccattataacacctaaacattatgtgtatggactgattggtataaagatctgtatggattgacaagattcacgaccaacaagacatacaggtactgtattttccaagtctcttccagttttgttcctcatttgtctaagaagtgtggggaataagtattcttgcattctgccaccacccaacgatctgcaatttatgtcccccatccatgttacattttcttgttagtttagttctccaaaacacaggtaattagaagaacaatattcagattttttttttgttttttttctttaaattctttctggccaaggttttctgacttaattgatgtaactgctacgagacttcctatgccttcccataaaaaaaagtacagttcattcatcctatctattcattgtgtagcagcctgttgtggcggatggtgatggaaggcctgctttccagcttgaaggaaagaactgaaggattgaaggttaagcggcataaacttgtcatagcacatctcatgtgtctgataacataatgcgttgatgtgtcatatgtgcaatcagcgatcttgtactgcttaattacaatggttagaaatgtagctcttgacaaagtaatgattcaggagttctgataattgagaaaacaagacagcatcgtctaaatgtcagccgatggcttctctgactgatgagtatcaacaattttcatggaaacgaataggattacaggagtgtcaacgaatatgatatttgcggggaaattgaagaaagtttttaacaacatgccttcccagtcttgagttagagaattattgcatggcccattttctttgggggtcaaattaggtaggtggtgaatttgacaatcagcatgccgttagtgtcgaagacaagaaatgattctttgtattggtgctgaggaacaaataaatggaaggaattctactcaaaatctcaacaatctaagttgaaaggtaagatctccaaattaaacgctggggataaaaaaagcaaagttgaaagaggggtgcaaatgaaactgaaggcgcagtttcatcttctttagatgagatgctatcatccaacctgctaacggaagtgatttagatgaatattaagtatgggtatataaaacaagaaaactattagtatatgattaattgagtttttattatttcaaacttagaaaataaattaaaaaatggttttatctgatatttcaaagcaacttcgtatgagatgtaccatttaacagtttaaaaaacgtgcttacaaaaatcgagataaaatctttgaaacgaacttggccacgtgtaacaaagatttagcatgacagaatggcacaaattgaaaaaggtaggattgcaacatcgatgcgacactaacatgtcaagtgcgtcttctttttgctacctaccgtgctaaagccaaaatgtagtacaaagccctctgcatctaatgaccattaccatgcaagctaaacccatcaccatggcaacggcgtcgatgctcctccggagcctcctctgcctcgccgtgctcgccgcggccgcggccgccgctcagccgcggttgcagtgcctggagaacccgccggagctgacggccgccggcgacggcgaggccggcgtggtcgtccaaaacctgggaggattcgcggcctacgtcaccggcgccgcccactccggccgggccatcgtcctcgcctccgacgtctttggttagtagtctgtgtgtgtgcatgtatgcctgatttgcttactgatcattcactgccatcctttggtgattatcgattgattagccgttaattgttgctgttaatttggtttcttcaggatttgaagcaccattgctgaggtacaaaatcttcttttcatttcctttagcttcttgttcgttgtcatcttcgacagtaattttcttcatttcttcactctctggattataggcgcagattgtttattttattaacataacaaattaatattttgaaaaatgaactttgcaaatatctaataatgcagtagaataaataatattttttaaagcatggaccaaataatctgtagcaattatccgggggaaaatctaaagagaacagggcatgacaaatacttgacacttgaacaactctggaaagagactgatttaaaaaaaagaaaaagacagacatggcttaattgtgtaccatacctgtttttcttgtgacaatgggttcaggtcatttttagtgaactatctcctatctttctgcagtgacttttgtgagaaggataacaggtttagactttagacaccaaaaggtgcaaaagcaaataatcgtccattcgccctcaccatccatgagcttgaacaaagaatattcaacattgctatgtacatgtttcttccgtttcaaatactccctccgtttctaaatatttgacaccgttgactttttagcacatgcttaaccgtttgtcttattcaaaaaaacttttatgaaatatgtaaaactatatgtatacatgtaagtatatttaacaatgaatcaaatgataagacaataattaataattacttaatttttttgaataagacgaacgattaaacatatttaaaaaatttaacggcgtcaaataaacggagggagtagttagtatcttttttttttttggagtaaccatcaattcatacggagaatcagaagcgtatactcatttttgctattttccatattctgaccttctaatgatataaatatgttaagcggttgaaatacatcatttactatcaatgtgcaatttcattattttaactactctacttagacaacatatatgctaaaactttcatcttctgtatccctacaaagttgaagataaatctactactccttccattacaaattatttgtagttctagttttatcctaagtcaacaatttctaactttaacaatcattttttttaaaaaaaatgtatattttaatgacataagttttaatatgttttttgattcacaataagaaatacttccaaatatgcaatccacatgtatttaaattatacaaattgctagttattaataggctaaaatagaaatatttgacttgggacaaagttataacaataattaatttgaaacaaaaggagtagtactatcattgtatactgtattactgtgcataactatgttcattacatgctttctaaaacatcatttctttaggggcaaacgctgtcgtaactcaatagtcaatagtaatatctcattgctgtccttgtaaagctgatttatgaatggataaccaagcaacgatccaatttcagaaattcagtttttctgtaaaaatatcgtggattccaatggtataacagcaatgatttcttcatgtggattgtactaaggtttctgtttttgattccaattttaagtgcttcctttagcttgaaagtattgtaaaacgtcccaactggattcctttcaatacaccttacatttttactcccattctagattgcaaagacaacttaaaatcaaatttgtggttaataatgctgacaattacaggaaaatagctgacaaagttggtgaagcgggatattacgtcgtggtgccagatttcttccaagggcgaccttacaatggagacccaagtataaacattacacaatggatcatggctcactctccggtaattgttttcaccaattacatagcttattcgacgacgattatcgaggagtcaattgatattgatcagtatattcaattgaaatttcaggtgaaggcagctgaagattctaaaccgatctttgctgctctaaaaagagaagggaaatctgttgttggagttggaggttattgttggggcggtaagcaaaatcgatcagcaaaaagaaaatgtctttacatatcctacatcagtacattagtaatacatacactctaaaaaactttgtaaattcctagttaatttccatatctagacttaattcatactattatagtctaaacaacaaaacttcaattgacaggaaagttagctgtcgaggttgcgaaaaccaatgaggttggagcgattgtcatctcccatccttcatcggtgactgctgatgatatgaaaggtgaacttatctgttttggtgctattgttgcgcagtatatagatgaatatatagttaactgattcatgtacgctgtatcctagtagtccctgtttttcttattccaaaatgaccttgacacagatgtcaaatgccccattgaaatccttggagctgagaatgacgctgtaacaccaccaagattagtgtaccagtttgtgaatgccttgcgccaaagacctgaggtgagttcctgttgattttcattggcacttgatgccaaatgcatcagcatagtcccacggtagacacacacgagaaaaatctcccactgatgatgagaaattgaaagatcatgctggctctatttttctttttgaggcaatactggatctagctaattagtaacattaatgaaaagtccaaacactagcacaatgtcaataaacaagtttacaattgtttcttaaacacaaccactcaatgatctttaagaaaagaaacaagttatgaagaggctcttatggattgcatctttgttgcaggttgattactttgccaggatctttccaggagtggctcatggctttgcttgcagatataacgccagcaacccgtttgctgtcagaactgctgaacaatctcttgccttaatgcttgactggtttgagaaacacttgaaatgacattagctaatcatgcatgcaatgcaaggccagtgcaattgtttatttccatcaaaatacattgctagtgtccatgtatatcctggtgttaagtgaaacttatataaataagcactagtgtaaagtgaaagtatgtgttgaatatggtgcgaagtgaaacaaagtgtactttatgaagtgcaaaatgcaaactctttttgttccgaagcgaccattagcatggcatattaaaacatctttttgtaggagaacaaaaataatgtgtgcctctgttgccattttaactagtcgatatgttcaatcaaatgttgtatgctactcatcttaagcacagcatatattgggtacctcttgactgtttcttatggccacaaattagacagatgaaagtcgtgcttccaagaaattgctagcccttaaataggatggggacttctcctgaagctgtagaggaaacaaggaattctgattccaaccaaaatggatgggtgatgaaccatttgcgtgcaaaacacagaaaacattcccagtatttcatctcctattgtcctaagtcaacaggcaaaagatgacaaatcatccagccaggttgaacagttaaaaaaactttttttgtttgaaaaaaagctaagatttaatgtcctccagggagttaggcatatctggtctcaccggaagccagtggcgaggttgctgtagatctggccagagctgtgtatcctgcctccgccggatcgtggggatggcatcttcacatgagcatatctccacctcatcctatatatgtgcgccgccacatccagtgccaccccttggttgggttccatcgaggaggtcaagggagattcatgttgccttaagcttttgacaagggtcgaggggcagctcttccagttcatgtaggtgcagaaaaactatcacaacttccaagcatccaaggttggcgtgtgaagcttctgtctctaggtgcagcttctggtcgtcgttggcattcatgattgatcgcactctgagaaaattaaaatatattttagaaacaaaatgttgaggaaaaccatttgccatagggataacaaattattgcttacatgaatccctgagcatcataaagacccttcaaaatgctggattcttcatgcacttgggcagagctatggtatattttaccctttgaattcctggatgaatttggtcctgtcccggaggttataactaatcttgttgctagtcattaggatgcttggtattcaaatcttcagaaaattggctgaaaatattggatgtttaaatcaaacctttactgtcatagtcttgcagcgtgaataaattcatcatgttgctggctttaaaagaactcctctggtgagtgcctttcagtactttgtatttcagaaaatgctcgtgtatttgccaatgatatagacttactcctctagcattccacttataatcagtctatatactgtcatatctctagcttgccgaattctctatgcacgttcactagcctaatccacagagaatttaatttgttaagtagagtagaattaccattaaaaacaaaactacattaaatgacaaagcgttaccatgctaacaatagtatcggtagagtatgatagaaaattattcatctaccagatcatctctcactggcatccaatcaaaacttggcaatgaggttagaaattttgcatcgtacggcgacattgtagcaataagggcatatcactggcatccagtcaaaacttggcaatgaggttagaaattttgcgcgacattgtagcaataagggcatatcactggcatccagtcaaaacttggcaatgaggttagaaattttgcgtcttacggcgacattgctagcaataagggcatatcaaaacattaatgtatctcctctgctaccatatcttaatgtctagttgggtgtttcttataagattaattttccttttaagaaattaagcttctctcagattaagcaatgagttcaacagagaaaaaaaaatctaatgttagaaatttcaaaaagccaagcgctagtgtctagcgctgcctccaccgagagacccgactgtgtgcctataggtgtcacgtcctgataaattcatcccgaaataaaaatcattttctaaaaggaataatagaattaattaaaattcgaaaagaaattggcaaacattaaaatacgtacaagaaaaattcgaatgtggctcggagaatttttgttaaattcttcttggtctaaaaaggagccctcaaattttacttgaattttcagagcaccggaaataattattaaacaacaaaaacaattatcaaagtttaataaaaagaaaatctaaaaataatcctccttttcttttgggccaattttggcccaaagtcctccctctctcccctcggcccgcggccgaagtctccctttcctccctctcttcctctccctctcctcctctccctccttctcttgggcctcctctcctcccctcccggcccactccctcctccctctctctctcgggccgttcctccctcccctcccggcctgcccggcccaggccgccctgccccctcccatctgggccgtgtcccggcccagccgagcccccccaaaacggcccgtatcgtcccggtaacccccggtaaacaccccctcgataagcgcccccgtgcccattgggggccccccccccggggcgagtttttttgttcccctcgggcgggggcggtacttttgtttttcgcgaaaaccataactcggtgccttcccaaaatccgcctaaataaaaccggggattccaaaattaaataggggaaattaaaccccattgaatcctctgcaattccccccaatttcccccttgaatggcgcccccaatcgtcgggaacggtcgcgcttttcccggccaccaaccatggccgccggccgccattcccgtcgccgttccgccccctcccgagcccggctcccgcccccatcctataaaatggaaccccctctttgcgttctattgttttagccctttctcgagctcccccgtggccgcagcacccctccccgccgtcgccctctctctcccgtgccgctggacgcctccagccgcccctaccgccttgcctgagcgccgcccggtcgcgccgtcgcctcctccagcgtcgccgccacctcctccaccccggcctgccctccgtttcgcgcggtgaccgccggaggcgcgttcccgccgtcgcccttctctttcctccgcgccggccgcctccagccgcctctccctcctcgccggagcgccgtccggccgcgccgtcttctccctcggcctcgcagccacctcctctccctcggtcagccctccgtttcgcgggggaagcaccggagacgcgtcctcgccggcaaaacagtggtgttgccgccactgttccacctccggccgccactgtcgcgtttcccgtgcgccggccgacgtcgccaccacctccctcggctccgcgacgccgccctcatccccggcatcacctcctcctcacccgaatttcgccggaacaccgtcgcccgcgccggcttctccttcctcctcagcggcatctcctccggctgcccttttcgccatgcccgtgcgtcagccggcgctgccgtcccctccctcggcacggtgacgtagccctccacctcgtccacccctcggtttcgcccggaagccgccgcacatcgccgcgaacctctccatctgcctcgccggagttgttcggccgcccgtccctcctcgcccgtgcaccggtcggccacacctccaccacctccggcatcgcagcggcaaagccatcctcggcattgtttcccctccatccaaacccctccgcggtccatcatcgtcgtctccgatcgttctcgtcgtcgacgtcccgtcggtcgcccggctcgtcgtctcgcggcgccgcctccgtcatcgtcatcgcagcggcgtgtcccacgtcgtcctcgtctccgtgcagccactgccggctgccctcatcgcctcctcgccggccccggtcgtcgtcgtcgtcgtcctctcgtcgttcccggtcgttgtggcgttcgtccctccgtcgagccgttctcgtccgtcgtccgcgttcgtcaagcgagccgccgcagccccatcatcgtcttcgtcctcggctccgcgtcgtcaagcctcgtgccggccgtgtctcgccttcgttcaaggatcgccgccgaagtcgttccctcgccgtccgtctccgccgcgcccgttcgtcgttgtcgttcccacgcctcgtcgcgtggtggtaaggttccctctccctcgctgccccgtcctcgtcctttcggtgtcgcccgtgctcgttgtgcggttgtcggccccggtacccgtgtaccggtgtcggtagtcgttcacgcgtgcgggtggtgaccgtgtagtgtccgcgttagtgtgcccgctcggtagccgcgtggtttccacgtgtgcaggccgtgtggtgtctagtggagtccgtttgtcggccactcgcctcggttgacacacggggtccgcctccgttgacccgtggaccgtctctgtgtacccggtctaccgcggtcctttaggttgacatgtggggtccgcatgtcaacggcgcagccttcctgtcttttccaggctagcgtttacacatgttttatagttgcaaagcttaattataataatccgcaaatctccatacaacagcattaaacttcggatgatcatatcttggtcatacgagctccgaatcgacccgttcaagtctcttaatgtttgttataacctaaagaaccatgtgctttctttttatgtattgttattgcttctttataggcttgtagctttgcttgtgtgcttcgcgtagcttctgtcgttccggaggttccagaagcgtggttcgtggtcgtcgccgaaggttcggaaggccgttctctctgagaaaggcaagtcacatcatccttgaacatgttgaatcccagtttataaaattattttgatttaaattattgcattatcgctttatttaaattcccgcgtgatcactgttttatttagccatgcctatttacctttgttataaccttaatattattgttattgatattattaccttgttcaccctaggataaacaaaaccccaactagtgggtattctattcatggttccactagtatgaatttaggtagatgcttcgctgattaattaggcaatattaggtggttttataactttagactttgggaattctcatatcatttggacactatggaattgttggtttatggtggaattggacatacacctctcttcctctttcaaaacccctaaaacctgttttcggtggggtttgggtgcatgccagttgtgggaagtagcaccccggccactataaggattaagctcgggcctctgttgcaaagcactaccgtacttccacatgtctagtgggtaaggcttagtttgtggctcagtctggtcataaacaaaagtacacggatggagatggatgaagtcgggggtcgatggacattctctaggacaaatgaaggctacacgagctgcggcccggtagtcgagatgtcatggcacagggttggtgccctgctgctaggggctcagtcctgcctgcctgtcccgaaggttccggccgtaggtgggattgggtcggtactcttgtctatggctaggatgggttggaaactatgtcacgtcttccgtctgtataccgtggtggtatgtggcacgtggttgcacgtgaggaagatgtgtcttgtgggtaaagatgtacacctctgatcagagtataatctattcgaatagccgcgccctcggttatgggcaagccgagcaatgtacccaagtcagtgttataattcttaaaatttggtcaacaactaaaatgtggaatggttggcctaggttggcttgggacgagctgggacccagggtcgggttgccagttcggtctgaatcatcgtaggccttgggttaaggcaggttcgtgtgggttcacggccttgtttaataatactgtgtagctctaggatcgtctttataaaatggctttgggcaactaagtgacttttaaatgctgtttactgcaaaacttaacccgtatattattatccccttgtactcccttgcattaattatgcatctccggtgtggcttgctgagtactgtggttgtactcattcttgctcaatctttcccctcttcagtaagagaagctttggagaagatgtcttaggtggagtcctggcttataccccagttgagcgcctgtgaagatggagccgtaggcccgctagtccgctgctgtttatttttgattgtcaggcctgaagcgcctttgtaataatgtaaatattatcgatataataaagatgtgccttttgtatcatgtttgtttggtgtaccccggcttttcctgggacggggattaatacactagcgttcgggaaaaggcaattttcccggtcgcgacaatagggcatcttttcggcagggggtcgcctgccgtggggatcttttcactgctccatttctttttcttttttttcagctggccggcagggggtcgcctgccgtgcctcagtaggggatcttttcactgcattttttttttgcagctgaaacggtagggcggatacacgccctaccgctgcccattgcagtcggggtgggtgtccctggggtggcgatggaatagaatcaaatcgagctaataaacaggtcgtgttgtctcagaatgggcgatatggtacaaaactcattaccggatggattcagtcggagccaaagaacagcgcgcagagcaacctagggctaggagtagaggtgcgtggcatacctgctctccactccacgtcgagggcgccgtcgaactggccgtgctggtgaagtttcccgccgcccggccgtcgccgtcgccgtcgccgctgacggccggatccagattctccggcagcatcaccagctggctgctcgccgccggtcttggggaagcggcggcgtcgcggagagtggagagaggtcgggagcgagcgagaagccgagaaggggaggaggaggatgacccatcgacacccatcgactcaggcaaatgcaggatgctgggccatgagtccacgatgagtccatccttctgacgacgcacgtggggccatccttctgacgacgcacgtggggctcgagcggaagctttcccaggcccagtttgctactgggctgatttatcttgtttcgttttttgagtttcactcgcatccttcaaccacaaagaggtactatattgcatccgtcaactatcaaaacaagtggaaatcgagtgtcatagttatttaaatgacggtttcgactgatttggtgtctacctaaaatacccttatggacatataaggttaacggttgatttatatcaagtttcaaaaaaaaatatgaaaacttttatttggcctccttacacagtataaaagtttgtatataagttttaatttttttcatttctattttttaaaaatataacttatttgttatatgctatataaaatattttttgtgttgttgtttttaatataaattatctttcatatgcaacataagatattttttgctattatctttcgtgtaagctatttctctatgatatacacacaaaaatattttctctgatatacacacaaaaatatatttttaaaaaataaaaaaactaaaacttatgtacatacttctttgttgtgtaaagaggccatataaaaaatttcatattttttgaaactttctaatgagataaattgattgttaaccatgtatgtctctaaggtattttgggtattttttaaaaaagaggcccatcataattgataaagtcatcagtatatagtagaaagagataatgacagtggtaaatcgttgaactgggataaactcagtagcatagaatagattatctcaactttatatacacatataaaaagtttatacgtatgtatgtaaagtatatacgtacgtacatataatataaatttttcatatgtatatacttttgatgtataaaaaatatatacacgtataccaagtttgtatctaatttaaacattcaaatctttcaactcgaaaattttaaaaaaataattatgtatagattttaaaactttagattctaagttttaactttcaaattcaagttgaaaacttccaagtcacctatttatttcattcctggttaaggacgtaggattggaacgtcgatgcgacactaaacatgtcataggtgcgtctccttttgctacctactaccgtctaaatccatgtacaaaagctgcttcagcaactatgatcagtagagctaattaattaccatggcgccgtcttcgttgctgctctgctggagcatcctctgcctcgccgtggccggcggcggcggcggcggcgctgccacctctgccgattcgctgcgcttgccgtgcctcgacaacccgccggagctgacggccgacggcgacggtgaggccggcgtggtcatcgatgacctggcaggcttcccggcctatgtcaccggcgacgtccactccggccgggccatcatcctggcctccgacatctatggttagtagtgattatcaactgattatcgagtgatcagctgttgtcgctgttaatttggtttcttcaggattcgaagcaccattgctgaggtacagtattcgtcaatttctttagagagaatcctttatatgccactgaaaattggtctgaacccttatatgccattgaaaattggctcttcccttatatgccattgatacaaatttgcacaccctctcatgtcactcccgttagttgaccgtgtgttgaccgttaattctcaaggaaaaaagacgtatttacccttctaaatatagggcatgcctaacaactcagagagggcaaatatgtcttttttacttgagagttaacggtcaactgacggtagtggcatgagagggtgcacaaatttggaccaatggcatataagggaagagccaattttcagtggcatataagggatcagaccaattttcagtggcatataagggattatctcatttcgttaacctcctcctcctctctttgtcgtcgttgtctgtcatctttctccgcaattttcttcattttctccacaaatttagtgaaagaaattaacacctgaacaactctagaaagagactgaattcgagggaaaataaacagagtaaacatgacaaataattgtatgacttaaaaggtgatattgtcatttttactcaattatccctatctttctgcagtgacatgcgtgaataatagttctcatcacccatgaggccatcatcagtgtttcaacaaataatattagacaatgctcatctttcatttcaaatagtttaatttcctgatctttttgggactaatcatggttttaaactattccctcccttcatattataggccactttgggtttgacctaagtcaaatatcgtcaagtttgataagtttataaaaaatatagaaacatctacaacatcaaattaatttcattcaacaactatcgttcaatatattaatttttctataaatttggtcgaacttagagaggtttgacctataacaaacctaaaataatttataatttgaaatggatggagtagttaccaatgcatggagaatcagaagaatatatactcattttgcaatttttccatattctatcctcccgctaatgatataaatatgtcaagcgggtttaaatatatatatcattttaatggaaaaattcatgtccacacatcgtgcatatatatcaagtgacaaatacagtgaaaattattgaaaatactgtacatgccaataatattatacctatgtgtaaagtctatgcattatactgaaataaataaaaattctgacagttttacaagtaaaaagccatcagattttgtccttagccatcagattttgtccttaggacaaacgtagtcggaactcttttttttgggcaaaaaatgtgtaaagtctatgcattatactgaaataaataaaaattctgacagctttacaagtaaaaagccatcagattttgtccttaggacaaacgcagtcggaactcttttttttttgggcaaaaaagtgtaaagtctatgcattatactgaaataaataaaaattctgccagttttacaagtaaaaagccatcagattttgtccttaggacaaacgtagttggaactcaatgaaggactgagaatgatccaatttcagtgttccactttctgtagaaatatcttgaattccaacaatacaacgacaaacccgtgatttcttcatgtggattttactaaaatttatgttttacgttccagttttaagtgcttccttgagcttcaaatagtacgacatcccagctaaatttatctcatacaaattctacttttattcccattctagattccaaaaacaatttacaagctgatgtgtggttactgatgctgacaatgacaattacagggacaatgctgacaaagttggtgaagctgggtattacgttgtggtacctgatttcttccatggacaaccttacaatggagacccaagtataaacgttacaaaatggatcacgcttcactctccggtaatttgtttcaccgtttacatagggggtgtttggatcctagagatattttttagcccaccccttttagccccaaaatagcttaaggggatccaaacaggaggaagtttacatcttgtagacacgtggtgtgactgttgtttctttttttcctctatttataactttttagggctatggtcttgtaattttttaatgctatatcaatatgaaatctcacatggttcgtttcaaaacgccaagtaataatgatcatagttgcattaaaaaaaccttttctagatgatgcttattgtggagttaattaatggatattgatcagtatattcaatttgaatttcaggtaaaagcagctgaagatgctaaatcaatttttgctgctctaaaaagggaaggcaaatctgttattggaattggaggttattgttggggtggtaagcgaaactaaccagcaaaagaaaaatgtctttacatatcatacaccagtacattaggattgcactataatttttttcgtaaattcctagttaattagattgcacagctagatttagttcatattatagtctcagcacaagttcaactggcagcaaagtttgctgtggaggtggccaaaaccaatgaagttgaagcgattgtcatctctcatccttcagaggtgattgctgatgatatgaaaggtgaacttaacttgttttgatttgatgcttaattggttgcactacatatacatgaattatctagtcattttatgtaagttgtatccaagaagcctctgttttgtttactaaattcacattgaacgcaggtgtcaaatgccccattgaaatccttggaggtcagaatgaccctataacaccaccaagtttggtggaccagtttgtgaatgtgttgcgtcaaacaactgaggtgagtttttttttttttgagaacaactgaggtgagttgctgttgggtttcattggcacttgatgccaaatgatctttaaattttgtaaaaaaaaattacaaaatagaaagcacaagaataactgaaacagagtttattcaccccccctccccaagaaaaaaaaagaaacagtaaacagagaagagataaatctcccagtgatgatgagatattaaaagatcatgccggcactaattggaagtcaacatttggaaagttgtttttgagaagaacatttgggaaatttacaataactaaagtctaaacactagtacattgcaattaaagttccatacatgtacatggccataaattcggaaaatatcctatatcttcttgacttgttctatatttgcaagaagaccctaattttttcttcaacacaaccactcaataatgtttaagaaaagaagcaaattaaaaagtgcctctaatggattgcatctttgttgcaggttgattactttgccaggatctttccaggcgtgtctcatggctttgcttgcagatataacgccagcaaccagtttgctgtcaatactgctgaacaggctcttgccttaatgcttgactggtttgagaaatacttgaaatgacaatatagatattctattaaaaaaatgacaatatagatagttatttgtgaaaatgcagaaaatcgcacttattcattttcatctaaataaattgccggtgtccatgtataagtataaccagccatgtcaatgtgattaattggctatgattttctctgaattgagcttgtcgatgtattaactgctgaattgatcttcaaattcagcggtgggaattcaacccaacgcacatgcatgtattctcaagttcaaagttaaaactaatcttcaaatttgaacgttggaacaaatgcaagctgaaagaggggacttctgcagttggagcttagaaagttggaggtgaaggcgttgttttattttatttattttagatatctgaggttttcattaagcaaataaaagcatctatatgttcgacaccaaaatgtacaatcaaccaaaaaacacactcagacacacactacaaaaagaaatcagagtagcaaaagaccttacacaactatatcttgacttaaagaaactcaagtaagactaacatatataataaacacgccatcccaatggcgtaataatttcactttggtttttgagataaaaagtaaaagctatacttttttttcttacagaactcttacaaatgctgatgtgacataccgtgattaatctagattcaaagcgccgttactgaggtataacttttgtttttccgccgtcatcctcctctctttccagtttcccttttctctagaaaattaaactgagtaaattgctgtcaataaccgtagggaaaagaaattgacgcatgaacatgctatggaagctaggatactgattaaatttctagaaaataatagagtggcacacttttttttcaattaaatggaagatgcacaagcgcacaaacctccacaaggtttcgttcaattcattttgacaaagcctgtaatttttgttcgtgtacagtggtggggacttaggataaatactgtgtgaccttgagaagctaaagctatataaaaaaaatagaacaggtttttttcccgatgattaaaaaacatgcttgatgtttgtcagtttctttttatatcaaacattaacttttggacattgtcatggttcgaggtaaactatggtatcctttgctaattcaatgctggtattaacctttttcttactgatcgaaagtgagaattcgtttctgtaacgcatgaattcatttcatttttcaattgagcaccatcaccaaaatgtttaaatggtctaaaatttttgggcaataagaaaataatattacatttggttactcattatttatgatattattttctttatcattttccccaatatttatgcgatttcaacacatatgattcgataccgccattttgtatggagcgagcgtgacaagataacaatctacatgaggtcatgagtcattgtcactattcactggaatacatgtgtaaggtgccacaattttgagtgggtagattttcccgttgtaacgcacaagcattttactataagacataaactcacaaaaccttacttttggtatgtgctttcttatcatcctcgctttccgattatccttcatcgctaaactcgacttgctttgaaagcttttgacgcacaagtttgcacttgtggttcttccttttatcttcaaaagataagccgttgttgtccttgttatctttctcatcctccttgatagatttcttgagcttgggacacgtagaattgatccgaatgtggttcaactcactacgctccaaacatcaaattggaccacgctgaaacgacaactagaaataattcgaaaggacagcatgacaaataattggagatgacaatgacaaatagttagggagtactcccccatttcatattataagttgtttgacttttttcttggttaaaattctttaaatttgattaagtttatagtaaaaattagcagcatgtacattgctacaatatttgttttgtattgaaaatgttactatttttttctacgaactcggtcaaagttaaaagaagtttgattaaaaaaaatcaaaccaattataatataaagtgtaatagtttatattatacgtaatacaaagtgtaatagtttcactttgttttttttacaagaaaaaaggggcgcaggattgcagcgtgcagctgactctaccggttaaaggcatgtacaaaagcccaagcatcatctctcactcatcagtatgcaaattaaccatatggcaactgcttcgttgagcctcctgatcctctgcctcgccgcgctcgccgcggcggccggcgccgccgccgcggctgctccgccgcgcttgcagtgctttgagcacccgccggacatgaaggccgccggcggcggcgaggccggcgtggtagtccacgacctggcgggctacgaggcctacgtcaccggcgccgcccactccgaccgggccgtcgtcctcgcctccgacgtctacggttagtacgcacatatgattgcctgagctagctaattaattaagcactgatcagttatcactacttccatttcttcattccataatgatgattatggactgatgaaccgctaatttaattttaattgctgctgcatgtgtgattgttaatttggttcaactcctcaggtttccaagcgccgttactgaggtaaattttctttgtcatcctcctctttttctagttttcttttctagcacaaatcatattatttttttattaaaatataatcgtgtgagatcttgctgtaaatatttaattataacaaatacaacggtacgatcagatcgtttatatgataaataatttatgaaaaaaatagtttaaagatacgagaaggaggctaaaataaaatatatggaaatgagatataaagtgtgtagctttgcatgcgtatggatagacacctcttgcactagccaaaaatgcaacaatgtagtaggggagagcatctaatttttcaccataaaatcgagtgtcccatttgtagccacatcgcaatcgcacagaaagaaaattgacacatgaaccgctatagaaagagactgatttaatttctatatagaaagtaatggcgtggaaaatgttcattttttatggtaaactgtttttatttcaattaaatggaagatgcaccaacacgcttgcacaagtttctcattccaattaaattctttttgacaaatcctacttttttttttcttgtacaagtcagaagcaaacacactcacgcacatacagagacacacctatgttggtgagtcctatgagtatctccaacatactatccaaattatacgaattagactttttaaacactcatatagccaactcttcatctaatttgtcaagtcaaattcattactcacttcaacatcctctaagtctgtgacaatgggtcccatatgttgaccttcccacccttcttcacccatcctctctattcttctcttcttcttctctccactccctccacaccgctgccgctccccctttctccacgctgcggccacttcctcggccgagagcagcagccagcagaaccgggaggagctgggagcctaggagcagctgccggcgatggcagagaggatgaaggggaagggaagggtgcctcgagatggccaccctccgtgtcaccaccgcggcattccctggtgcatcagctgctcgtccctagcttcctccacgtcgccgctctgtggggtgacacgtgacggagggagggtgggacggtgatggcgataagggcataaagcaacggtgacgaggatgaacgaaggcggagacggtgcgggggaggaggcagtggaggccgtgggtgcggatgccgcggagcaactgctagtccgttaccatggccacaatggcggctggtctagctggcagagggatgaattaaggagcgatggaggtgggcgctggtctaggcggcgacggggtcagggttggtggtggtctcgggggcagcaacagatggtggtggtggtggtggtggtcatcacctgcggcagcaggaatcggtgtggggcggggcagggcagcagtgggaaccggcggggacggtacttggaagaagtccggtgaggcggcggacctcgtgcgcggctacgacctctttggctggtcagtaggatacttggccacggctgcagtcggctcctaggacgacagtgttgctctggttgatggaggtagagagagaacgtgggaggaggaaaatagacgatagtattgagtgccatatttggccagctagattttttttagataagccatctagacggagagtcttttggagcacttttttttttttgctatgttggctaaaatttagcttgaagagttggatggagagtctcttggagatgctctaaggctgaattcagtgttgaaggttaggaacccttcacctccggcatataaaatggagcggcgaattagcatgtaattaattaagtagtagctaaaaaaacttaaagaatttattaatatgatttttaaagtaactttttatgtattttttttttgaaaaaaacaaatcgtttgacagtttggacaatatgcgcgtgaaaaacgagggattagcaattgggaaaatgttgttctgaacacaccctaagtccctaacacatgtatgtgtgtgtgtttttgctcttatgtgttttctctataacttcggaaaacagaacacatttgcgtgataataatgatgctgacaattacaggcaaatagctgataaagttggtgatgccggatattaattacgtcgtggtacctgatttgtttcatggagatccagcaaccacatctgtgaactttaccgaatggctcgagtctcactctccggtacaattcttctcgatcaccatcttaaaccatcgtttggataggccaaaatttcgaagtcataccccatacaaatggatggggcaactggtccattgaaacgaggctgaagtgatttgtcttacagtactcctgctccgaggaatactccatccgttcaaaaaaaaaaacgtaggatcggatttgtagtactggaaaatattaaatccgatcccaggttagttttttatgtaacgaagggagtaagtagttttggaacacgtgcagtcaatatgagctaattttaatcataaaaaaataaaatcgtttaaaatttaggttcactaccaggatgcgaaagtttcccgtgtgcctataacacccaggaaactaggtgaaacacccgggaaaaatcttcccgtgtgtcaacacccgggaatgctcacacgggagcgttgaagctttcccgacttggattcccgggtatcaagaaggcagcgctcaggaaagctctagacatcctgggtggttagagcagcacgggagaaaaatccaacgctcgggatgttcaacagaacggaaacggcaacagaatacttctcgggtgctggttcttttgcaacacccgggatgtttcagtactacagctcaacattcttcccgtgtgctaaccacacccaggaagtttcagtcctacagttcaccatcacacgggtagtagaaataataagcaatgaaatagaatcggtacaagcactcaaatattcagcaatgtaatacaatcagtgcaagtactaagcataaactgatctgtacaaatgttaataccagatatttgttttagttgcacacatacatattcaaacagccacaaccaatctatggaatacacacaaaagtaatgtttgctccttcacataggtagatttttttcgaacatcataagtaccagttcttgaataatatctgggagtccattggataggtaagaccaaaataacatgaactacatccaaaaatcattgttccagatcttgatgtttggatggatttctgtagcaatgaatcatggctggcaattggacgcacttgatctagatgatggctgaaaaattatagtgtgtcagaaggtgctgataaatattgtatagaatatattgccagataaatattgctatagcatattatgaaagtttaagagtgcacattgttagagattcatgcctagatggattaaaatcacaagcccaaagacaattaacagtacaaatgtcaagcatgccatttgtctaaccaagtggttcctacttgtcctgtacaaagagcccagttagcacaaaccaggaagaagatacataaagaactagattgaactatagctagcaactagatacatgcatcaaatgtagttagtcttacttcttaggtacctatatatgcattttacctatttagattaaactatgtgttatatcttaggcaactgtttacatattgaatgcattcagattatatgctttttcgaagatggaactatctggtaaaaaggtcattaatgttggtataagattgctcgcctaaatagacagtggggcatgttggggccgctggtcgtggaggcaaaacattagctttcatcgcagattgaagcgcctgaaatttatttacacatgacaatgcaaatagttaaatttatacatgttgatgaattttaaaattaataagtacatagaggaggcaaaactacaagttaccagctgtatcgcagatgttaagtaacatgtttcatgttggcaagccttaccatcaatgggttatttcatcaaatcaggacttgcaccatgcttttccttaacaactccaaaataagcttcctggatgataagttgggtgtttattcaaatgggaagagattaaaaagttgctgatcaaattttgtgcaagctagagtgcaactacttacaagcttacccttgacacggtcagtacaatagtcctctccatcttttccattcttccttgcttctgcataagcctcaaatatacccactggcctcttctccttcttctccttcatgaaacaaaataacaattggattattttaatctgtaaaatacatttcaagattttatgccaatatgtgaaaggtgatttaagttaccatgttcttttggaatcggtcaagtgaagcgctgccttgacggtgtgctggcccatccatcatttccctgtataccctaccttcacatgactcttttatccactcttcattacaccaatgcagttccgcacacaatttccatccttccggagtcttttgagcccaccaatacacaaattcagtgacaaaaaattcctcggattagtcaacgagtaaaaagaattcatactacaatgtccacttctgttgttctacgttcagcaaattaaaggcacaaacagtgcactttaatgaaaactagaatatctctctagtgttaagctgaaaaactaaaacaatggcaatacatcgctagtaatcagaagtacaagtcctaacaagtaaaaatctacacggccaagataactaaaatgagaagcataaaaggaagtaaatattagccatatcacaatgcattaaacatgtcaagtttttttaccttgcttatgatctggatgaccaaatcactctctgaacaaaaaaaagtgaacggatatggctgggtgggaacaacctgcaaatcatcaaaatcaagcacattatatgacagaaactgaatcttcattacatcgaacaaaactagagggaactaaactgaggaaaatcagaataaaacataaataccagtgaagccgaggagggtagaggaaggcctggagatggagtatggctcaacctggtggatgatggctgaggtggggatgagctgagtgggggaagaggaggtccaaaggggtgacggcggaggcggcgatggacggtggaggcggcgatggacggcggagacggtgggggaagaggaggattaggcagggaggtgggtggaggagttggtcggcgttggggtctggcgtgggggagttgcgtggaggagttggcctgcggcggtggagcggcggcggcttcgtgcgcaggacggtgacgccgcggagtcacgcgctggcggcgtagttagggatttctcagattggggatttctcgggagagagatggagtccgaaaaaaaaatcgggaaacaaggaataaaaaaaaaatcggcgctctggggggatggagaaaattgcatatctaccatcccataagaatggcttcgctagaataccattatgaaaacaggcttcgctggaataccatcctcaaccagagtgtcttcgccaaaataccatcctggacggaaatgcccctggctcttcttcttcctccatcccgcgcgtgaagagctcgccggcagccatggccatctccaccgccgcgccgatgctgccttgccgacggcgattggggcgctgccctcccctgccatccccacctgcgcctgtgcagctgaggtcgtcgcggaaggactccggcgacgacgcgtggatcccgccggcgcgcgtgagccggtggcgca

SEQ ID NO: 4920 - DNA, 53215 bp, Oryza sativa
gaataagataaatggtcaaacatgtgagaaatagtcaacggcgtcatctattaaaaaacggagggagtattattttcccgttgcaatgtatgggcacctaaccagggtcaggacattttctcatgtttgtagtcatgatcaaatcgctcataaaacatatgcgtgctgtatttatactccgtgtgtgtaagctgaatgttcaaagaacatgtgcatcttaacgctttatataatattagggtagttatttacctgcagggtatagggtatattctatatatgtccggcatgaattgaattaaagcttaattgcacatatcatagaaattttttttgataataggaaaatttaaaagttattaaagataaatagaattacactgtagcgtttagcacgggcatattactagtaatagttttcaattttcattcattattattgttaatagtgctatgttagtactatactagtcaagaggtggtctaataatcttttgcattcttgttgtgtgtggttcaggttcaggttcaggggcatctctcctcttttctttcccttgccgccattagcccaagcagctatctggattctggagagttgttctctggtactagttctctagcgcacgaacaacatccgcgacgaagcgcatccatggcagtggcaccgacgagagcggaggcactgtccctcttccggtccctcctccgcacggcaaggcagttctctgactacaacatccgcgagtacacgcgccgccgcgccgcggacgccttccgtgagaaccgtgccctcggcgacacggctgccgcggcggcagcattcgcggacgggaagaagcagctggaggtggcaaagcggcaggcggtggtgtactctctgtacgccccaaaggccaagagcatcatggagatgaagttgcagtgatcgacgcgagaggtttcgtgctctcttgcttgctgtcctcttactcaggatttctttctgctctgtttctaaagttatgtgataggttcgaggaaaattggtgcaatcaaagctgagatgttatcatgtttgctggataattgccatgacatggttgctatgagttgaataaatcagtcaattccacgattttggtctcttgtgttcaacataccattacctgttaactgtggttggattggtgccgattgcagcacttcgaccagggctcctcgttgctgctggggtccctcgtcctgttgccggcttgcagccaccagtcaccgttgctggtggtggtgccttgtacctgctgctctccgtcctgatggccatggccttcgtcccactggacgagctaagagatctagtgcatctgttctgaatttttcaggacggttcatgtgtcctgtattgttctatgctatgtgttcccatttttgtttttgttgtatgctatgacattgttgctgctctgatctttttttttttctgaaataatgaagataagcttgctagtatttgctttttgggctatcgatgtggtcttaattgttgctggtcctaatccttgtggttttgtgtttcttattcatgtactgggcataattatatatatttgtctcaacttttttttttcagaaataaaatttgtacagataatttgcatgtatgaaccataagcttccattataaggaaacgttcagagctcagagtagtagctgaaactgaaacatttaatttgtcaggctaacgaaaaacgaaggtcaatctgtgtacaatgaggcagttgtggaccgactggaaagctgtgggtttgatccaatttcttctttataatacagctacagagagttctgtgccaagatttttacaggagttcatcatagatttgcctgtagataaaataccagcgacccgttggctaaatcgctaaacacaaggtcttgctttcatgctcgactggtttcttcagaataaattcctggtccatgtaaaaatttgcattaacaaccttgcaggctgaataagtactgttagccatctgcttagtttttttttcacatcttttcttatttgtggtccacagtacagataattttattttgaattctatttaagattaaatttattcatcaaaaactacgattctaaaacgtggcctgtaaagtggttctcgtaaatattctttcatgcattgcagattgagtatatcattcttcactaatctactagacgcgcgaaaccagcttataacaaacacgtctcatgtgtctgaaatggcgtcctaacgtttactgtaatatacttcaatgattcatcaggtatacaatcagcatcacaaaataatttgtatcgcttaattaattacgatgtttcgaatggtggctgtcggtaacttacagaagcatgcatgacttctgattattgttggtactagtagagaaaacaagacggcatcctcactctaaccgtgtaaaattttttttaattcagtgctaaatgtcaacagatgacatatatgccatcaatgaggaacgttcaatgctctccccaagatttataagtctggtgcagatatagttttcttaccgagggaatatatatacacttcgtcttgaaaatgtatcaaatatcactaaaaacattagaaacaaatacttttagtaatattacacatctacacgtaaagtcacatctttaaattcatgatatataaagagaaaaatacaaaattcagatagacttatagccttaaaactgttaaatatttttgttatgtctaaactataatgactatggggttaaaattttcattataggtgtgtaatactactgaaagtatatgcacaatttttttctagaatttattgtgatatttgttagttggtatacacggagtatgcacatgaatcttatatgtagatgttatgttcccatccatctattatgatatataagcatttgttggttgtttagaaaagattaaggtttataagaaaagactttggtgcatcttattaaataagggagggtaagggtgagagagttcttggcagtagtattcgtgctacaagtgattatattttgatataagttttgcaggaggaaagacctaatcatcatttcattactgtcaaatgactacatattatatgattctggtttaagaaatagcatatgacaaggaggaagcaggtagaggccgatagaaaatgcaaacgttaaaaagtatatagctgtatatctatagttggtggagatgctagctagaacactactaagaaaaccatttctgcagacgaaacccttctatttttcagacggatgtttattttgaaccgtatatacatcctcttatgaaatgcttattgctttctcgcaagtacaaaacggtacggtgtcaattaatccttggttgatatcaacggagctatggatcgattacaattaatggcgctctgatgtgtgtgaaccactataatgtgtaaattaaattgagaacattttttttctgaattacacagtgcaacacagacactcacaatgcacgcacactcatgcacccctataaacgcacgcaagcaaaccctacccctatgagaatcttcgaagactgggccgataaatcctagaaattgacgaagtcaccataggcgcctcgacagggccagtaaatcctgtcgacgggtacatcacctaccacactgaaagcacaaagtcattaaatcctagaaaatttgctcccacggggagtcaaagccaggaccttaggtactactgaggctcttgtaaccactagactagaagctcttttcctttaattaagaacatttaattcaattcaaagtaatagaaaaacacgtgtacattgtcaaaatgaaaaatataaactatagctctgatgatctcactccaagtccgtcccgtttgcctatatagttagcaacgagctgctctctcagtattactaccgaacgattaaagccacgtaaagaaaacaaaaatccaaggtatctcggtagagccaattcttgcatgagaaccatggcatgggcgttgttactcagcctcgccgtgctcgccgccgctgcggctgctgctccaacgcactcccagtgcctcgacaacccgccggacttgacagccggcggaggtgaggccggcgtggtcgtacatgacctggcaggcttcgaggcctatgtcactggtgccgtccattccaccaaggctgtcctccttgcctccgacgttttcggtgagtgcatgtctaggattatgattcagggtttaaaatttaggtccgtgtttagattcaaacttttttcttcaaactttcaattttttccgtcacattaaatgtttggatacatgtatggagcattaaatgtggacgaaaaaaaccaattacacagtttgcatgtaaatcgtgagacgaatctttcgagcctaattacgtcatgatttgacaatgtgatgctacagtaaacatttactaatgacagattaattatgcttaatagattcgtctcgcagtttacaggaggaatctgtaatttgttttgttattagtctacgtttaatacttcaaatatgtgcccatatacttaaaaaatttttggcacacgaactaaacacagcctaggttttaaattttcaaaattttggaacccccccaaaaaagtaaaaagactaaattatttcgcccaaaaatttcaaatatttttagtttgtatgaatttagtaaagcttattcaatttcggtcaaaaaaatgtttaaatttcaaataattttgttctattcaaaccctatgatgattagggatgaaaatggttcggaaagttaccggattctggacatgttttcggaaacggaaagtgccggtcggaattttttctgaaactttcagaaacgggaacgaattcggatttttttttgaaacggaaacgaatatgataaggttgctatcatcagaaactttctggaaatgaattcaaattttctctcggaatcgggaacagagtatttctcatgtacaactaattagcttcagctatctcctcttaatatttagatttatactatgtattgaggtgcttaattaaatagaaatattttttgttgtctagtactttagatttcttttggctaatgttttttttttagtttttattaggtcatgtcatacttcttatagttatagatgaatatagtttcttttctaaaaaagtaaagtgtacaactagttgtattattactattgataaaaaaaaatagaaatgtcgatttgttgttttagaaaaaaatatttaactacatctattcgtcgtcgatttgagaagttcagtttaagagctttttatattccaataaatatccataccgtatttgctccgattcgtatttgcttcattttcgtatttgattctgttttcgtatccggagtttctgattctgatttcgaaaaataaatatggaaacgaaaacgataaatgttgtttccgtaccattttcatccctagccgtgattcatgagtagcctactgatcagtcactgccatttctctatttgataaacgtttataatattggctcctgcatgcatcgttgttgatcgagttggtttcttcaggatttgaagcgcctttgctgaggtacacttcggccttattttctttatctctttgtcttgttcttccgtagttgttcttccattgccggtctacatcgttgtcatgatcatgtttcatagttgttctcgtttcctccatattttttttcccgacaacagtaccgaaaggaaatcgacaaatgaacaactaccctggaaagagactgaattttacaaatcaatagcgtggataactggtgatcttctatatatgttcttacttttaaaaaaatgataggatctttagtcaactgccaactctcttcgtctttctatagtgagtttgttacttgtgataaaatcaacataatatcaacaatattgtgtatcatccgtccattttaaatcgttatccgtgccgattgagtagcctcatatatatatccaaacatatatttatcggtttgggttcacgaaccggcacagatggtatggttccaggagcatctcacggggacttggtaattaaggtcgatgttttattctgaatttaaacaaaaaatgaatattgtgcctatccaaattatactttttccagaataaattttaataacattcaattaattacagcaataatacgtcattacatgtatagtcgttgttgattagtaatccattaagcatcgcatcgcatatgggtcattacgagtcgtgctttttgtcgttacaagaacccaacagctattttttgttgaacagcttggcaaatctctatgtcttgtagaaatgattgctcttctgtttagccctttctgtttactttgtactccctccttccaagaatatgagactatttcttttgataaaaaataagaagcaattaactcactcactatgtgacaaaaccaatgaacatgcaaccaataagttctacaatggtttcttggtttccgatcaacaatttaatttaacacatagtgactataaataggacttagatttttagagaaaccaaagaatgaaatatgtctcagatttatagaaggagagagtatagtacgaggcgatccctcgatcaatgaacatgtctttttagaaatgtccctaatgacgaagccggcaaagttgtcttgaagttccagactattgtatgatttagtattaatttacgcgtgcccaatttttttttgttcgaaccatttagcatgtcaaaaaaaatcaaactaatatatttcactataagcatttccttcaagcaagtcatctcaagtttgatattttagagaatagctctgatcaatccatttgtaatatatatgcgtcgcaaggagatatatacctcttcaacccatgagatataagtacttgttcctgaaggagaaattatgtgcaaaacatcgtaattttatctatcttgcagagagaggacaaaaaatgcaatacttttcacataataaagctctatgtgaataattaattgtgtgcgagacatacaaaataaatatagagcgaagaagagctttgaaaattcccatttcttcttaaaaaaaaactgcaaaatctcaacccgttgagcaacagggttccctgcatgctctacacttctactcaagcttgtccataattataagggggtttggtgaactgttttgaggccatatctttatcagtgccgcttcttgctgtgtggagggcgcgggctggtatatggtgggaaaacccttatcagcgatgtgttttgttcgactaatacccataggacggtataattgtgctgttttgttgcattgaattccactgaatatatcgtgaattatgatccagtagtagatccggaaacaccttaaaagcatatgtgtgataatgatgctgaaaattacaggaaaatagctgacaaagttggtcaagcaggatattatgtcgctgtacctgatttcttccacggagatccttacacattagacctgaaccttacggaatggttcagcaaacattctccggtaattcgtttcaccgtcttatgcaatttgattttatattccatagaacattaattacctagtaatcgtgatcgttcagatgaaaattctcagctcctgcacctatcaggatgcacaaattaagccgcaaattaagcaaaactatatccaaagtacttaacctatactagctagatgctaattatcaagaactcaataagttgattttgaccagtatatatgaattgatcctgcaggtaaaagcagctgaagatgctaaagcaatcttttctgatctaagaaagaaagggatatctgttatttggagttggaggttactgttggggtggtgagtgatattaatcaacataaagaagaagcacattaatttgtgcatttataattatactactacatctatcagtggtgtatcttaaaaataaaaagagcccaagtaaacttatttgctataaaaactctgtttcaatcttctaatatataatttcaatggattcagcaatgagcctgggcagccgcctgaggttgctagggacaaaaaaaatgtttgcagtcacgaataacaacatactccctccataaaaaaaaaccaatctagtattggatgagatgttttctagtccaacgaagacatgagtctgtccagattcatattctaaggatacactctgaaccttcctgatctcctctccacattgaacaaacagagatctgattcatattaaagtctctcaaaggcaagttttaactggcagggaagtttgccgtggaggtagcaaaaaccaacgaggttgaagcgattgtcaccacccatcctggattggtgactgtcgatgacattaaaggttgatattctttctttgttgctgttgctgaaatatgcatgtatcatctgatctagctatagggttgcacaggaatatatagccattgttttcttattccaaagttcggcgtgacatttcacgcagaggtcaaatgccccattgagatcattggagctcagaccgacacactgacaccacaaaatttagtgtaccagtatgttcaggccttgcgtcatagaactgatcgggtgagttcccctgttataatttcgtttacagttgatatagcaaatgcatcagcatatatagctctatttgccttgcaatttgttatcctttttgtttttcagataagataatttaatttgcacatatacatgaagcacaggattcaatagaccggaagagtgagaacacttgaactgaaaaactaattaagtctattttctgaaaggaaatgagactgtagacacacaagagaattttccacggatgatgatatgataaaagatcatgctggctatattttccttttgagggaatgctggctctaattgctggtcaacatctggcaaaagttagagctgatacaatagcataaaaatcaaaagatttactagcatattgtaaacgggaaccgagaaataacaatagtatatgattaattaaatattaactattacaaaattaaaatatatttatttaatttttaaagaaacgtatacacatatatatatatatatataaaattttctaaaaaagacaccgttcactgtttcgtggtttaaaaaatagtcacagtaaacaagtgagttgcataagcgaaacgaggaaaataactcacccaaaatctaatccacaaaagctaggccatcatttggggcactgcatgtggctttaatcctatacctattcctttctctccttttttgcaagaagaacatatttttctttaaaacattcatcaaatatttcaataacaaatctttgcaaagaaatatattattcattagcaaaaaatgaacgttagaaataaccttttgttcattaattattgaagattgattactttgccaaggtcttccaaggagtgaaccatggatttgcttgcagatataacgccagcaacccattcgaggtcaaaaaagccgagcaagctcttgatttaatggtcgattggtttcacaaacacttgaaatgaagacaaggatcagctaatcatgcatgcaaggccacgactataatttcgtcaaaataaatttccgatgtccatacgtttaaaaattgcataatgagccatgcatcagttgatgtataggttatattgttggttgtaattttttaggatatatgtaaaactcaattaaaagcaacgtgtgcgggttagtgaattattatattggctaaaaagttacatggatatataacatattttagcagctttggtaatctctgtaacatttgtatatatatattaccaaccacagactgcaattattcctatgaagtagctcccaagtcaagccatgcatgtaaccaagaaagattaatttttttaataatagattaaataaaacccggcctctacatctatagaaggatgtacacaaatatggtattacatcaccaaacacttaggcttatactctccatcccaaaatataaggcacaaccacttttctctcatgtctcataatgtaaggcgtgcatgcatgcatacattaactagtatctcttggtcctataaaatttatttgttttaaatcttatactatcatcaaacctcccaatcactcccaatcacattgcttgcattcatcaaggtgatccaactaagaaagtgattaaatgttttcttggtctttgtgttatgggtggttatgccttatattttaggatggatcgagggagtaaacaagttcaaaagcaaacaccaccataggagacaaagagacaacaaagacatccagatcaagtctcacaacaaaaaatttcaactaacaattcaatcttcctctacaattccacctagattttgaataaaattccataacagtatcaagaaagattgataagccgtttgatttcatatatcatgttccaacccatcccagctcaatcatcccctctccaatatgctactgttgacaaccagcccagtccaactaatatgtgtgagatgcttgatttagaagcaggctgtaagaatctaggggttcaatttctcagcttctgacttctaggtagattttggattttacaactatagatcttcacatgcactcacatgcattcccagttcctcagtgaacagcgtgagctagctagcagtgttcaatctttcattttcggtatttgtatcgggggtgtcaacatggcgatatttccgaaattttagaaattccagtctaaaattttgaacaaaatagtcatatttgaacaaatattgtcaaaattcacgaaaaattaaaaagtttcagtcgaaataatatcgtatgggggttccaataggaccaaaatttcggaaattttgttacgaaattttgaaccctggagctagcaacaggagcaatccatggttcccacaaataaatgaagcaacacaggtgtgtcctccactatttcagaacaagatatcttaaccccttattatcagtgtcagtttgtataaaactggcataaaagaacatcaccaccaattggtttttatcatgataaaaactaaattactagtgggttttatcatgcaccacaagtgacaattatttaaaatatttgcatccatgctcctggccatcaaattggctatagatcatcaatgcctcctctctctgtctcccatgaaacaccagtgcaatgtttcttgagaataattagggcgtgtttggttaagtgtcaacaatccgggcacatatgcttactgatcgaactcccatgtgcgcatgcgtgcactgttatattgatggatacatcgacgataaaccaagcattaacttttggcgaaccggatgcactaccaaaaagtccagcaatttggccataggcctgcagcttccaagttcttcgctttgactttgcacaataattgatgattgcgtaggtagtaaaattcacaaattttatgagggaagaaatttaaatgacccaataaccatttctctttgtaatcctgcctccgtacctatataagatggacatggagcccttaaataacatggccaaaactcgatcgtcatatcaatacaacaccagacggatacaatatctaaatatgaatagggtaatacttctcatcgagaatgcctcaacctttctaaatttgtgtccctttacttactcattttagatctcgtgataccccttcttactaccgatttatagaatcaacaaggtcaactactataaattaaacatgatgttgaactcataaccgctgggcttgtggactgtcatagactgatgtaaacctatatgcgtggaaggaattcagcctcatagaagtattctcaagttgaaatttaaaatctccaaatttcaaagagatggtccttgtttgattgtccctaagttttcacttaatctttctcaggcctccacgttttgctcaacaaggtcaactactataaattaaacatgatgttgaattcataaccgctgggcttgtggactgtcatagactgatgtaaacctatatgcgtggaaggaattcagcctcatagaaaagggcacgtattctcaagttgaaatttaaaatctccaaatttcaaagagatggtccttgtttgattgtccctaagttttcacttaatctttctcaggcctccacgttttgctcacattgcctcaaattattcggttatgaaaagagtatgaacgaatgcgggaggtcgaactacttgatgaacaagttttattttttcataattgcactattcattttgagaagatcatatatattctttttgatgagcttctttcaaaatagaataaaaaggtcaaaagtacccaaattatctaatcttcgtgtgattttgccttcagaattgaaactgaaatatattttttctgaaagtacttgattaaattagaacaaatttatgagggaggtgaatttgcccattcaccatttctttttatatttttacaagattttttaaactaaaatttcaatttttctaatgaacttaaaatatggttgaaattattcctactaaacattaaaatttaatttcaattattatcatgtttaaaaatttcaatcacttgaacattttcacaccctttgacaattaaaatcaagaagaaaaaaatatccctagtgagatttttaactttgtgttaggaggcagagatgaccttttttataagaaacaaattacaaacgtagagataataatcattttgagagagagaaatgctacctctgtttgaaaaaaataagggtacactttattttgttgggacaaactttgaccaatacttattctttcatggtataaattttagagtaagttttacaaaactacaaataatttgatcaaactatcacaaaactacatatttaaatataggtatcacaaaactacagatttaacaccaaggatattacaaaactacagatttaaaacttcattaaaaaactacatatttagtgatgaaattatcaaagaactacaaattttagagtttatatcgtagaacaattgaggttacaaaagttgtagttttgtgataaatctatgttaaatctgtagtttctgatataatacaatcaatctgtagttttgtgatagtttgatcaaaatacatacagttttgtgaaatttaatctaatttctatgatacaaagttaatgttgctaaaattttttaaaggaaacaaaatgaaaatttaggaatatttaatttaattaacagtgaaaaaaaacattgaacatgggattgattaattaaaaactgatcaatataacgaaaggcacacaaaaaaatttttctcaccttaaattcaattcaaaatgtcaacaggcagcgggaactgggtgtgacattaaacaagaaactgagggcaatgtgctacctaacctaaggctaaaggccataaacaaactacaaatgccccagcaactatcgattcgatgcctcatatgtatcgtcaaaactcgatagttggaaaaccatggcaccagcgttgctctacccgaccatcctcttcctcgcagcggccgccgtcggcgccgccgctccgccgcactcgcagtgtctcgacaacccgccggacctgacgacggccggtggcggcggcgaggccggcgtggtcgtccacgatcttggaggattcgaggcctacgtcaccggcgccgtccattccaggcggaccatcctcttggccaccgacatcttcggttagtgcatgcctgcctgagctgccagcttatctgtctttgaaatattctttgatgatatattgtggattcatttattactaaccattaattaatcttgaattcttgctgttgcatgtgagtggttgcgtggttgttaattgtgggtctctacttcaggattcgaagcgccattgctgaggtacaatcttcttcttcgtttgtataatagggaaattgctgtatgtacgataaacttgttatgattttggtacgatccagtcatgcatcgtacacttgcatgaacattagcattcaattgtcatgcaagttacaacaatagaaaggtgactatggttattttgaagggatcggatatggtttttggtcaactctctctgtcttttttatagtgatctccagttatttgtgacttgcgagaaattaagtcacacataatattcaatattactgattatatatctgcatgatttatcagtataagacttggatggcgacaggccactcctgtatcgagaatcattatgtactactccctctgttccatattataagtcatttgatatttttctcagtgaaactattttaagtttaatcaaatttatagaagaatatactaatatttttaatacaaaacaaattaacatattaccaaaatatatttaatgttaaatttaatgaaactaatttagtattgtaggtgttgctaactttttctataaatttggtcaaaactaaagaactttgagtaagaaaagagtaaaacaactaaaaatatgaaacaaagagagtagtaaatatcgatatatatgccaagatactctaacgtcctattattcctatataatacacatctatctattatattattaaaggaatagaaaaaggagcctctacgttggctcacattaatcggagaaaaagaaaaagtagaatccatataaaaatataatttagaaatagctgaaattcggaattaaaaaataaggaatatagaagaggagactagagtccatatagaaatacaatttagaaatagttgaatttcggaattaaaaaataaggaatattagaagagtagactagagtccatatagaaatacaattaggaaataactgaaattctgaattaaaaataaggaatattagaagtagagtatatagtccatatagaaatacaattaggaaataactgaaattcggaattaaaaataaggaatattagaagtagagtatagagtccatatagaaatacaattaggaaataactgaaattcagaattaaaaataaggaatattagaagtagagtatagagtccatatagaaatacaattaggaaataactgaaattcagaattaaaaataaggaatattagaagtagagtatagagtccatatagaaatacaattaggaaataactgaaattcagaattaaaaataaggaatattagaagtagagtatagagtccatatagaaatacaattaagaaaaaaatagaaatttggaattaaaaaataaggaatattagaagtagagtatagagtccatataggaatttaaaactaactaaaatttggaataaacataataaaattaaaagtagagtttagagttcgtataaagatacaatttacaaataactaaaattccaaattaagaaaaacatgggaagaagagtttaaaatcaatataggagtacaatttagaagtaactaaaattcgaaattaaaaattaaagaatactaaaagatgagtttagagtccacatagaaatacaattagaaataataaaaatttaaaaataaaaataaataatattggaagaagagcatagagtctatatagaaatacaatttacagaaaattcggaattaaaaaaaagaaaatattaaaagataagtctagagtccatataggaatatatataatttacaaataactaaagtttgatattaaaaataattaataactaacacgtatataaaatataatataaatattacccattagtagttttgtaaagttattgcaaaatttaaaattatgttctcattttaatatatttgaataatataatgaggaaacatatatgctattatatgagagaaaatataatgatactagccgcgcaatctgtgcaggccactgtgctagttttgagagtaatttcttagggttttcaatatgttatccctacatggagatgatcagcagcatagcgacatatatatattggaattgtttcatattctatcctcctacagctaatctctactacttaaaaataagtagaagacatttccgttgtccgtaccgataaaaaccacgcgaaaaaaaggtttccgcatgtaaaagaagcaaaaaaaaaaaagtgtgaaaaaagtttctgcccgattaaaaaaaatcatctgtataaaccgttatccaaaaaaaaaaaacaatgttagtgggaaaaaaagttccgtcgtcgatactggaaaaaggaaaaaacgtgcaaagaaaaggtttccatcttccgtaaaaaagagtaaaaagtagtgcgaaaatttttttgttccgattcttaaaaaaaaaacccttctcccataaaaaaggaaaaaattatagtgcgaaaaaaaaagtttcgttccgattctaaaaacaaagtccgtataaaccggtcatcagaaaaaaaaagattagtgtccgattctaaaaaaacgggttacttttccaaaaattcctaaaaaaaataggttggcagaaaaaaaatgttcctcacaccgttaaaaaaaaagtccgattctagttaaagaaactggttcgacattttcagcttttccaaaaattcctcaaagtatatttgaaaatttaaaagcaaattcaattttccccttttgaataattcttttattcattcaaattatcatatatcaaaatccacctaaacatgtcaaaatttatataaaccgcgtgaggaaaaaacatcaccatttataaaataaccgatttgaaaaaactgtctgactcaacgtgagaaaaacgccaccttttataaaagaatctggtttggcaccatgcaatgcgaaaaaactgtctaaatttagaaagaaaaaacatccaattccgtgaaaaggattcgtaacatttgtattgttcatcgtctaccacgtcggtttggtttttttaaagcgtaggtcgaattctgacatctggaactaagacaagtcttgcttcggttttttttttctgagaacgagatcaaattaatggacgtttgggttagataggatccatcgattttttccatctacacggcttctctttcctcatctattctcttgtattgatagccctgcatgtctgtgtaggcaattatcatactaccatagctactattctttataacatattatatggaaataatattaaaaataaatatgtttttaattgatatttagagaagagtgcacgtggctctattttgtgtagacttaatcatgcgaggcaatataggatttgattgatcctaattttgattgcaagaataagactgaaaagtattaattttagatttttatgcatgttgttagatgaacaatccaattcttttgggtaaagcaaaacattggtaaggttgccagcaccgaggttgggccattgatttaagatgttccagttttctttatgatatgttaaaaatattatcattgacactatgatatgacattcactgctacgggatgggtttttccgtgcggtcaaaaaaaatatccacgtgcggatgaatggcccgcacgcaacacttcgtctgcgaaagtcatgatttttgcgtgcgggtggccctcccacacgcgaaaatcggatttttccgtgcggttgcttatgtcgctcgcacagaaaaataaaaatccagaaaaaaataaaattcacaaattaccgaaccctaaccctagatccgccactccccgccgtcaccggtggccggctccaggcgggggactgtgtcgccgcgagatccgtgcggagtgcagccgccacagccggatgacggatcctggcgtgggaagggcggtgccgctcctggccgccttctcctcgtcgtcggcggcggccgcatgaggtggggagagcggcgccgctcccggctgccgcctcctcctcttcaacgccagcggcggccgccgcgccgcctccaccagcagccgcgacgggcgcctccacgtcggcgcatggcagcggcgccgcttcctcctcctcctcctcatcggcggaggcctccgcgccgccgcccgtcggatccgcgctcccctccatgccgctgcccgccggatccaccctcccgtccggctgcaccgccacagaagcccctcccctccgccagatctagggagggaaggaaggggaggggaggggagcggatcccgcgtggggaaggccggccgctcaccggatctgtgcggggatgaccgccgcccgccggatcccgtgcctgcacccccgtcgtgtggagctgaggccgatgccgaccgccgttgtcgttgccatcgcccgcgcgccaaaaggagacgaggggagaggcgtgaaagagagaggaggagagagaagagagataagaggggagggatgtgaggagaaattaaaagagataaatgaggaaaaattttgaaatgggtgggagggaaaatagggaatactattttcgcgtgcggctctcttaatagatacgcacgggaaaatcggctcattttcccgtgcggtccgtttaggaggaccgcacgagaaaatcgattttcccatacgggcaacagcccagccccggttcccctatttttccgtgcagttccacttaagaactgcatggaaataaaagggggtaacgtccacgaaaatctatcgtttagtagtgattatcatgaaaagtgtcagggttatggataagatataccctctacccttggatacacgttgtatactgatacggtatacccgcgcctatacggatatttcctatgtacgttaaggaaattcgtcacgagatagatgcggaatccacagatagaaggagtcctactcagacagaactgggtcgttactgtatcgtgtggggtccgatgtctccgagttctacttggagaccaactgacctgcggtataaaaaggaccaccccgggaggacctaagacatcaaatcttaccgccaacacatccaccacagcctacaaagccggagcctacgggagccaagtcgccgggtgatttagttgaaccaactcgactacgatctcgtcggtatcattgagttccactattccctttctaatatgtgattttcattatataatcccatatcactggattagagctattacctatcaaggggcctgaaccaatataatccctgtttcctgtttgcttgatgtcgtactacgtagatcctcatatcagcgtaccccaataccctctatatccggtctacgggtatcccccgtcgacaaaaagcatatattgttattagaatttttcacccgttataacgcacgggcatatttgctagtaatataaatataccaagaggttcaaatataccatttaatagtgtggtaatcatggtttaatatctttaactagtacttagatagcacatataattggacagcaatttaaaatgggcgagtatatgcgccatgataagaattccatattgtgcttacttaaactaaaatatgtttttcatgacacatatactattgtacatcattgtatagtgtgcacatctgcttagggacaattaatatatgtaagattgtgaacccaatgttaattcagaacttattatgtgatcttccattgccaggttgtacgtcaagctatttctccatggcttgcagaaactctgtttatctgccagtactttattttaattttacatttgaaaacaatgtaaaagcagatgtttgattataaggttgctgacaatttcaggaaaatagctgataaagttggtctagccggatattacgtcgttgtgcctgatttgttccatggacaaccctacacatttgaccagaaccgtacagaatggctcagtgctcattctccggtaattcatttcaccatattaattaatttgatctaatattcccctgtaactttaccttgaaatcgtgatatatgattgagacgatagagtaaaagaaaactcgacagctgcaccaaggatatacacaaagccacaaaacaaaactttatcccaaaaatgtaacttatgcgggatgcttataaagataatatgttaaagttctaagaaaagataatatataaacagttataaacgattcaagataataaattaaagttctaaagaaagaatatataattaatattgacaagcattttcaattgatcttgcaggtaaaagcagctgaagatgctaaaccaatctttgctgctctaagcaaggaagggaaatctattgttggagttggaggttactgttggggcggtgagtcacatctatcaatcaatataagaaaatgtagttgtaatatcctgaacttaatggtcaaaatctttgatatggaattccagaatatataattcctaaccccatatattcaacaagcagttatttaattcatattgaagtctctgaaaacaaatttgttttactgacagggaagttcgcagtggaggtagcaaaaactaacgaggttgaagcaattgtcatctcccatcctgcagcggtgactgctgatgacatgaaaggtgaactttctttcttttgttgcgctgttcgttgttacaatagaaaatagctaataattgttttcttattccaagctctccttgattaattaacagaggtcaaatggcccattgagatccttggagctcagaatgacacagttacaccaccaagattagtttaccagtttgttcatgccttgcgtcaaagaactgatcaggtgagttcctgttgattttattgacggttggtcccaaatacatccatgttttttacttctaaactccatctcgctcttcaaatacttgttactggattctatttactctctttgttctaaaataaacaaaccttagataaaataagtctttacctattacaacgaatttaaacaggcaattgttcagatttgttgaataggtaaaagctcatcctatttaatatttgtttattttaggatggaagaagtagtttttgacgttgaccattcatcctatttgcaaaaataattatattacatattaacgatgtgtgttctgccataatacaactacataagttaacttcattaatctttaaaaagttattaatctgaaaaaatgatagtcaatagcgacaagcaaaataatagtttctaaatacaagttgcatgtacaaaacacacaagctagctctcactaactgaaactgaaccagtgtttaatatgctaaaaaaattgcaactgtaaacataaaagagaattaatttttactgatgatgagatgttaaaagaccttgctagctctatttgcatttttttttgagaaagaatgctagctccaatttggaagaataagtgctataacattgcatattacttccttcgttccaaaataaaaaggcaaaatcatacctttttatgttgtagttaacaatcatctccatcttccctaaatttgtttttttcaatcctccaccccaagatctttaatcacattagatgcatgcatcgtattatattgaggtaatccaaatgagaaggtgataatattttttttcttggttttcgtgttagtggtggtttgtaccttatatttttatattttatgattgcgggaataatatattatgttttataactaaataacctcttatatatgagttattgttgcagattgattattttgccaaggtctttcaaggagtgaaccatggcttcgcttgcaggtataacgccagcaaccctttcgaggtcaaaaaagctgagcaagcacttgcgttaatgcttgactggtttcacaaacacttgaaatgaagattgctaattaatcatgctaggaagaccagtgcaattatttcatcgaaataaaactctcgttctcgatataaaagtttgcatatcaagcagccatgcatttgatgtacactattttctttaaattatatggagtgaattaatagtatgttgtcgagttgatgttcgttatttatctataaataattatacggatgtacttgtgccattgatgttcattgctggctataaattacatgtggatgtacaactcaattttcacaagggtactatatatatactttagcaaaaccatcaaatttattacaaaactgtacaattatgccacagcatcagcaacctatatatttaaatcacaatttataacaaatttccatgtcacaaagtttcaatcctagcattgttatcctgatgaaactttcagaatctctagctttgtgatatgaaaaaaaaaagtttatgtagttttgtgatatattgtatcttaaaattttcttttaaaaaataataataataaagatactgtggatttacatgtgcaatttaaaatagctttattgaaatatatataattttacaaaatttactcactttaatttatatcaacttgtaatcagtatatttctaacaattaggccatgaataattgaaagggttgaaaagctaactatatattaccccatttatttcgttgggccttgggccattcatgagtaataacaataacagtagcaaaacatacagcaatgcatggcaataataataccaattaactttctaaaaaaataataataccaattagaagtctgtacgtatgcttacaaacttgtacgtataagttcgaaacaaatttaaaatgcaaatgaaaaaatagactttgatttgcattttcctaatatgaactttaattgcgaatcagcactctcgtcgctctgcatgcgtttccagtcgagatcggccccaggcatgcggccgttctctctcatgtgtgtagctcaaaatagaaagatcatatgccgaaaataaaaatctagccaaaaacagaaagatagatcaatctagtgagagacgatggctgagcggttcccaataatgtttttgccttttgtggtggtgtaatcaacggttgggcgcactctcctcaacccgtggcccgcgggacacgtgtcaaccaagtccactactattcctgcatacgtatgtataaactttatatacgtatgtataaactttgtatatatgtgtatataaagtttatacatatgctatcgagtgggccaacgagatggtatcgacgcctcagacaaccgccggcagtgtgcctagccatggcaccgggtgatggggacgatggcgagacgaatgccaagaatgcataaaacttttactagggaagccaaacctaccccttgcaatctggcatgccgggccgctcataggccaagcagcggcacgtagacaagctagacgtagcggagaagaatattgcacggacggggatacaagtttgtctcgcggcgagttgcccccctccccccccccccgggatgatgagatagtggtgcttgaggccttatgtgcagcgagcttcgagtccaccatggcttcgttggtggtgggtgtgctcgacttcttccttgttgtcgagctcctaatactgacagccaacgccatggctcacatcgccatctatgagtgaaacatgtgggtggacaacaggcaaggctccgtgaagcacttttccaccctccaattagctagttgtcaccctaataaggtgatgtaaggaagggtgacgaaatcattgaattgttttagaatctatttctaggtccacctaggcatggcggagtactttccctcacgggctaccaatgaccgataggccactaggtgaccttcgcgctaattctacctaatggtgggggacagactcggggctctgctttaccagtcaagacatacggtactagtggaagctggatgtggacgcattacacctagtgggggctccgctgaacaccatcctccgccgcatctcctctctctagaggatgagggatctagtcaaggagtcctgcttgctgggggtcacatggctaaagaccaatgggatcactcccttacattgggcacccaatagtctctatgggaggacctaggccccttcacatcgcgtggttgataaccccttaaatctttctaccttgcagtagtgctccacttgttgtctccccattccgaccttcggtacacactgcagcgttctaagaccattatcctagtcacaatggtgatcgcggatgccaagaagatactagggagttcgctacccaggaagaaggtcgctcgcctggctcgaaagaatgcatcagtttgacggaatagtgtggccaagaggtttgggcttacactccttgccatgccttctctccatgagctagaggagaccaacaaggatggaaagcgcaaggggcatcgcggggcggacgtggtccatgctcccaagaggtccaagcagggagcaaatctttggctcctccttttgtgggcgtgcctctacaggccaagcgaccaacactgttgttgtcagagacgtcggtgaaagccttcgatcatgacatcatcgaggtcggttcgtcggtctccactatccatgcaccgaaggtggtaacggtagcggttgccatagaggccaacgagacggcctggcaagtggccctcacaggtaagggtctcgtttccttcctgttatcgtgaggctatattgttatctcttacatgcctctctcttcattttccccttcttcattgtaggttttccagggtacaggtcgtagtcgtcttcttcgaaagttgagacaatgccctcgatgccgtggtggactggagaagaggaggtggcgtcgttgccacctcaagtggagatatcaactgatatggtgatatcggaggcggatggcgtccttgatttgactccggagcaagtgattgccctctgtgggggcatatcatggaggcagctccagagggcatccatgcagaggccatcatccactcatgggatccattgcctaccatcatggggcggctcgtgcgtcccagagacttggtggcgctccggttggatgtggaggcaccgatctggtcctccctgcttggggatgacgctcgtgtattggctactatgatgagatcaatggagctaatggagctgcaatgtgtgttggcctagtaggtgcgtccgtctgtccttgtttcttgttgggtttgttttgagtaatcagagtgccttcctccttcgctcaggccatggtggtcgtcaaagcatccatcaagcgtgggggaagtgatgcagcaacacaacacgcggagaggcttcgtctagacgagattatagccttaggtacagcggaggccagtggtgcagcctcataggtggaggcaaaatggtgacggtgcaactggccctcttgcaggtggaggtgtctcggtcataggtggagaaatggttgtgggatgttcataccgaggtggcccgcctgtccccggagaagaggcgttgtcttaggagattagcatggccaagggagagtcggagactcattcgcttgatgcccgcacactagatgagaatgccgtgcatgtgccctagcggttacgtgggctttgggctccgacttcgtggattgtggatcaaaggacctacagtcccaaaggacaatgcccccatcaccgacaagatgacctggtcgatgaggtaggggcttcaccaagaaggtcatcgccacctacgaggcttggtgctcataggccaccacccatatattgtcgttgcttcaacaggagtgtaggcacatcgacccctctgtttgcttggaccccgtggtgttctccatcctaatgtagggcgctccagcacaccatccccgcgtcgtgacatgaacgacctcacccggaggattgggccctcgttgggtcacaacgttgtagtggctgagctcgccgcttacaccgaggggaaaacgaagggtgtgcccaaggtgtagggattagttaattttttttagtaaatttcataaaactacagttacttcgatcaaattatcataaaactacaaatttaaggcactgtatcacaaaactacagatttaacacaagatttgaggccaactatcacaaaactaaagatttaatactagagttatcacaaaactatatattttacaacttaaatccctaccactactgctatgttagagtgataaatgttgtagttttgtacttaacatgttgcaaaacatgtacttttgtgataatattattactaaatgtgtagtttggtgatcttccaccttaaatctgtagttctttgataaagttggtcctaaatctatagttttgtgatacaccttaaatatatagttttgtgatagttttgtcaaagtacatgtagtttagagaaatttgctctcttttttttttctgtgttccctgtttcttttatttctcttcatgtagccttctctctggcttagccttgcctactgtttggcctccagactatcctttttcttaccttctgcaattcgacataatatataggaaaaatttgctagaggacggtcaaattttctggtatttcctaacgaactcctaaaaggcgtgacatggctctaggactcctaaaagacacgtgatttactagtggacaccacagtcattatttcatcattcctgggcttaatggagggggaaaccatgagaaaaagacagttctgcccctctggctagcacgttgtatgtacattagtggctttgcttatgccacgaccttaacttgtgtcttgagccagtaccctttaacacatcgtaggcttcaccatcctcacccctccagggggtggtcatccctccggccgtcggggcctgcactgctttagcattgctgcctgtttgcacctacggttaccaaggtacatatggtttagtgtgtggcgaggtggccacgtcctccagcacaaccttcaactagaacttcgattgaagtctttcgttcaatgatgaggcacacgagccattgctctagtagctttggtgatcgaatctaggtccatcgaggcatccctagtgcatcggacctattctagatttcaagacatatgacgccgtagggaggttaggcaacatgtacggtggaatggcgaccggtcatggctcgcctgccatgggatgggtcagggtaccacgtgtttcatgggctcaggccgactaggattctagatcctagggctcttcaagcagaacactgggcgggggtccttacctactcatcatgagtagcctcatgccgagtcgggtgctgttgtggggtccttccactagggatccttaataatctagccatagcacaactctcccatgaggtcagggtggctcttacagaagtccgcctttaagggcgattcattaactagtccgtccgaaaaaccgctaatctctaaataaatgtggataattaattttaagtccaactgaggaaaactaatattctgttatatatatgtgtgtgtgtgtgtgtgtgtgtgtgtgtgtgtgttttcacatttaattaaaatacttattttagtatgattgttaacttatgtcatgtagcctctttatgaataaccatactaaaggaaatattcaattaaagtagtaactgtatgtcttattaccaaaatatagtaagaatcctataaaaaatttgtttacgtcaaaaaggcttaatatgaaaattctatctttttttaaagtttggtaccatatcaaacttcttttttgtcgacgtttgatgtctcgactacggtatttggacagtatggggatcgtcggtgctagggcatacgcgagaccgaggtaaaagagatggagacagggatttttatacaggttcgggcccctgaattgtcaggtaataaccctacatcctgttggccggagccggagttgctttttattcaccataatcacaccagtacaatatgtggggtagcctatctaattgttgtcgacatggcggtctgaaggtctgactcgtagtcgacaacagggtagccttcctccttaaatccgtgtccggcgagatcagagatagcgctttcgtatctcctgacggtatccggagacaccgtaggggaatagccatgcctatccctgaagtcgatatccggcggcgtgtcttggcgtatgtaggcttgtgtgttgtggcttctggtggacgtgtgttgattgtcatgggtgtcttccatggtctcctcaccctctcctcctaggggggcttgtatttatacccataggtgtccccttgtccaagtagaactagggaaaccaatatggatacaatccgagtagtccttgtcgtttccatgtagaactctggttgtatttccttatccggaactccctcgaggtcagtttccgtataagacatggtatgtggtggatcctgcctagatttagtcaactactattaggtatgtggtatccataaccctgatagtagcccccgacttcgatgcaaatgaacgaattcatattctcaaccgcgcgtagacattggagtaactgttatcgagctcatgtgaccgttctcggtgagtttagagataacgttggacttcctttgtcagcctcgtgcgggcaccgaaagggtttgtctaagtcaatctctgatgtcgaccgagaaagtatagagcgtacgactaagtctcacgtcttgctgtaatcgagaatttggattgaagtcaagaaattttatctcggcgggtacaccatttcttcattctctattccttgtcgagatccagcaaccgttctcgagcgatcgagaaggcgtagagtctgcgacggagccttgtcaacattggtcgtactcgccttagtcgatcttggtgtagaaccatagagacatggagtcttccacaatatcaaatagaattttcctgaaaccaatactcagaaaagaatatcaaatagaaatagcccccaagcgaatgctcaaagggtgacatgttataatatgtatggtaaattgaaaataaattaaatttactgatcaatgttttgtgtatgagcgtcttctctcttaccgacttcgatcagtcagtagagtcatacactctccctagcccccagccttgtcgtcggagaaccgttctaggaggataaggctcttggacccttgacctgccttggttgaataaacactgatcctagcccccagccgtgaagttggaaaagtcaatttccgattacacggcttggttaatacgcacggcgagaactctaacacgaccagatcttacatggtcctttgtctctgaaggatccgacaaggccttatcggctctgggcgtccccagacgaggatcccttaggttcctcggaggccttgtcaagacggcgtaaagggacagtaggataggtttcaacgctaggtgtcatcgtggtaagggatctctgggtaaaacattgggcgatattgtgtacctgctatcaacttggttgaaatagaggtagtaggagagtcgctacaccgctggtcgaggaccaggcagtagtcgtaactcgaccacttaaagtgaaagtagtgggagagaagctacgtagctggtcgaggaccaggcagtagttgtaattcgaccacttggagtggaagtagtggaaggaacgctacgtagctggtcgaggaccaggcagtagtcgtgactcgaccacttagagtggaagtggtgggaggaacgttatgtagctggtcggggaccaggcagtagtcgtgacttgaccacttaaagtggaagttgtgggagagacgctacatcactggtcgaggaccaggcagtagccgtaactcgaccactgaaagtggaagtagtcggaggaacgctacatcgctggtcgaggaccaggcagtagccgtaactcgaccactgaaagcagaagtggtgggagaaaagctacgtcgctagtcgaggaccaggcagtagtcgtaactcgaccacttgcagtggaaatagtgggagagacgctacatcgctggtcgaggaccaggcagtcgtcgtaactcgactatataaagtggaagtggtgggagaaacgctacgttgctggtcgaggaccaggcagtagtcgtaactcgaccacttgcagtggaaatagtgggagaaacgctacttcgttggtcgaggaccaggcagtagtcgtaactcgaccacttaaagcggaattggtgggagaaacgctacgtcgctggtcgaggaccaggcagtagtcgtaactcgaccacttgcagtggaaatagtgggaaaaacgctacatcactggtcgaggaccaggcagtagtcgtaactcgaccactagaagcaaatgtacgagagatcactacgatcaactggttgaaaaccggtgagtaggtgtccctcgatcatttggagtcgtggtgcgaggaccgctacgctggcgtagtcatacctcgaccatctgaagttaaggtgcgagagattgctacatactgatgcgagaaccagtgagcgagcagaattatctctcgaacaccaatggaagttgcggtgcgagagattgctgcgtactggtgcgagaaccagtgagcgagcggaattatctctcgaacaccaatggaagttgtggtgcgagagattgctgcgtactggtgtgagaaccagtgagcgagcggaattatctctcgaacaccaatggaagttgcggtgcgagagttggtttattgcaagtgtatctcatgtggccagtatgactcacgtacccaacttatagcatatccggatgtccgttcgcaatcatgtcgggtgatcaagccgacgacgttcgcgaggaattatccgttaacaaccttttctcgagtagtccagccatggccggtgctatgagataggtcgtcagtctttgttggtaggttgggtgcgataactccacaacctactcgagtgctcagttgttcctgaaaattattttctagaagacaagacatatagcagataatatcgagtatgtactcaaaaaactgcatagatcttctagtattatcaggatataacgagcagattaaatatcaggcattatgtaaaccgtaaacaagcatgatttatacagaagagaacggagcgagcccccagcattagaccgtagttggcctgacatcggaagcactcgcacaatagatattgtttaaaaaacatgctctaggtaaacataataaattatagatctgacaatatcgtatagattggaaaaataggtacgataaattgtatataaattaccgcgtacctgtgtagatatatgccaaatatatctacgaaattagtagatcaattaaattattcaacctactaattgccttactgtgtatgcttggtgaggaatagtaactccttaattgatccgattgtgtgtatggtactgttccccatgtaagcatgaaccttgtattttggtcctttaattgatctgtttgccacgtcgttggaacggccaaccaggatgctgcctagagattggattctagtgcgagcataagagaactcctccaatccgacttagaatttacacccatgtacatatcaatctggctctagatttcagctccacggcgctcgttttgttggtggagataagccgagttcggtttgaacttagccagccgatgtctcacaccagtcgatgccgcacacatggaggaatcggtgtcggattgctcttggatgccaccgacacagtagcactcctcggcgatgatggttctgatctagtcggaagatgtacttggacaggttggatctccccacagccgaagtcgtcgagtagcttgttgtcggagagtccatctcttaaacccatctcgtcgaaatcctgaagcaccaaaatccccctacctggcgcgccactgtcgacgtttgatgtctcgactacggtatttggacagtatagggatcgtcggtgctagggtatacgcgagactgaggtaaaagagatagagacatggatttttatacaggttcgggcccatgaattatcaggtaataaccctacatcctgttggccggagccggagttgctttttattcaccataatcacaccagtacaatatgtgaggtagtctatctaactgttgtcgacatggcggtctgaaggtctgactcgtagtcgacaacagggtagccttcctcctcaaatccgtgttcggcaagatcagagatagcgctttcgtatctcctgacggtatccggagacaccgtaggggaatagccatgcctatccctgaagtcgatatccggcagcgtgtcttggcgtatgtaggcttgtgtgttgtggcttctggtgggcgtgtgttgattgtcatgggtgtcttccatggtctcctcaccctctcctcctaggggggcttgtatttatacccataggtatccccttgtccaagtagaactaaggaaaccaatatggatacaatccgagtagtccttgtcgtttccatgtataactctggttgtctttccttatccggaactccctcgaggtcagtttccgtataagacatggtatgtggtggatcctgccgaaatttagtcaactactattaggtatgtgttatccataaccctgacaattttaaagagttagttttttttttcatatttagtggtggtcctatttttaagggtctgtttagatcctccaaaatggcaaaagctatgccgttttggagcactttttgccattttagatataaacactagtagcaaaagttggcaatttggcatttggcatttgctagtgtttacacccaaatttggcacctaggattaaaatagggaaattgccaaagtttggacgatctgccggttttcctctgagagggccggtctgaccgccgtatgtcggctggtcagaccgccgctagtgggccggtctgaccggtagagtccgagtcagactgttttcatcgagtctcgggtttccttgcttgggaagtcatgtttcgtgtttccatctgtttctagcccgagttgaacgtggaggagggcatgtaaagggcaagaccaacccctatataagggacaaggccggttcaattgtaagagatcaatcaactatcaatcaatcgaatcgttcttttacttttgcttctagttctagtttagtttgtccatctttgtcgatttgcgccggtccgccgccgctgtgagtgcgacacctctttgtaggtttgtcctgaaaaccttctgtttttcccacgagacgggtagttatctatcgttctatctagatcggctccgctagccggtttagtttatcaaaatccatcttagtttaacttttgctagattgaggtggttggcgactctaagattaccgcaaagcgttaggtgctgtgactgtgcttgtcaactttgtcaaaaaagttgccaacagctagtccatggtagcaaattttgccaaaaagtgctccgggaccacaccctctctctttctctctctctttagtgctaaaatggcaaaactttaagatgcatctaaacactaactagtacttttgcaatgtcaaatcttttgccaccaaaacttttgccatatatttgctattccaaatagatctaaacagaccctaaatgcatttttcttaagagatcatccatgaaaatcgatttttagatgatttcctttatgagaaccacagataaaaatcactggatctttaactgtaaaaatcatgatttttgtaagcctttccttaggaaagccacccgcaaaaacgaatttttgtggacctgccaaaaaaaaggtttttataggtggtcaatgactctgaggtgtaactattttcacatgcactatttcttttggactgcttgagaaaataaatagtgtagcgtcaaaaaaaaatgatgttttatagtgtatatatcggccggatgagaatagagatcagctggactgatatctctgcacgttaataaaaactgcagctaatctcgtccatccattttgatcactacgggttcagatccaagttgacagtacatatatgtaatatcaacaggcctctagttaattaagtaattagtataaaaatgaaaatatgaagatggttatctggccagtggccttccagtacacaactacacattagcaacagctagtggaaatactcaaataatactgctatgcccaggaaacactagtaattactacctccgtccctcatataaagtcatataaaggatattcactatttttaaaatactaatgtttgaccactcgtcttatttaaataatttgtgcaaatataaaaaagaaaagttgggcttaaaatactttagatgataataaagtaagtcataaataaaataaataataattttaaattttttttaataagacgattggtcaaacagtacaagtaaaatgttaaaatcccttatacgagttgacggagggagtaattaaatactgtcgccgttttcacgtcgctaccgttttaatttgtctgcaatataacgaattaatccggctatctgcgatatagccaatatatcatatctatgcgttatcttgttggaacgtacaggatatggccatccatgcgatatggccaaaaactctatgtacggttttgttacatcttaatcttctccgtcgtggccgatagagaccacacgtattacaagctaatcacaaatctagggatagctatattatatatttgtttatgacccatatttttcaccccaaattagtaagataagattcttttttacattgtaaatttaaaacttatacatatactacatattaaattacattatttacatattgttattttttttctaatatacgagtataaaatgttggaaatatagtcattaatcggcatattttaatccaagaaaaagaaacaatgatcatggcataagtagtgtagggtgatcttaacataaccagtagcatactatgcgcatcatgaatgtcgagaacaggaacataccagtaacgcgataacatgctagaggcatcatgtagaacaggaacaagcacatagtataggagaagattataccccgagaatggccctccgctggatggtgaggcagaattgcctccgttgttgtagtcgttcacggcacctcctcctggcgcaccagctccggatccagatccagctcctgtcggcggcggcgtaccaccttcgtcaacagaggcggcagcaactccagacatggcgatgagcagtcgtgcggaaggcactccccaaaaacctgatcacccgcctacccggtgcagatctcaggccaatctctcatgcgcgcaagagatcagaagcggggaagcgagagagcaactcaggcacggaggaggagaaactaacaccgggaaacaagcgaagaaaaacggatcagactcgcggcctccttatctatcaggagaaagaacgtggacgcgggttagtggctgcaaaaggatagcgacgtgacgtgacgtgacgcacgcacgccgccctcgccctcgccctcgcccacgcccacgcccacgccccggcccggcccggcccgcgcgcgtgtggcattctgacccccacctcaactggtcaacagggagcctctaataactccctatttaggttgagatatttctcgcttaaatcctgaggtggtattattatccttaacatttattatgggcctttgagatttaatagaataaattgggcctagcccaattattctaacaatccccaccaaatttcaaggctcataagaaatgttctcaatgttgtgcctgtttgatataccagggttttggtggagactgttaagttgaacttccacctaggaaatgagctacatcagaccacaacttaacaatggactatgccttgaattgtaagttttgtgtgatcaggtttcactcagaaccttgactggtactgggctgccgttcgcatcccctctgtttggagcatataagtcaaactccaggcctttcatgagtatctagagattgcccaaacctcatagactgtgactagcagtcgaactcatataggtgtgttccttctgagatgttctgcaggtcaacatctctgcttggaaaagccactcggatcacattaagacataagccatcctaccatgcaggaaagaagagaagcacatcatggaaatgagctcttttcaagggtctcttctctcagtcacacaatagtttgtttcaccatccaaattcacgggatctccgatcacaatggacaggtttctactattatgcaaccttaggtgggtatcaagcccatttccctcgatgcactgtctatcacattacgtggtagccccttggtaaactgatctgccagatttctagccgtttggacatagtccaatgctatcactccggagtttttctgctttctgacatatttcagtcttctcttgatgtgtctagatgacttcatgttgtcctttgaactgttcactttaataatcactgtttgattatcgcagttcattaggatagctggcactggtttttcaaccaccggcaaatccatcaggagttcacgaagccactcggcctcaactgtcgcagtatctagtgctgtaagttctgcttccattgttgacctcgttaagatggtctgcttgcaagacttccaggaaacagcgccacctccaagtgtgaacacatatccacttgtggcttttatctcatcagcatcagatatccagtttgagtcactatacccttctagtacttttggatacccggtatagtgaattccatagctcatagtgccctttagatagcgcattactctttccagagcctgccaatgatcatctcccggatttgagacaaaccggctcagcttgcttacagcaaatgagatgtcaggcctcgttgcgctagccaagtacatcaatgaaccaatgatttgagagtatctcagctgatcccttgctattcttcggtttttcctgaatagcacgctgggatcatcaggagtaggagctggcttgcagtcactatatccaaagagactcaaaaccttgtccacatagtgggattgcacaagtgtaatcccacactcatctcctctttgtagtttgatgttaagaataacatcagcctctcccaaatccttcatttcaaaattcttagacagatagtctttgacctcctcaatcacattaaggctggtcccaaagatcagtatgtcatcgacatacaagcacaagatcaccccttctcccccaccatagcgatagtatacacatttgtcagcttcgttcacaacaaagcctgcagatgtaagcgtgatgtcaaacttctcatgccattgcttaggtgcttgcttgaggccatacaaggatttcaatagtttacacaccattccctcctgaccttctagtacatacccgtctggttgatccatatagatctcctcctccagctctctgtttaggaaagctgtcttaacgtccatctgatggacgagaagaccatgagaggctgccagagcaagtagtactcgaatcgtagtcaagcgagcaactggtgaatatgtgtcgaagaaatcctcgccttccttttgggtataacccttggccacaagccttgccttgtacttttcgattgtaccattaggcctaagctttttcttgaaaacccatttgcatcctacgggcttgcacccatatggacgctcaacgacttcccaagtaccattagacataatcgagtccatttcactgcgtactgcttccttccagtagtcagcgtcaggagatgaatatgcctcttctatggttcttggggtgtcatccacgaggtatacaatgtagtcatctccaaaggattttgcaaccctttgtctcttactcttgcgagtatctacaatgttgtcctcctcaggattttcctcaggcgtttcatcattgtgttctatcggtgcaaagtgctcatggggcatgacagtttctttactagaagtgctaggtgtatatttcataggaaattcattctcaaagaatgtagcatctctggactcaaaaattgtaccagcatgcatgtcgggtactccagagtttactattaagaatctataacccacactgtggatagcataaccaagaaacacgcaatcaacggttttttgtccaagtttccgctttttgactataggtacatttaccttggccaaacagccccatgttcgtaggtatgagagatttaatttcttcctttcccattcctcgaatggtgttacttccttatgcttcattggaattttattcaggacatgacacgcagtcaaaactgcctcaccccaccattccttcgaaagccccgcagtgtctaacatggcattcaccatctcagttagagtacggttctttctttcggccaccccatttgattggggtgaatagggaggcgtcatctcatgaataattccaaactcttcgcaaaaagatgcaaactcattggaaaaatactccccacctctatcagacctcaaccgtttgattttcctttcaagttggttttctacctcagctttatagattttaaagtaatgcaatgcctcatcctttgttttcaatagatacacatagcaaaatctagtgcaatcatctatcagtgtcatgaaatatttctttccccctttagtcaacacgccgttcatttcgcacaaatcggaatgaacaagttctagaggtgccaaattcctcgcctcagatgccttgtgaggcttgcgaggttgtttcgattgaacataagtatggcacttggaacctttgaccaaagtgaattttggaattaaactcatgttagctaagcgcgtcatacaaccgaaattcacatgacagagtcgcgaatgccacacattagactcatcattctcgctaatatggttcacagcattatgattattacacatgtcattcaaagaaaagcggaacaagcctccgctgtcataaccttttccaacaaaagtcccatatttagatacgacacatttattggactcaaacacaagtctaaaaccttctctacacaatagagagccgctaactagattcttctttattgaagggacatgctgcacgttcttcagctgcacggtctttcccgaagtaaacttcagatcgaccgtaccaacaccatgaacagccgcaagcgacccgtttcccatcaacaaggaggaacctctcccgacctgataagaagaaaacagagaaatgtcagcacatacatgaatattagcaccagtatccacccaccaatcaggtgaatgaaaaacagagagaactgtaggtaatattttaccgtaccccgatgttcctccgccctcgctaatgatcatgttggcagacttcctgtctttgcgctcaggacagtccttggcccaatgcccagacttgccacacacaaagcagtctccttttgcctttcccttgcctttcttcttaaaattggttgcagccttgggtttgacatcaggcttgactttcttgttgttgtgggatgcatgagggttcttcttctgtaccatattggcactagaacctccctcaacctttttgccccggatgtcctttgccctcgccttctcctcaacacccaaagagccaatgagatcaggaacactgaactcttgtctcttgtgctttagagaagtggcaaagtccgaccaagaaggtggtagtttggcaataatgccacccgccacaaacttgtccggcaactcacagttgttgttctcaagttccttagccagcatctgaatctcatgagcttgttctactacagaacggtcatcgaccatcttgtagtcatagaactgctccatgacatacagctcactgccggcgtcagagactccgaacttggcctcgagtgcatcccacatgtccttcccagaaggcatgtgcatgtacacgtccactatgttgtcagcgagtacactgatcaatgctccacggaacaggcaatccgaagcctcgaacttagcctcttcctcaggagaaagaggtggttcacttcgtttgccccgtgaaacatagaagcactgcatcgctgtctaccacaatagtgcacgtgctttccatctcttatagtttgaaccatcaaaagcatgtggtttcagtgcagcagcaaagccaactaccgaaaatgacctatcaggtttttggattgttggaaatatagtcattaatcggcatattttaatccaagaaaaagaaacaatgatcatggcataagtagtgtagggtgatcttaacataaccagtagcatactatgcgcatcatgaatgtcgagaacaggaacataccagtaacgcgataacatgctagaggcatcatgtagaacaggaacaagcacatagtataggagaagattataccccgagaatggccctccgctggatggtgaggcagaattgcctccgttgttgtagtcgttcacggcacctcctcctggcgcaccagctcctgtcggcggcggcgtatcacctccgccaacagaggcggcagcaactctagacatggcgatgagcagtcgtgcgggaggcactccccaaaaacctgatcacccgcctacccggtgtagatctcaggccaatctctcgtgcgtgcaagagatcagaagcggggaagcgagagagcaactcaggcacggagggaatcgtgggaacgtgggttagtggctgcaaaaggatagcgacgtgacgtgacgcacgcacgccgccagccacgcctcgcccacggcccgcgcgcgcgcgcgtgtggcattctgacccccacctcaactggtcaacagggagcctctaataactccctatttaggttgagatatttctcgcttaaatcctgaggtggtattattatccttaacatttattatgggcctttgagatttaatagaataaattgggcctagcccaattattctaacataaaagaattagaattaaaaaataatttattattatcaacttaaaagagtatatagaagatatatatatatataggaaagagagtaatcacataaaaagactaaaattaagtgaaaaatatatgcatggtgtcataattttagcaatcccgtctaattttgcaggggccaaaacgcataattttcctctggagcagctatatatatgagactctacgtgctcactccatcgacactggccatccatcccgcctatgggtagcacgggagaagtaatgctggcatcgggaggaggagcggcgccggcgccggcgacgtcgcgcgacgggcggggcgccgccgcggggctggggcccgtcgcgttcaaggacgccgccgacgccgacgccatcccggtgcgccctcccacggagcacgacgccgccgtgtccgccatgccggcgcgcgtcttccacaacctgaagctgcgacagcaccaggggtactgggtgctcgacgcctgggcgcgcggcgcggtcgccatgcagcgcggcggcggcggcctcgtgccccgcgccgacggcgacgtcctcctcgccagcctccccaagtcggggacgacgtggctcaaggcgctcgcgttcgccgtcatggcgcgggcggcgcacccgccggcgagccccgaccacccgctccgccgcctcaacccgcacgactgcgtgcccctcgtcgacaggctcttcgcccccggccgcgacgcggttctcgacgagctgccgtcgccgaggctgatgtgcacgcacatgccgctgtcgctgctgccggcgacggtggccgacggtagctccggctgtaagatcatctacatttgcaggtatccgggactttgtgcgtgataaagtttgaggacactggctagcaagtactcctatatactggcttagtttattaacttacacatgacatgaggaagataaccaattgtggagtaaatggtaataaaataaagtgattgaattaataggacaaaaaaaatgatgctacatctttcgcaaaatccttatgtaggccacaatgcaaaaaattcataccgaattcaaatattaagtctaaactcaaatgtgccggatattaaaagctagatattaggcacatgaaaatttgaaaattccaaacacctaaaattatgcattaattgctaatcataaatttgtagtgccatgttaatgtgttcgattttagttcattttaactacaaaaatatattgtagtagtatatagatttactttatttttgcatttcactttgttttttttaccaattgttaattaaattatttcatggtatttgtaaaattactttaagtttaggttataatatatcattgttacacctcttatctatgaaataaggataactttgcaaacagatagatataccacagggaacaatgagaaccgtgccttcctgatgcccttattacaatattgcttgaactgtcataggtaccggttagaaactggtcataggtatcggtttccgtagtcggcacctatgcagttgcgcataggtgtcggttcttaccacctaacaccggtgtgaggaacaaataaagcaaggttgctcgacatcgagcagctactgatccccatccaagaaccattcctataagatcccctcatcacatccaataacacaattacgaaatcaacactaagatacaaaatcaatatcaaagaacaatagagaatacacagagaggagaataaaataaatcatcgcagttgctgcctctcgacaaaccggtgctgctcccgcttgatccccttaaggaggatggatccagatgatgacgttcaaggtggagatgtacaggcccggcagggtgtgcagcggcacgggaccttgcgctgctcaagcccgtgctcaccgtccaccgccgctgccccagcctacaccaccgctaggacgggttactcgtggatggcgctgcgacggggcagaagccactcttctccgtacgccgcttgtctatcctcggcattggctctgacgccggcgctgtcctcgtcgatattctcggccccggtgccaccagcgagttccacgttgacaggtccttctagcggtgctactgctgcgtggtagccggattcggcggaccccgacctccaggcggccggatctagcatggcttagaggtagtggtgaggaggaggggcagaattacttggaggggcgtcaccagggagaggaagaggaggcagaggagggaggagtggcggcggacgaagatggatgaggaggaaaggcccgtgtggtggggatgtgcaaaagatgtggacaaggagtacggggtagggagaaaagtagggagaaaatgtgaggatagatgtgtgaaagatgtggataagaaagtggcttggctccgtcaattttatgggtaatagttaattaaaaaatcagttcatataatatattataggttcttttttaattattaaccagtacctacaatatattacaatatattataggtcctagttcatttgaaaatattatgctgattttttctttagaactgacatttatattactcaaaggtgtatgttctatatttttttcatcgtgcaaatgtgagaaaatatccgtaggtaacggttttaaatgtcgaccgacacctatgaatcgatatcaataaggggtattgtagtagtgttaataattgtgatttctgtgatgaataacaatgggcagagaagaatatatagaatcatgtcgttattatatatatgtgcaaacaaaatatgatgagggggagagagagagagagaacggggagggagagagcgactggagggtattgtagtagtgttagtacagcgcaaggcgtacttgtgctagctacgtgatagaattggacaattaacgtggaagtaggtgactgggtgttgtcatatcaattaggtgtaccggatatttgttagctacaataaggacggtcgacggaatgggactgatatatgcatgggctagctcgaccaaagttgctagctactgtgtgtccttcaggtaattaatcggacagatacacaccacactttttatattatactccccccgtttcaaaatgtttgacatcgttgatttttttaagtacgtgtttaactattcgtcttattcaaaaaatttaaataagtatttattcttttcatatcatttatttcattgttaagtatactttcatatacacatatagttttacatatttcacaaaatttttaaataagacgaacggtcaaacatgtgctaaaaagtcaacggtgtcaaatattttgaaacggagggagtaagttgtttgatttttttattagttaaactctcttaagctttattaagtttataagtgtgtgtgtgtatatatatatatatatatatatatatatatatatttctaatataaaacaaacatattatcaaaatatattcaatgttaaatttaataaaactaatttaatgttataaatgtgacctaaagaaatttgactaataaaaaagtcaaactacttatatatcaaatggagggtgtatataattaaacaacctctatatatagccataatttgggcacatatattcctctttaatctctctcatcaacagaccgggagtaaatacataagatcttatacacatactctctctttctctttctgtatatgtgtgtggtatatatagatagacatgtcgatatatataatattcaatttgcggcccattatatttgtaccatgatgaagtgataattaactaagattgttaatgtaaacaagtgggatggaataataccaccattttcaaattttgcttggtgcatgtgcgaagaacctagatcactgaaagacataaaaaggcaaaaattaacaagttgcttgtgacaaatataattctcatatgatatatgttcatcgttttcatggaacacatcatgatcaacaatgttttactcctatcattcatcaaaaatccaaaccacaatttgataattgcatcgtgaataaagtattagagcacacacatcgaacactataatataatcactgcagcatgccatgtgtaattaaaaaaagagcacatcgatcgatctaaagacaaattaaagtttaacatataatgtccagccttaattgagctaggtaccccaaaatacagatatgcctcataatcttcgtccaatgcaataactagctaggtggtaaccaggtttgaactgtagttacgtagtttttcgattttgctatttgttaaaacaccattgttaagtcttattccttttttttgcaataaaaaagaaggagctgtcaaaacatataaatgtacatgtgcagggatcagaaggatgcattggtctccatgtggcacttcctgaagcgcaatgggctacaaaatctgtacgagtccttctgcgagggcacatgcttcgggggccctgtttggaatcacattctcgagtactggagggcaagcaaagcgaacccaagcagggtgctcttccttagatatgagcggctgcttcaagacccaacagacagcatcagggagctagccgagttcgtcgggcagccattcactagctccgaggaagaagctggtgttgtcacggagatcgtagagctctgtagcatggagaatctcatgagccagaaggccaacaaggaaggcgcccaaggtgtgttcatcaagttctctcacgactcgtatttccggaagggggtggcagggggttggacgagccacatgacccctgagatgggaagacgtctggatgcgattctccgggacaagtttgatgggtcaggactcactatctgaatatgcatttagttttacgtgtgtttcgtcttttaatttatgcttaacaatatatagtagtacgcaaaaaacgttggattgttttttttcttgttgaaccttttctccatgtattgaaataatggtgttgtttggaagtatagtctgtaaccttttatgcttgtaaaacggttataactttgtaatttccagggcaccaaggaaaaccctttaattgtaatttccctaattcggttaatcacaatgtagcttgtattttggtaattgttagagttactctggttactgatgtaatgggataatggactagctatctggcataaatacataatgattccccacacattgctgcaagatggctgtggatatcatttgctttggagagatgcgcatactatataaaatgctttctagaagtctatcatcaatgattactgcaccctaagacaaatttagtaaattaaggcaaactgtttcagcttacttaagaattcaactaacttcatatatatttcccaattcaagatgactaaactaactaagtgtaatgtcaacaatcaatccagtatactgttcattgaaatataagctagaaaaattcaacctctaattctttcttttgagaagaataaaggaccaggtcttcgacaatggaagcctttatgccatatccatgtacttgtttatgaagtcataaatcctataaatcctataaatcctataagtttatacaggatttataaatttaatatagattactaagtatgctagtgttattgcccaagccccatatgatgagtcatcttaagggagggagggaagtaattaattaattcacacatctgcaattaatatggagatgatatatactcctcccgtccgtgaaagggcatatagcctagtggttgcagtgatctgagtagcacccaaggtcctaacttcaaatttccatatgagcgaattttagattgagttattagagggcaagttccttatttgataggctaagttcctaatttaaaaaggctgcatatatccggttggatgcagaatccgggtaaaaaatatccttcttaaaaaaaatactcctcccgtccaaaataaaacgaacctaagactggatgtgatacattcagattcgttgtactaaaatgtgtcatatcccgtattagatttggtttttatgggatggaggaagtatatccagtattagatttggttttttatgggatggagggagtatatactgctcgcagcctacatgaagaacatgtcattgcgcctccgctgagttggggcttctatttttcccattttcactgatagctagatctaaattttcatgagctatgtttttattcttactaattgtgtggaggcaaagcagctgtttgcatactgttcgtggatttgtgtatcaaattggcatgtgtgtgttacaggatttgttctagtaatttggcacatgtaattaatttggcacatgtgcgtggatatagctaaaactgctgatttagatgacaaatcaagatgtattatggtaaaccttttttaacatgctccaaaataaatacatcaaatacaaaaatgagagagagaaaaaaatgatgatcgaagtggaacggaggaagtacggtggtaattaagctagttacaagctccagcatacgctgcaagatccctagaacacactactagaaaaccacaaattggggacatcctctatctacaaggcctttcctatccttcgtaaattcttaaattaaaaatcaacacctataacgtgccaatttttctaaaaaccaacacgtataatacaagtgcctgattttctttaataaaagcagtacaaataaagatgtcatatgtgctaggttttttggcacattattggagcagcagcaccagcggaaaaaaaatcacatagacatacgccatatctcctcgtgacctcgtccattcctttcttatatccgtctctctcaaaccctctaagcctccacctaagataatcttcatcttttctctcattgtctctcactctttactcctctccacctctcagcatcctagcctgcgacgctacgatgacaccccaacacgtaaaggcggcagcctgcctctcccagtgacacgacgattgcggcgaacaagccattaggttatcctctcaccatggccacagcctcagttcccgcagacggattcatcgtcattggcgatggcggtggcaccgatgccatatctagattgtccgagttcaggaacctctagatctgccctcctccctcccctagttatcactgtcgaccatgacgagcgacaacgagcaacagtgacctcccctcggtggggcagcatcagcatcctcccctcggccccacctccccacaagcagcggtggtggcgatccacatgactaaccaatacccctcctcccaaaaaattcccctccctgatctctcccaccaccccttatatctgactgtggtcttctggatctgagtagtggtggtgagcagtagcggcaaaggtggctttggcctccgatgggtggtggtggccttggtctccgctgggatgaggcaatggaggcatccttgtgttgatttgtaaatatttttttctttgaggggggaggtcgtgaatgttatgtgtgtaatttctgggatgattctgatacattgtcattggatttgtgagaatcttccattcagtttttgtatgtgttcttggctcgtagcatatgttcgattcgagccgatgcatcgagcattttttttattcatggaatctcaaaagcaccaatttctagaccattctccacatcagtgtcacatgaagggtgccggttgtgaatttgacaccaaagaccggttcccaactgacacaaaagtgagttcctatagtagtgacagatcgaatgtaactgcagcatttacctaaacagaggttaattacaataattaacaaaaaagatggttgcctatggtgattgacaaaaacgatgggtagcatcggaaggattttatttggtgcaccgaaaattacataggtcatagatgtacctgtttataagcataaacagttaaagttaagcctccaaacaggctaggaggctttgttttattatgaaacacatagcttgaaaactgtgactacaaattaaaagatgaaaccccggccataatggcgcatcatatggtgagccccgatccatcaaacttttctcgcataatcgaatccagatgttcgcccatcttaggagtcatgtggttcctccagtccccttccacccccttcctaaaatacgagtcgtgcgagaacttgatgtacacaccttgtatgccttctttgttggctttctggctccttagactctctaggctacatagcttgacgatctccgcaacaatgccagcttcttcctctgtgtcagagaatggctgcccgacaaattgtgcgagctctctaacggtgttcactgggtctcgaagcacctcctcatatttcaagaagagcactcggcctagatctattttgcttgccctccagtaaccaagcaagtgatcccagacaggaccagcaaacccagtgccatcacatatagactcatacacttcttggagcaacagatctggcacattgcgtttccgaaagtgccagatggagaccaatctatctttctggtccctacaaaatataacaagctagagtaaagcaatgtttcattgtcactaaagttaatactatgtgaataaatgttttggattttggtttgcaatttctctctttctaaatatacatattgtatccaggacttgcttttgcgaattcatgaaattttggacaatgtttggatcaagtatgtaagaacaatatttttttcctagggtagagatcgaggttgttgaacaagtccaacaagctaacacacgagacacggggctctttacttctcaaagggcaccatggtctagagcatcatgactcattgcaagggagacaaaataagtttgtttttcaccgaactcttgcatactaatacaaagcaaaaagactagaataccctctactttatcagtcccctacttacctaattacaattaatgcatttgtcccctactttcataaaatccaatgcaatgatgactcaaagatgaacttattttgggacatacaagagggggcaaagataattatatttcagaacagagggactagaagcttgcgacactatagaaaaacatgaactgcctctccatcgatatggatataaggaaaagggaagccaattatttgacctcatcaccttgaactcttgtaggaggataatggcaccagtgaaagacaccatctaccaatactgcaaggatgactctcagacggaggggagtgggtgtggaaggggatttctttttgctttgaaggggctcttaccaaggtcatggttgtaattgtgcgtttatcttcttgtatagaaaagagtagattctataaaaccccacctattatggttcaagttgtacaaaaccatagagattttggcatgtgacacataatctcaagtattatgtgtaaccattttaatgtgctcctatatcaagattttaaaaagtggacaaaacatttatatgatgaataaaattctcaaaaatttaaattgtaattgtagaactaaaaggtgtggttgatcaaaaatcaaaatgttcaatagtacggttttatgaaattttagaaccataatatccggtgtgatgtgccacgtatcaaaatccttatagttttacgtaacttacaccataatagtagggttttatgtactttacttatagaaaaatacaatgttaaataatgacaacaaagtaccagctaatctagatcctgcaataaccaaataggaaacatgctacatcaccatatttggtagagggtcccgttctgtcataataatactacgcagttgtatcacacatagcacagcacgtggtcatgtaccatctttcttcctaacgcttttctttgggaaataaaaaatctctatttaacggccatatggcaaaatactcatttttaagggagaaatacataccatttccaaaattagtttaaagttttcacacatgagatttgagatgagagcagctaatatttgaatctgatatgtataaatttcggctggtgtacaaaaacgaaaacgaccggatatgattcaaaactaagattccccttagtaaaataatattacctccgtcccaaaataagtgcagccgtggatatccgtgtccaacgtttgaccgtatgtcttatttgaaaattttgaaaatatttagtcacacataaaatattattcatattttatcatctaatagcaataaaaatactaattataaaaagttttcaaataagacgaacgatcaaacgttgaacgtgaatagtgcaaaactgcacttattttgggatagagggagtaccaataacaatataacgaataagggatggctagctatagctatggttatgggtacctgcaaatgtagatgatcttggtgttggagttgccgtcagccaccgccggcggcagcagcgagagcggcatgtgcgtgcacatgagcctcggcgacggcagctcgtcgagaagcgcgtcgcggccggcggcgaagagcctgtcgaggaggggcacgcagtcgtgcgggttgaggcggcggagcgggtggtcggggctcgccggcggcgggcacgcgcggcgcgccatggtggcgaacgcgagtgccttgagccacgtcgtccccgacttggggaggctggcgaggaggacgtcgccggcgcggggcacgaggccgccgcggtgcatggcgaccacgccctgcgcccagctctcgaacacccaggtccccccgtagcagcgcatcggctggccgtaggagacgcccgccggcagggcggagacggcggcggcgagctccgtcggagggcgcaccggcgtggcgtcgacgtcgacagcgtccttgaacgcgacggggcctccaccatggcgcacagctgctcttgctgccggctctcctcccttgttcgccatggcggcagcaagagcgagtatcgactcttataagaccctagtacttactatactccgtatattggtttgctgttgagaaaagatttggtatgcatggccagatggccttgacagccggatgagattctctacaatactttatttggcaggttactataggcactatctggacgagattttagcggccacagtttctccaaaaatttctagctctcgaatgatcaatattcttatccggattcttaggcccgtttagtaggactccaagctccaactcccaactttaaactctaactccagtgatagctagctcctataggagctgaagtgggtatataagtatttggctagattgattagctccacaccaacacgtcccttgttggcatttagttgaacacctggttggtgtcgccccactgcctccgccaccgcacgcgcatggccctgcctgctgccgcagccgacgctactctcgcacctcgccctgccgccgccgaccacactccaccgcccacgtgccgtctcccgccaccgttgccgctcgtggccctcgccgccactccaccaacacctgccaccaccgcctgccgctgccgacaccaacggcgccgccggtgtcaagggatgaagatggggatgagcgagaacgggagatggggtaggaaggggtagttcagtagcattttggtataaatagactaaaaaattaaagggtagtgggtcttttgcggtggagtgaagctgtggagtagcaaaaacctagctccacccccgtagtacaaatttgtggagcagctctactaactccgctccaaaaaatagagaatctataccgtttggcacagctccagctgtaggttgtgttcgtcagttggagttgaaaacactttcctcattgcacgcaaaacgaaacaacagtttagcgtatatttagttaaatattagctaaaaatttaaaaaatctaaagtagtgaaaggattcatctttccactggtggagaaaccatctttggtcggtctggcaaaatccacaatagtcccggttccaaaaagaaccgggactaaagataaaaattttgatcttgatctttagtcctggttcataccctgtcagatgtatgtcagggggccgaggatctttagtcccggttggtgtcaataaccgggactaaatatcaccattttagtcacggttggtactcttgatcattagtcccggttggtaataccaaccgggactaaaattaaacacgtagtatataatccctatcacttatcttctcatccacagttataacttagacagatcgaatctcaccccctctcctcagatctatcctctctaactctcttcctcgtcccctctcctccagctcctccccttcctcctctcctcccccttctccccttcc

SEQ ID NO: 4921 - DNA, 42901 bp, Oryza sativa
  unsure (1)..(42901): unsure at all n locations
tcccttgctagagcaagagggccagcagttcccaagggctcagtctcttgggaacacgtgattgtgatgccaagcttatcctcaaagtccttcaggaaattgagcattacctaaaagacggatacagaacaaaccaattagaatgcgaagatagttatacttataccatgagacaacagtaaaatattatctcctttttacctccgggcggtagttgatggctaaaacaacttctgttactccaacttctttcaaggcctcaatctgcataaaccagaaaacttttaattcagagctcattactctcctcaatcctcatgctcatgtttgctggagccaacattttggatataaatgaagtactcttgataactgattggaattttcaaggacagaaaatttggtgtgataccaaaagagttctccaaaatcatgtaaccaaattgataaggaaagaaacagttgaatagtaaaaaggtgcattcaatcacatgcaaatgccacctatcatggatgtttagttgttacaccatgtttatgtgggggttataaacaaatcaaatagtattaatgttctttgaccagtttaacaccctctccctcctttcatggagaggccagtgtcagtgttggaatgttggtaaagaatactgtactaattaacttgtgcccaattcatcgattggcattgcaaattaagtgctcttattactccatcagagtactagcgaaaccacatattacctgatgcagaatcatgggcttgttcgcgaaatcaacaagaggctttgggaaactgagcgttaaaggccgaaggcgagtgccgaagcctccaaccagaatgagcgccttcatggtgaatcgcctcctgttcttccctccctaatccctactccggcggagggatcctcaagcaaggcttgggaaggggaacctgccattgcaacagacaaaatcaaatgtgaaactaggttggagcatcaataaaaaagaaagaaagatttcgatttgattgctcgcggtcgtggcaaagctccagtgagctgctttcgtaccaatagaagggatcagcctggaagatctctcttccttctccacgaccagccccattggaggtaggtagcacagctgcggtcgaaggaggagcctttgtgctgtgctagattgggaatcgagaattggatgggactttatagaggcgaagtggagaggcgacgcgaggaggggaagggggcccacagtagagatgcggttgtgtacttgtgtgtgtctcgctctcgcgaaagaaaattcgcgaccacaggtgacacgtgttccatcacaaatctcaaagcaaatcccatcatctccacaatcttgtgtttggtttatgggtaaggtatgatacgttaaactcatcaagttattggatatctatatatctatatagaaacgacggacgaagcggactaatggaagccttacgaatttttttattagatatagatatctatatacctaattaaaaaataagtaaggcttccggttaatcttttcgtccgtcattaagagtgggcccacacgataattcgtcgctaatccatgatccgaaagcgtggccacgatctcttacgcctgcaaataaaggagaaaagaaaaataaaaagagaaaaccttgtttgtggagcagcccatccaaagcagcccggattggattagtgacgaggcagcccacccaaagcagcagcaggccggcccagatagcagccgcagcccaccagcgagcccacagagcggaggagaagcagcccaccagcccagcacagtactgcacaacactgtagcaaccgaacacgaataaagtttggactcacgccaagcaggaatcggataataaaagaagcgattttattacttaaaacatgtagtcaccaatgtagtcaccaataaaatgaattatttaccgacaaaataaattattttttaaaataaaaataatcacatgtgtctttctttttttaaaaaaagaagtaatcaccaacaaaatgaatcgtgtttacatttggatttttttcccctcatcaattgctcattcgccataggacacctaatcacatcacttttttttccattcattatataatttcttctattatttagagtgaaagttattctgcgatataccacatttttttctttccttctaattatttaagtgaaaggttatgcaattggagtgcaatgaggttgatctgatagctagcaaaaaattatttcttgtattatggctactctttacaatatgaaaaaaatgcttatcaatatcgagtaccaaaaaaataacaaagtactgcaattgactcataataatacatgacaaaaaagtaaatattttttgtggtttcaaactttagtatccatgtcagtgcatttagagcagcaaataattatatcatgttagcgtcttatttgcactagaaagattcgattcgactataaagacctcaatttacctggtggttttatgctcccacacactaattactatttctgtcttcacccaatgcaacgcatgggcattttgctagtagatatagatatagatatagattagatatagatagatatctacctacctatattataattaataatataataaaaatataaatctatcatatacctacccctaattaaaaaattcagtccgcttcgtctgtcatctgtatgttttgagtccaagtcggtcttcaaggaaaaaaaaatccccgtgctagatacccaaattaatcaatcaaccaaaaacagcacgaaaataccaaatttaacctagatatcatgaatttgatcccaagaaatctaatcccccaattcgatccatctgagccaagacacaatacataaacgatagaaaatgaatcacgaaatcacaaatccaaaatcatccagggaaaattaactcacaaaaactaaatcagcgacgccactggtcatgggaggcgaggacgccgcttctacgaggagggtgccgccgccgaggctgtcgataccgtccgttgtgttgtggcggagaagagggtgaggacgccgccgaggagccagggggagggcaccgcggctgagacgccggctgccaagggaagggaagggcgccctgggtgagtggtaggggaagcgacgtcgtcggtggggggagagggagggcgcgctggctgaagggtaggggaagcggcgttgccggtgggggaggagggggccggagagagggactgagggagaggaattaacgcgccgcggagagaggagagaaggtggggaaggaaagagataataaggtcgatggggccaagcattgagacgccgctctcttctctagtctagtctcatcccaaacacttgatttcctctaaagcgacacatgtcccccctccttctctcctaccatgtggttcccaattctttatttttttttctcccggtgagatgcagggtttcccaaaccaccagagccggggttaccgtgccccggcggtaagcacggttaccacacggtaaccgtggtaactgtgaaaaaccgtacaaaaccgtgcaaaatttatcaaaaatttaaattattttttaaatttatttaaatttaaggaggttaccgcggtatttatattaccgtatccccgcggtaagcccggttaccggcggtaagggaaaccctggtgagatgttgagcttgggtcggaccatccacgcggtgttgagcgccattgagctcatagtggcagccgggaattggagtcaaggcatcaagctaagccctaccaactttttcttcaaacttccaacttttccatcacatcaaaactttcctacacacataaactttcaacttttttcttcaaactttcaattttaagttaaacttccaattttcgcatggaacacaccgtgctgccgtcctactgaatgaaagataaatcacgtgcatgcgttatctttttttttcgaacagtcagaccgttgccgacgttttatataaagaagaatgtgtctcattttaagaagaaaacgagacaaaaccttacaatgcgcagttaattaggaaaaactggacgaaaaccacaacactctaacataagctaccaacaccgcgaaaaaagaaagaatggcgaagcccaaaacagccatcgataaagagcttgttgaaagcgacacaaaggcttcgacttcgcgtggcaagtgttatcgttgccgagcttgtcacctagcgacacagcagcttcgactccacagctatcacatcatcgttaccaaaggcatcgcagaaaacgagcaagacaccgactgtccactttgaacatcaacccaagccacttgagcactactacttgtacacagctaacaccaacctccctcgaaaacttcaacgtgttatcgttgtcaagcttcatcgcaccccgataaagtagctccgacttcacctagaagaaaacggagaaagttggacacttgccacatccaagagcggcacccaagagacgaaggcctcgccgaatagctaggcttatagagcttcgacgtagggggtccacgaacgaccatccttgcatggaaaaggttcttggtagtgagggagacgccatagcaacgcctccaaggaggggaacgacgcctaatggcgccgccgtcgtcaagccaaccaaaggccagccaaggctttcgccagcgtcatccaaaaccacacaacccacccgcacaacgtatgacgccggaccgccacatcatccctctagccaccaagcctagcccaccacccacaacttaggcaggctcacgagtccaccgtgctgccaacccgctgccatcctctgctgcactgacccgatctggccaaggcggccgtggatccggccgtcaaagcttgacaagccaacgtcaccgcgagcgcctacactccgctgcaccgctgccaccgtcaccaccgcaaccgtcggtgggcgcagccagtggctgccactatctccgcgccgacgagagcctcccgcaaccgccggtggcgcgcccgccccctccgtcgcagcaccaggcccccgcctccgtcacacgcgctcgattccctccgtggccggcctcccgtagccatccccacgccggcgaggccacgccggcccccacctcgccttggcagctcgccgtcatcatccagacggcggatctggccaaggggcgccggaactggccgtccccatcatcgggccgagggtcaccgtcgttgcagccttcccgacacgtcgtcgacctccgcccagcgcgccgccggcctcctccatgcgcacaccgaccacctccgtgtggacaccagctgggacaccggatccgaccatgagaggcccagatctgtccccaccatcgtcgaagctagtcgccgatgaccaccacttggggtcctccctccgtcttggcagcgccccgagccgccgtgcctgcgagaggaggcaaggagtcccgccgccgccgtccatgcgcccgcccgactttgccagtggccgctcgggcggcggcgaggcggaggggaggaggagaagtggtcccgcccgtgccaccccgaggctgagcggcaggagggcttctcccctagggtacttgcctgcgttatcaattccaatctgcttcttgaactgcaatgcaaggagttgcctcatgatgaagttattcaatgattagattttgtatgccattgagtttagtttgtatagtgaatttcactaataatttttgctggtgactgaacttgactgagccttcaaggatttcttcgtgcagttgagccttcagggttataaataacgttgatgtttggacgattcttctcgataaacgtctcatgcgactatgcgagcatggatgctggtaagtttctctgctacattgagctcgactcctccgaggagagctaaagaatgggaaaccggagacgaagagatgagggggtaaacctgccctgagattttttcggatgagggtaggagtaggacttatatatcctacgtaatttccttccccgcatcaacgttcggatgggcgttagcatccataatttattatatataagtcaattctttttcgattttgctatatctcactcaaaagattttttcttatctctcactcgattttctcacttaaatttacagtgcattttcttgtaagttacagtgtaatttatgaaacttacactgtaacttttgtaagttacactataatttttgaatcttcgcatgtaaattttaaattttgtattggatttggtctttttcttgaggatatagtaatttagtgtccattatggtgtttcttaattgctttttactttttattatatctatcggattttaatccaaagattaaaaatctgtgtgatacgatcataaaaatctttcgaaagatgtataagtactcccattcttttttataaaaaccggtatatttgtcagtttttattaagaatcacatatatagagattcatagggatcggttttaacttttatctttcctaagagtaacatggattgaaaaatgttctataaatatcggtttcaaatgaatcggcacatatacgggtgcccttcattggtgtttctgtataatttaacatgtcaatgccattgtatatacatgcaccgcatataataaggatgggaaaatgtcacgcccagaaattcactagtaatttccgaactaatttgtgcataaaatcctcgtccagaaatcagccgagacacacaaactgataatttaatatacagaatcatcataataataacgttacatacttataaaagaaaagagaaaacaacaacggaattacggtctagcgaagctccggctccactccctcttctccttcgcaacttgtcttcaactgagatttgattgattattgcaaggtgagcatatgacatattcagcaagccacacagcaaatatgcaagcgcacaaggataccaaaggatggcataatatagagctcatttgcaaaagcagcatttagcaaacagttaagaattgtaaaacagtagagtaattaatcatcaattgctcaggcccaaccatcctgaacaaccatacccggctgtaccgatctatctccaaaccaggaatgtaccattccaaaccaggagctaatcaaattattaccagttataggatcagttattatggtgagaagtgtgagactaatcacgaaagatattgttagactcgcccatgaccgcgggcacggctattcgaatagttttactctggccagaggtgtaccactgtacccacaaaacacagccccacaacatatcaccatgcgcctcgataccaccacgataccttggaaaggagctgtgacagtatcccttgcacaacacaatccaccacagcgcatcgttcctggatcataatcaccccattataaaacaaggcatggactccccagcgactcccgtgggcttatctccgccacttctcagtctggtgccccgcaatgaaccatgctatacaaaaggtaaagccgttgcccatgctggcttgtggttggcacggttaatgtttcataaccgaaactcgtgaaccggtccttaattgtcatgagcacgaccatcaaaaccatgtgctcacaacccaccattatcaagttttagttggcaagtaattaattaaccactcacgattgaccatcgtgagcttccattaaatatccaaaagtgatagtgaagcatgatttatcccattagtgagctattgtttctaagcatggctaagaatctattataagcatctagctgaaccaaaccaatatataaggttctagctaattaaattataacccatagaaaaataaagtcatcttcggccataattaaataggaaaggctcaccacccggtgacattcgaaaataaatgcacagttgaaataaatagagaatttaaatataggatcaacatgctcaaaggaattgtgtttgggatctatatgacttgctttgcaataatcggtcttcaattaatcttcttgaatactcccggcacacacgcgaaccttcgaaacgacggaaacgacaagctaacacgcaaaacaaggaggaagactaataaaaaccaaataaacaatacataaaagtaaacaaacatgtagatcataattttagataaatttagagacttgaatagcctcattccgacttcatatgaattagttatgaattttacaagatttaactccaattaaatctattaaagaaaagactattccaaattaattaaacaatttacaaatgatttataactgagataaaatattaaaacaacctccggaaaaagattagaatatatttagtggatgacatatattaaaaaggaataatatgttactgaaaagaggaaacggatttatattgattttggacggctgagattaatcttgacctagtcgaccaatatcggaatgcttggattgatctggcaagcgggcctcacgagataccgactcaacgagtcaattctacgtgacacgggatcacccaaatgatcaaccgaaactggcgaacggaaccggcggctctgaacagctctaaactaaaggacgactccacacggatgaacgaacgaaacacggggaacacctcgttcgaatgaacgagcgaacgactcaacaacggctgcgactagaccgatggctagacacgattcacggtaaaagcattggtacggcaaacgataggccgataggaacctagggttacacctacggctagacaactcgattaccaagcaatgggctaaagtggcggctaggtttaagcgacacatagctgcgacatgacacaacaacgacaacacggcatgcacaacagcagcagcatggctgaggcagggagtggcacggcggcggctaggcggctagcggcacagcgatacgacaagcggtgtgcacggcagcggcacaccagcggctaaacagcgacgtggcggcaacaaggcgacggcggcagcggcggtgcatagagcagccggcaagcgacgcgacagtggctgcgctagggttagagcaacaacggcttggacagtggcggcgacacgaccgagggattgaaacctaacccgaggggatacagatagaagtcgcaccgaacccaaacgttcggagagggagagatgacgacggcgacccggcggcaacacacggagacgacgacgctatacagacaatggactaggttagattggattaaggccctagagaaaacctgcaccgatgaacagcatgggagcggcggttggcggcgaaccacgacacaataaagcaaacggagggcaccagaaggtagagaaggcgacggcgattcttacttacacttacacgatgacagacggcgacggaagatggccggcgatgagcttgaaaaggcggcgaggtactgatcaacggtagcggtggctttccggcgatccacggcgaagaagaggtggtggacggtgttctcctcgcagctgcgaatccaatggaggtgacggcgaagcttggcgacgacggaaggagcagcagggcctcgccggagatcaaaacgcgacggcgagcttcgggttgacggcgacgatggagctccggtggattttggcttcggggaagtggaggccggtcttgttcttgccgctgcggtgccgaaggaagtggcggcgctggacgaaggcgaccagggaagacggcaacggcggctgaaacggcggccggcggcggagagagaaggagcgcgcggggagagcgattccggcgactacggagagagggagagatggcggtcgaaagaggggagggagggtgcactatatatagccatgggaacccggaatcgagcccacatcgacgggaaaaactcgggaaagtttaggattctcgccggtaaaaggaaagattgattcgcgaaattggaaaggatttccatagaaacatttggggatttcttggggaaattgaagaggagattgagaggattccattcccgcaactaatttggaaaaaggagcaacggggaggccggattggaggaggagatcggcacggctgcacaggctcggcctctgtccagaggttgaagaaggtactgtatcggagggaggcaaattagacttttgttctgggcttccttttccttggcacgattgaaggagggatgcaaaatggacttcgggaatggataaggccggccgaaaagaagcaagaatgggccgataactgaaggtgaacttttcctgtttcggcccgaaaaggaaaaggggattttaattacttttcccaattaaattaatcagtgaaatgatctttcattgttaaaaatacttccaatgctcaaataattccaagaaaaatcttgaacatacttggacactctaattatttaacaatattaaaaacatatcatttaatgattaattttttaattaaataattgctgaactgttctttgtattattaaaattaggaattgagctctgaaaaatccgagaaaatttcagagagtataattaatcatggagaatttaatacaaattaaatccagccatgctttatgtttaggaaattttatttcccacatttaacttcacttgtaaattaatgaacttttaatataaattctattaataatttattgaataaattataaatcctgaaacgaaaaatcaggctgtgacagtaaattttagattagactcatcaattatccgaattcaacacctcaaccaactattcggtacacgcatcagcgaaacatggatcataagacttgaagcccatcaagtgtacaaagaaattaattgggcaagcgttctgttcatcaaggctattggaaccgacaatccgtggagaattttaaatttttgagtcaatttagtgattattgattccctgtaatctctagaaaaaaaacttaattgttttatttattttctaagtttggtcaatgcgtgtgtaaaaaaatgttggtagtgacttatgctccatcccgcatcgattagtttctgttcttatttcttttatacattcggctatgatacttaaaattttggattcgttttttagtgtcggtgcatattgtatgttgtgagttgtgattcggggatggggattaatttgcatttggggcagcagggagtaactcggaggattttttttttatcgtgtgtgcctcaaaggtgcaccgccgctgtgctaggagatgccgagagggaaagggaggaggaaggcgctgacaacgaggctgaggtggcgcggccgcgtggtggtggctggtggcggtggccggtggcgggaggcggatgcggcatgggtagcggtggtggtgattcccaaccatagtactagaaataggaatcggttgaaaggcttccgtgcgcgtgaggtttctacctgcgacggacgaaaaaattcatctagaagccttgcatattttttaatttttatatttactagaaaaatgtccatgccttgctatggaaaactacactttcatgatccaagcgttttaagagaatattcttcacggtgcacgcgaatacaatcttttgtcaagttctagataagaggtaattttttttcaaaacaaactatttcacattacaccagataaattattctatttgtacaagactgaaacacaaaataattgaaatccgatctcgacacggacttcgtgtcgcacatgaacatgatctaaaaagttacaactttaatgtacaagtctcaacattcgtacctatgagattggccagatcacaactcgcggtgggcttggcgtagaggtaccttgatgagcaccacgcacgctcctgtaactcatccacttcccccaccctatcagctccacgctgaggcagccccaccctcagccgcaggctcacagcagcaccccccgtcacctcccgccccctctcccccacctcctccagccgcggccgcagttgcctctctgccccaccgcgaagctgacaggtgaagaagaggaggaagccctctcggccatcaccggccctggtgccaacagctaggtgaccgcggaggagtggccacggtgggcacctcctcgcctctctcggccacgatggccgccgtcgtccgtgagcttgtcgagaggaggaggtgtgcgcggacggagaggacactactggagaagtgatctttgccaggatgggcaaaaaccacaattgtcccggttcacccaaaaactgggactaaaaattatttttagtcccggtttataagtgcaacaggaagatatgatctttagtctcggttggtaacacaaaccgggactaaatgtcatctttagtcccggttgtaaatgcgtcaggggttgtcaggcgccaggggatcttttgtcccggttggtgttacaaaccaggactaaagatgagagctttagtctcgatttatgttacaaaccgggactaaagatcatggtgatttttagacccggttggtaacaccatccgggactaaagatcccatccatatatagtcttcttcttcctctagctagcccgagaaggctgttggtatttcttaacgatattattagaaatataactccgagcaatggcgcagaaatacttctggtatattatggttacagagttcattcgcaagcgcacggatataccattatagcatttcacccgagagtattccaagggtatctgtcgacgtttgatgtcgcgattccggtatttgcatagtatggggatcataggtactaggatatatgcgagattgaggtaaaagagatggggatgaggatttttatacaggttcgggcctctgaattgtcaggtaataaccctactcctgttggccgatgccggtcattgctcttattcaccataatcacaccagtacaatatttgggggtagcctatctatttgttgtcgacgtgatggcttgaagtatcatcacgtagtcgacaacagggtagtcttcctcctcgaatccgtgcccggcgagatcagagatagtgctagatccctcctgacggtagtcgtaagtaccatacgagggtcctcctagacaaatctctaacatagatatccggcgtcttgtcttggcgtatgttggcttgtatattgatctatcgttcccctctcccctttcctcatagggggccttgtatttatacccataggtgtcccattgtccaaatagaactagggaaaccaatatggatacaatccgagtagtccttgtcgtttctatgtagaactatattcatccttccttatgcggaactcctcctatatccgaagattgtttctgtataagacatggtatgtggtgggtcctgctgagatttagtgaactactattaggtatgtggtatccaaaaccctgacagtattgtatttatttaatcccgtgggaagatcatagtagagagaaccggactaataatttatatgttacttgaaataatcagagtctaagcagaggttaagataatccaagggtagagtgacacacaaggagggagctactcattctcatactaaaatatctaagctaagtggaaagaaaatagaaagagaatctattcctatacttctagtatacatagtatacatacattctagttataagattaactagctaatactctctatccgatgccctcttggtacttcgagaagccacccctgactgccgagttcctcacggcagcccgtcatgaccatacaaccagggctaaatacgaaggagtaccctccccaggaaattaacttaggactatatacacgcgcggaggaatacccgtgctgagctgtcaccatcagcggcccacttctcatccgcagcatataatccaaataatgatatcccgtaatctagacactacgcctaaactaccagatactactctaatatcatcgtcatgacatagagtaattgcataagcaaacgctatacccgtactgatgcatctcccagataagctagcagtataatcagtataacatgaacataatgcaaagttggcattcatatacttggaaagtatttcaataccataaatgtataaagaagagtattctaataaaagcaaaaagcttacaaaagagaagaggagatctactagagccatacctgaactcttccgaaggcttccggactccgatttctactctattcctactccactagcttcagaacactaaactaaacttgagagaatatgagagagctttgcttgagatgtgtgagtgaaatgagaaggtgaagtccttaaataggcaggtatgacggttgtaactgctgtgaaatgtctgaaataccctgcaaccgtcatcaggagaagatctagagcgtccctgccaaaccccacatccaacggtggaggtgggtctggttcggccgaaccaggggccggcccaaccagcccacaatttggctggtggccttctggacttctcttctccgaagacttgtgaattttggcccaattgatcgtgtcatttctgagttcttaagccatttatatataagtctgattttcgacatcgtccgattgattaatcgtcttatttgatgtcgattctcctctactttatagttattcactgcaaaaggttagtgatccaaatactagtggaatattattattctaacagaaatatgcattgcaagcataactagttctcttctattttggtaatattgacggtcgaaactgatcgctaacgaccgtcaacgaaggcttcaaaattttcttgagtttgaggggatgtgctgccaaattttttggtgattttgttttggtgataatatacaacttggaggtgtcaaaaaggttagcaacttcatcctcctctattttgtggttagcatttgcatttagagatatgttttgtacactattttgcctctataaatttggaatgggagatgatgagagagaaagtttgtgtagagatggaataatatagaaatttttttatttagaatttgagaaaaaacttgtgataaaagagatgagaaagaaaaagatagaaaattaatctaaaagaatataaaactaagttaatttaaattaaattaagtacaacacattaaatagtttacaactttattgtggaattgaaacatgaataatttgtggtattattttataattattgtttgaataattatatataactattgtatgattgtttaattggttagaaaactaagttaatttaaaattaaaataattacaacacattaaatatttgtttacaacttcaaatataattaaaacatgaataatatgtggtattattttataatcaaatttgtttatttagaatttgaaaaaaaaaacttgtgataaaagtgatgagaaagaaaaagatagaaaattaatctaaaagaatagaaaactaagttaatttaaattaaattaagtacaacacattaaacatgaataatttgtggtattattttataattattgtttgaataattatatataactattgtatgattgtttaattagtttggctttagtgaattatttttctcgatttttgtgctttttgtgtagatggatcggcaatggatgtgcgcagaccgacggtcgaaagagtttattgatggcgtgcataattttctgagagtggccgaagctaacaagcagaataatggttttatccgttctccatgcactaagtgcaaaaaccagagggagtattttgcagtaagaactactcatattctcttgtttgagatgggcttcatgccaagctataatgtttgggcctcgcatggggagcaaggtgatcaaatggaagaagatgaagtagaagacgagaacattccggactgagctcaatatggtagatttgaaggaaatacaacgggtgaggtggaaagggctgttgaagataatgacgctgcaaatgatcgtggtcagatgttgcaggatgtcaaggaggactgcgaaagtgaaaaggaggctcagaaattagagcgtatgttagcggatcacaagacgtcattgtaaccaggttgcgaacaggggcacaaaaagttgggtacaactctggaatttttgcaatggaaggccgaaaatggtgtctgccacaaggcattcggcaacgtattaaaactagtgaagaacattcttccggaggaaaacaagttgcccgaaacaacatacgaaggtaagaagatagtctgccctctaggactggaggtgcagaagatacacgcatgtccgaatgattgtatcctctatcgtggtgagaagtacgagaacctagaagcatacccggtctgtaatgcactacgatacaagattagaagagacaatccaggtgaagttgacagacagccttcgaagaggagagttgctgctaaggtgatgtggtatttccttataataccatggctcagatgtttgttcaggaacaaagagcatgaaagaatgatgcgatggcacgcagaagaacgtcaacaagacgggatgctgagacaccccgctgatgggtcacagtggcgaaacatcgatagaaagtttaaagactttggaaaggatgcacgaaacgtaagattcggtttaagtacggatgacatgaatccatttggagagatgagcagtggccataccacttggactgttacgatgtgtatctacaacctccccccttggctatgcatgaagaggaaatacatcatgatgccgattatttttcaagtcccaaagcaacccggtaacaatattgatgtgtacctaagaccactggtcaaagatctgaaactgttgtggaaaaaagaaggcgtccctatgtgggatgaggacaaacaggaggaatttaacctacgagcgttgttgttcgtaaccatcaacgattggtttgcccttagcaacctatccgaacagtcaaacaatgggtacaaggcttccattgtttggaagaaactgaaagtacgtatctgaagcattgtaaaaaggttgtgtacatgggccatcgtcgatttcttgttgtgacccaacctgtcctcaagaaaggcaagcatttcgaacagaaggcggactaccgtaagaagcctatatttcgcaacggtaaatacgtgttcgatatggtgaaagatctcaaagtagtgtttggaaagggacctggcagccaacccatagccagcgaagatggtcacgcggcgatgtagaagaagaagtctattttttgggagttaccctcttggacgtccgccatgcaatcgatgtgatgcacctcactaagaacttctgcgtcaacttgctgggcttcctaggtgtatacgggaagtcgaaagatacacttgaagcacacaatgatctctaagatatgagtcaacgcgaggacctctacatggaaccaaaggagaaaggaagccagtacttgagcccaaccagctacactctaagcaaggcagagaaggaaagtatgtttgaatgcttggagagtcgtctgggtactcctctaatataaatagaataataagtatgaaggataagaagtttacaaacctaaagtctcatgactgtcacgtgttgatgacacaactgcttcatgttataattcgaggtattctccctgacaatgcccgggcaacaataacaaagctatgtgtttcatgaacgcaatttcacagaaggtcatcaatccagacaaattagaagcccttcaaaatgatgtggtgcaatgccttgtcagctttgagttgatctttccacctttcttcttcaacataatgacgcatcttccaagtcacattgtgaaagagatcagtattctccggctctcgggcctgtgtacctacccaacatgtttcctttcgagaggtacatgggtattctaaagaagtatgttcgtaaccattcttatccggaaacaagcatagccaaggggtatggaacagaggaggtcattgagtttttcttagaatttattgaagaccttcgtccaatcggggtggcagaaatcacgacatgaagggaggctacggggaaaggggactcttggaaggaaagcaattatgactgtagatgtcacatcctgatttttgtttcaggatttataaattatttaataaattattattagaatttatattaaatgttcattaatttacaagtgaagttaaatgtgggaaataaaatttcctaaatataaagcatggatggatttaattttttattaaattctccatggttaattatactctctggaatattctcggatttttcggagctcaattcctaatttttaatcttacaaagagcatttcggtaattacccacatattaaattaatcattaaatggtctaattataattttgttaagtactttgagtgtccaagtatgttcaagatttttcttggaattatttgagcattggaagtatttttaacaattcaaagatcatttcattgattaatttaattggaaaaagtaataaaaatcctcctcctcagcttgggccgaatccagcccattccctcctttcccctctcccttcctctcagccaggccgaaagtctgttttgcctccctggcgctacagtactccatcttcctcctccagccgactgtctcccgtgccgtgcacagtgccgccgattcccttccaaaatccgacctccccgttgctcctatttccaaattggttgcgggaatggaatcctatcaatctcctcttccttttccctaagaaatcctcaaaattttctatggaaattctttccaatttcgcggatcaaatccttccttttccggcgagaaccctaaactttcccgagtttttcccgtcgatttgggcccggacccgagctcccatggctatataaaggacccccctagtcctcctctttcgtttgccccatctcccgagctttcccgtgcctcgtagctgccgcgccgccgccgtttagctcgccgttgccgccggctgactccatccgcgccgcgccgtcgcctccgtcgtcgccgccggtcgccgccaccactgttaggtgcgcgagagcgaggagaagcctggccgctccctccccgctatcgccggtcaccggagctccgccgccaccgccgaccgagccgccgccgccacccacttcgtcgccggccgtcgtcgttcgtcgtttggttcgagggtgagtaccgttgggttcgtctcgtcgtcctctacgtgtgcatgccttccaaatccgcagccggccgctctagctcccgcaagcttgccatccgagccggccaccattgatgaggtcatcgctgacgtcatcatcgtttttttctttttcctgtttttctaatagattaaatcttcggaaattcataactaaatcatcgtaactcggttttgagtggttcaggttgctaaattcatctaaaatcatgatctacatgttggtttactttttatgtattgtttatttggtttttattagtctttttctttgttttgcgtgttagcttgtcgtttccgtcgttgcgaaggttcgtgagtgcgccggaagtattcaagaagattaattgaagaccgattattgcaaggcaagtcacacagatgctaaacacaatcctttgagcatgttgatcctatatttaaattttctatttatttcaactgtacatttattttcgaatgtcaccgggtggtgtgaacctattcctttgttatggcctgtttgcattgattactctattccttgataccttgggatattataatttgactagttgagctttatatatattggttcaactagatattagatatgattgcttagccatgcttagaaacattagcacactattgggattacttatgactcattattatttaatgatggcttaatgatagttcacgatggtcaatcgtgattggttaattaattacttgccaactaaaacttgataatggtgggttgtgagcacatggttttgagagtcgtgctcatgacaattaaggaccggttcgcgagctactattgtgaaacattaatcatgccaaccacaagccagcgtgggcaacggctttacctttcgtatagcatggttcattgcagagcaccagactgagaagtggcggagataagcccacgggggttgctggggagtccatgcctctggtttttgagggggtgattatgatccaggaaaggtgcactgtggtgggttgtgttatgcgaggggtaatgtcacagctcctttccgaggtaccgtggtggtactgaggcacatggtgacatgttgtggggctgtgtcttgtgggtacagtggtacacctctggccagagtaaaactattcgaatagccgtgcccgcggttatgggcgggttgagcaatgtttttcgtgattagtctcacacctctcacaataattatggatgttatactggtaataatttgtttagctcctggtttggagttaaatctgtacagccgggtatggttgttcaggatggttgggcctgtgcagcatgggtgtgctgttcagtgttgattaaaatttctgattaactactccactgttttatttctcttaaatgttttgctaaatgctgcttttgcaaatgagcctatattatgccatcctttggtatccttgtgcacttgcatatttgctgtgtggcttgctgagtatgtcatatgctcaccttgcaataatcaatcaacctcagttgaagaaaaaggatccagaaggagaagacgtttggcttataccccagttgagctgcctgtgggagtggagccggagcttcgctagattttattttccgctgcagttttcttcatggtgaggactaagtgcctcttaagtaagtatatatcggtttagttattatgatggatttgtatattaaattgtcagtttgtgtacctcggttgattcctggacgaggattttatgcacaaataagtttggaaattactagtgaatttccgggcgtgacagtagacaacgatttattctgtaaagcacatttcacggttttgcaacaatcttcgttggtggctccttacatcgaggagcacatggcgattattcggtccaaaaacatcgttaagtccgatgcctggattgcacgacatcacattgatactttcccagcgtggctacgacaacatctcatagctaacgacgattaaccaacagcttgccttcttggagaggggaccatctggctcacgacatggcaaggatatgagatcaatgggtatatattttacataatagcccaagacagcaagagcacgaaccagaacagtgttgttcgtatcgatgccattagacagaatggcccaaccagcacgtattacggtgccatcgacgacatatgggaacttaactattgacctctgaaggtccctctgttccggtgccaatgggttaggctgactggtggaggcataacgatcgatgatagtgggatgacaacggttgaccttactaaggttggatactccgacgaaccattcgtcctagccaatgatgtaacgcaagttttctacattgaaggacatgactagcaaagcaaagaaggggaaagggcccaacgagtctaagcgccacgtggttctccctggcaaaaggaaaatcgtcggagtcgatgataagactgacgaagattacaatcagttcgacgggcaacttccgttcgcggtgacagttgacctgagcatcctcctatcaaatgaagacaccccttactcacgagctgatcataaggaggaaacattagtgaggagaaagtacgtgaggaaaaccgatgtattagcctagactgttgtatggatgatgtaaatttgttttaaaatgtattgaagattcatctctttctattgttgtatggcgatatctgattattagaatttaaaacaattttaaatcgaggatatggtaattatatatgattattagattttaaaccaattttaagttggggatagaataattatatatgatcattagaatttaaatcaatttaaaatcgatgatatgataattaatagagaaaagagagagcaagcgggcgacaaatctgtcgccgactacacgcaggctcctaggcacccaaattaactgcatccctgttgaagcaaaacaaagaacactgagggagagaggaaaggcaccatgcggtaaaaaaatagtaaaatttcttaatcttgtttaacgtgccaatagcctgttactgtattctctagctactaattaatttgctttacatgacgtggcacacttatatcgctagcagctggcttgtacacaaaaccaagaaaatatatgaaagagacaagtcggccatgtattaattataaagagctagctattatatgggtagtctaagagaaagctacaaagaatctttcaaccgacaaacatgctatattattagagtaagtttaatagtatatccaactactaacttcaattcatctataatcaatataatagcttattctacctataagcatatactacaccattaatatatagtcacacctttcatatacacatattgtattggagttcgtgcttcaggtagctacaacgcttttcttctctctcttctttccttctctttcttctcttctcttctctacgtgtgcttacagctgacctgtatcttgctattgtactctcttctagccttgctctcaattgctcgactactgcagggatcttgtacatgctttcctccgttcttttttgggcttgtttagttagggaaatggaaatttgtaggtgtcacatcggatgtttgaccgaatatcggaaggggtttttggatacgaatgaaaaaactaatttcagaactcgtcggaaaaccgcgagacgaatattttgatcctaattaatccgtcattagcacatatgggttactgtagcacttatggctaatcacggactaattaggctcaaaagatacgtctcgcgatttccccctataattgtgcaattagtttttatttttatctatatttaatactccatgcatgtgtctaaagattcgatgtgatgttgttgggaaaagttttggggaactaaggccctgtttaattcgcgaaatgaaaatcttttgatatcacatggacatttgaccggatgttggaagaggttttcggacaagaataaaaaaactaatttcataactcgcctggaaaccgcaagacgaatcttttgagactaattaaaccgtcattagtatatgtaggttactgtagcacttatgacaaattatggactaattaggatcaaaagattcgtctcgcgatttctcccataactgtgcaattagtttttatttttatctatatttaatgttctatgcatgtatcgatgtgatgtttttagaaaaatattttgaaaactaaacaaggcctttagagcagatacaatagcaggctataaaccagctgcaaacatattttaagaagataaataaggagagagaagagcagcgggctacagatttttagccagctgtagcacggactccaagacatactgtgtgtatgataagtaggaccatgtattaatagggtagtatgtaactattgtatgaataagctattaggttggttatagatgaattggagctagtagttggctatactattaaacttgctcttactgaacacctctgctcctcatcaacgatcagccagttgtgcttgtatggtcgttgcgtcaaacagtagttgcgtgaatccgattcgatatcgacaacgctgctgcacatacggcgggaaagcttcgggcttggaactggaaaagtgctcggtcggctcggtacgcttgctcaaggaacagatgatccacaccgtccagtttcaagattagaacggcaaagccagtatcggcggcgaagcccaagctcccgaaacaagtctgcatggggatgaaggtaatgtgctgatgttgagattataggcatataatgatttaatatattccataaataaatcatgacattgcagatgtatactagcattaacgcatcattagatctacacatgtaaactaagcagtaaaacatgaacagattaaatatgcataacacattgaacacgtgccgagattgcggaacaaccggttgctcaacaggaatcactcgcggttgcggacgtcgacgaaggcgcgcagcacgcgtgcgaaaaggaagacgagccgtcgcgaacgaacagagagcagtcgcgcaaagcgcttcccaaaaaccttattaccgccttctcccggtgcaggatgtcgaaggcagaggttccgaagacctgctctcccgatcgccagtgcacgccggcgagcgggatggagtagtctacgagcgatggcgcagcacagagtaggaggcaaaccctagattgatttcgcgtgtgttgcgtgaaggcggcggctcagtttatatagagataggtcgcttgatcagggcgcccacacgatctccactccgcgtaaccgaacaaaactgcaaaaggaggctgcatctgcgcaagagtgaggagccaattttgcggaccattaccttattaccgccttctcccggtgcaggatgtcgaaggcagaggttctgaagacctgctctcccgatcgccggtgcactccggtgagcgggatggagtattctacaagcgatggcgcagcacgcagcacagagtaggaggcaaaccctagattgatttcgcatgtgttgcgtgaaggcggcagctcggtttatatagagataggtcgcttgatcagggcgcccacacgatctccactccccgtaaccgaacaaaactgcaaaaggagcctgcatctgcacaagggtgaggagccaatttcgcgcctgccctgccaggcgaggcgaggcgagcgagagtgcgcgtgtgttccccctcttctctccaccacatgcttcaagtggctaggagggcatcctcccttttaaggaggtccccctctccaagaataaacaaggtggtactaaactccccatgcatgccatcccatgaggtgggcttttgtgattttccaaagaattaatcttcgagtgggccttagcccatccattaattccaataatcccccaccaaatctcaaaatcccactgagatttgccttttccaatgtactgtttatataccagcggttcgatgaagaccgattaaggttgaacatccacctagaactaaagctacacttactcacaacttgaacaatggactacgtcttgaattgcaagtcttgtgcaagcaagtttcacttagagtcttatctggtactagaccgtctgtagactacccctcgggtggagcgtataagacatactcctaggtctttagtaagcttcctagaagattcacccaaaatctccatagactgcgaccaatagtcaagctcacaaaggtgagttctttcaagaatgctctgcaggacaatatcttcgctagttaaagccaacagaactcattaaggtatagccaacctgccttgcagctcacgagagtacacgcatcttcacttagagagggtatagattggtactctcctctagtttactaatgtttgttcttcccaggttttaattcacgggatttccgatcacatagattgggttaccaccataatataactcacatgggtctcaaacccatctcctttgatgcattgtctatcacattttgtgatagtcccttcgtgaagggatttgccaggtttctggctgtttggatgtaatccaacgttataactccggagtttctcaatttccggatagacttcaatcgtcttttcacatgtctagatgatttcatattatcctcagaacaattcactttgacaattatcgtttgattgtcacagttcataaggatagtcggcaccagtttttcaacaataggcagatccattagtagatcacgcagccattctgcctcaacagtagcagtatccagtgccgtcatctctgcttctatggttgacctcgtcaaaatggtctgtttgcaagacctccacgaaacagcaccaccacctagtgtgaagacatatccactagtggctttgatctgatccagttagaatcactatattcctccagtaccgcaggatactcagtatagtgaagctccaatttcatagtacctttcagatagtgcattactcgctcaagcgcacgccagtgatcatttcccggattagaggtaaaccgactcaacttgctcacagcaaaggagatatcaggcctagttgcactagccaggtacataagcgagctaatgatttgggagtattccagttgattcctagcaattctcttgttcttgcgaagcaacaagctaggatcataaggtgttggagaaggcttactatcaatgtagcccaagcgattcaagatcttctccacataatgggactgcaagagtgtaatctcattcttacctctaattagcttaatgtttaggataacatcagctactcccaaatccttcatatcaaaattttgagacaagaatgatttaacctcatttatcacctcaaggtttgtcccaaatatcagtatgtcatcgacatacaagcacagaataactccctcacccccatggcgatagtacacacatttatctgcctcattgactgcgaagccggcagatgtcaatgttctatcaaatttctcatgccattgcttaggagcttgtttcagaccatacaaagacttcaacaatttgcacaccttgccatcttgaccttcaattacaaacccatcaggctgatccatatagatctcctcatctagttctccattaagaaaagttgtcttaacgtccatttgatgaacgagaagaccatgtgaggctgctagggaaagtagcacacgaattgtggtcaatctggcaacgggtgagtaagtgtcaaagaaatcttcgttttctttctgagtatagcccttagcaacaagccgagccttgtacttttcaatggtaccatcaggcctaagcttctttttgaacacccacttgcatccctcaggtttacatccatagagatgctctatcaactcccaagtcccgttagcgataatggaatccattttactaccgacagcgtccttccagtagtctgcatcaggagatgcatatgcttctgaaattaacttaggagtgtcatccacgaggtacacagtgaaatcatcaccaaaagacttagccgtcctttgtctcttactccttcgaggagcttcattgccatcctcctcagtgacatgttcatgtgtatgttcaatttgttctggtggtgtgattaaactgggaattattttagagggttggttagaactactatgtgtattctttattgggaaaaagctctcaaagaaggtaacatcacgagactacatagttataccaacatgcatatcaggtaccacatttttaactattaaaaatctataggcaacgctgtgatgaacatatcccagaaagacacagtccacagtcttaggcccaagtttgcgcttcttcattattagtacattgactttcgccaagcacccccatgtgcgcaagtaagaaagtgatggttttctcccaatccatatctcatatagtgttttgtccttatttctgttaggaactctatttaacacatgattcgaagtcaacaatgcctccccccaccatgccttaggtagtcccgcggtgtccaacatggtattcaccaagtcagtcagtgtacggttcttcctttcggcaatcccattagactcaggagaatagggaggcgtcctctcatgtataatgccatgttcctcacagaataagtcaaactcatttgagaaaaactctccaccacgatcagacctaagtctttttatctttttgttaagttgattttcaacttctaccttataaattttaaaatagtctaaagcctcgtctttcgttttcaacaaatacacatagcaaaatctagtagcatcatcaatcaacgacatgaaatatcgttttccacccttcatcaacaccccattcatttcacagagatctgaatgtaggagttctagaggtgccaagtttctctcctcagcagccttgtgaggcctgcgagattactttgattgcacacaactatggcacttagaacctttgacaatggaaaacttagaaattaaacacatgctataaagccgagacatcaagctaaaattaatatgacataaatgtgaatgccaaacattagcctcatcatccacactgccacaaatatggttcacagacttattgtagaaatcagaaagggaaaagcggaacaggcctccgcactcataacctttaccaataaaatattcatgtttagacacgaccactttattagactcaaaaaccaacttaaatccgtctctagtcagacgggagccactagcaagattcctgtcgatagtagggacatactgcacgttcttcagctgcacaatcttccccgaagtaaactttagatctgccgtgccaacaccatgaacagaagcatgtgacctattccccattaggacggtggaaccccgtgcgacctgataagaagaaaacaatgagatgtcagcacaaacatgtacattggcccttgcatcaacccaccaattagtagactgattaactgaaaaaacagtaggtaaattaccatacccgcttccatctctagtgttgccaatggtcacattagcaggcttggaagtctgccctgcaggtgccttcatccccttgcgttgtggacacttcctagccagatgactaggttggccacacacaaagcaagtcctctcatcctaattaggattgttgttgttgttcttcttcttgaagttggtggtctgctgagctttgtattaacctttgctcttgttccgggccttgtgcacgacattggcgctggactgcccaccatcgcccttagacgcggagtctttttcccgagctttctcctcaacatcaagagacgctatcaacccctcaacgaagtattcctgtctcttgtgtttgagtgcagtactgaaacctctccaagatggaggaagtttcgcaataatgcacccggccaaaaatttgtcgggtaagacaacttaaggagttcgagttccttagccatggtctgtatttcatgagcctgctcaactacaaaacggttgttagccatcttgtagtcatgaaactgctgcatgatgtacagatcattgctagcatcagtagcaccgaatttagtattcagtgcatcccacaactccttagcgtcggtcatatgcatatacaccttgaccagacgatcaccaagcacgctaaaaatgcatcccacaaagagagtagtggcctcatcaaattctttctgctggtcaacattaagaactcccatagccttgccagtactcacccagaagcatttcatagctatcagccacagagtgaccctgatctgccatctcttaaaatgcacaccggtgaatttatccggcctcagtgcattggcaaaaccagccatagtaaaatcacagtgcctataataaggtttttggattgttgagattataggcatataatgatttaatatattccataaataaagcatgacatttcagatgtatactagcattaacccatcattagatctacacatgtaaactaagcagtaaaacatgaacagattaaatatgcgcaacatattgaacacgtaccgaggtttcggaacaaccggttgctcggcaggaatcacttgcggttgcggacgtcgacgaaggcgcgcagcacgcgagcgaagaggaagacgagccgtcgcaaacgaacagagagcagtcgcgcaaagcgcttcccaaaaaccatattatcgccttctcccggtgcaggacgtcgaaggcagaggttccagagacctgctctctcgatcgccggtgcaagccggcgagtgggatggagtagtctacgagcgacagtgcggcacggagtaggaggcaaaccctagattgatttcgcgtgtgttgcgtgaaggcggcggctcagtttatatagagataggtcgcttgatcagggcgcccacacgatctccactccgcgtaaccgaaccggatatgtcgcgcgtaacttatccggactccacgccattttcacgcatcggatttttcggaatgtttccaaaacaaaacaaatccgaatttcccgcggcaaaacaaaactgcaaatggaggctacagctgcacaagggtgaggagctaatcttgcagaccattcgacacgtacgtcatgcacgcccgcccctgccctgccaggccaggcgagcgagcgcgcgtgtgttccccctcttctctccaccacacatgcttcaaatggctaggagggcatcctcccttttaaggaggtccccctctcctagaataagcaaggtggtactaaactccccatgcatgtcatcccatgaggtaggcttttgtgattttccaaagaattaatcttcgagtgggccttagcccatccattaattcaaacagctggtagctccagtaattgaatctgaaactcgcctggttaaattgtatctctcctaattggtttggatccgagtcagagagcaagagcttgtcgaagttgtcggtgacgaagaagtcgaaattcccgaagcgaagacgaagacggtgacttatgaagttgatttcatcgcacttgtcaataggtaactcgatacatccctacctggcgcactaattgtcgaaacaagattttggcaatatgaaaaggggtagcgtacgagacctaaaagtggatagatgcggagataaggaagataggttcagtccctctcaatgagaggtaatacccaactcctgtttggggatagtgtatattgatctgacgttctagttgagaatctctacaccctagagggcctcctacccaccttttattgtatgggagcaggttacaagacagaaacattaaccaatacggcatctgtcggtgatatgagcccgggggtatcatgtttagagggaggaggccgcccccaaacccacatggcgtcccctgaggagggtggcgcatgagtggagtggcggccgccccctcccagcttacggtactgagtttggagggaggaagctgccccagacccacgtggcacttccccgagggggtgacgcccggggtggagtggcggctgccccctcctagagattagatggaggagactgcccctcaatgccacgtggccctcccccgaggggagtcaggcccgaggtagggtggtggctactccgtcccagagattagccggaggaggttgcccctcaatgccacgtggccctcccccgaggggagttaggcccgaagcggggtggcggccacttcgtcccaaagattagccggaggaggctgccccccaacgccacgtggccctccctcctgtgactaggggtcgggctcccccgaccccctctgcgggttgccacgtgcggtgggttaggtggccaccttcgagcgctcacctacccgcattaatggcaacctgagcaggcgcgccacgccacatttaatgtggcgtgcagcgcgcccaaattggtctgtgaccggtcgaatgaccgataggacccggggtgtcaggtgcactaccgcatgggtcagaaggcgtgcaccccgtcctatcccatcagtcatgatggcgaaaggtcttaacctctcatcctggccagggtcggtccatcctccctggtcaattggggtttccatttcccggcgtaagcaggagcccagaagtcttcacccattaatagcagctgacatgggcgccctcccatgtcaggcggcaagatttgacatgcccccaacatcaagatgacgtgcgcccgcttcccaagtcaagaaataagacatgcatttaatgcaaagaatgtaatacttctccaccaaagctaggtttttgggcccatgtggtaaccccttgagatataaaaggaggtcaaacctacttggggaggggggtcgatggatggatccgggatgagccattttagacactagagcagtctcttacccccgatcatcagcaccaccttcttctctaacaaggagatcttgtaatccttcactcagtgagcatagcacaggagtaggttattacacttctcagtgacccgaacctgtataagtcccttgtgtctcttttgcctacgaaagaccttgctaattacccgctgcccccggccgaactctcaaagggggggcctcacggttccctattggaggagttaaccctccgacatctggcgcgccaggtagggggcgcgtttgtgatttttgaggttcttccgaccgccggcgtgattagcatcgcgctgccgatgcgggggaaggtgcagcctcctcaggagtgtcacgccaccctaggcagggggcaaggccccccacatccccaccgggtaaggttggctgccaggtctttgtggcgagtcttcggaatgtctgatggcccccaaagctccagccctgcctcaccgagaagtacgacggcgacgtcgacccctccgagtccctccagatctgcacggcgatcatagaggcggtggggggtggcgaccaggtcatggcgagcgtcttccccatggccctcaggggccaagcggggggttggcccatgaacctgctgtcgcctcggttcactcctgggaggactcttgcagttgagctctgggtgccgtcaaagcccgggaccccttgtgctggctcttccgtagtggctagctttgatcccgccggctggctacggtgcccggcccggctcaactgatcgtcctttcaagttttaagtattttcaattttttcaattcatcaacttgaaatcttatatttaaattccccctattttattctcatggccctgcgacgctcgcgtcttgtgcattatttgtatatttgaatgataatttgtcatgattcattcgaagggtatgctactgagtaattatccgaagaagtttatgaaatagttctgatagtactaagttaatcgtaaagtgtttctcaaatagtacggacagaacataaatgactaaaagtttaatacaaatagataagtcaaggacgatcagtgcccttcgcacgcttgctaggtcctcacttcttcctacgcctaatctgctcagtgggatatgtcaaattatcaggggggtgcctatctctagctgcctgctgtggtgtcacgtctggcccctgaccggcctccgtctcctgcgtcggctgtgtgacctgaggtgctgcgtgccagtaatccatccctacttccccctagggaggatcagtggaaaagaagtcctcaatgaatgctgtgcgaggggagtaagcaggcattccgtgatgcgtcgacgccgaaccgtactcatcgtctgtttgcacaagagggagaaaccaaaaaatatggcgtagttagtaacgatacatataattagaaactaaagcgtgttattgtttaaaatgacttacatgtgtgctgtgtgtggccctgctctggcgcacgcggagtgatatgaagtccccatgctggtgtgttcaacacgttgtcccccgttggcatgtaagcgaagtgtgccgacccagatgctccctgcgaggggtgaacataaggcggagtttggaatacctgcggacgtggtggtgccgtgctcgacgtgggtacccctgatccggctgaccccctggtgtactccggtgctggggtgtgctgaaaggaaggacgaccgtgagatgtgtgggccgcttcgtacccgcgacgtgaagaggatggaccactgcgatccacgctggaacgtcggggtagtgaaggtgatggccgtcggcccgacgtctgcaccacatctgccacgctccgacaggagacacgacgtagtagtgcggcagcacgtgcacggaagttgcgaaggatgctcgccacgtcgtcaggcctgacgactggaggtctcacctctagtctttgcaacagggtgtcagactccacgtgaacgtgctcaacaaattccgcctgttccacaagtaatcaaggcaattaaaattatttaaccagttgcacatttattaagagtatttaacaatatgcacatttgttagaaataatgaaccagttgcacatcatttataaatactgaactagttccacatttatgtaagaaaaggaactagttgaaccaattgcacatttattagacatactgaactacttgctaactttttaaaaatattgaactagttgctcaaattccacaaataaacacgtaccattgagttgtaagctgatctaggctgaggggcaaacgtgtcagtaatcgctgcctggtgggggacggtgctatctccttgtggaggaaaacacctccatcgtgtaacactgcggtaccaacgaaggtaagctccataataactcccatcgtctggaggtgtctgaagtgccaagttatcagctgcgtgctcccactcttgtaccgtcggctgaaccgtggtcataataactagctcgtaggaaagcccgagcccctttctggagtacctgcacaacaacaaattcacacatcagaaaaaatgttgtgcagtgatttattttaaaaaatgtaggattaaacaactgtgatgtgaactaacctatgaagactatcagccaaggacgaccatctctcgaagggaagtcctgatacatgcccaactgtttgagaaccctgtggacattgtgtggctcgacgtgcacgtccaccacgaggtgacaagtcgtcatccagagttgcatatctcgcgtgcaaagatccgcgagaccgtgcggtgcacgatcattgacatcgggctgagtgtagggagtccaccgaacacggtcaggcgtaagctgatcaaagtcagctacaaactgagtgtagacacgacgtgtcgtcccgctaacccactgcggctgtaacaagtagtagttttcattagtcatataaggaaagtttgtgaactagtattcataatgataacataaacgattttaacaaaaaatacctcacggtgtgtccacaaggatcccatagtgggacgatcgtcgatgtcatcaacaccagacctgtacatctctcgcaaaccgtagtttgcgtacgagtcaagctgaggcctcccaatgtcgaagcgctcgtgcgcccacaacataagtagcaacgggcatccagggagtgaactttgcttgctgttcctcacgcaagcatcacacagtccggcatatgtcgccgcaagtaccgtcgacccccaactgtactgtggaatctccgcgataggtaactctgcaatctgctccgcaaagtggatgaagtgcttgtccacggagtcagcgtgagttcccgtgaacatcacccatccaaacaaccacaacaggtaagcgactaagtgccgctgcacgatccactcctcctggtcatcagggaagacatcctgtcgaaactgatttaaccaacttttcgtaggcccgtgcccatctgtgagatcctccagtgcaacaggcagcacaccaccaaaactggccagaaggtcatgcgcccatccagcattcaccattgttgggccaactgcttgcccagctatcggcagccccaacaaataagacacatcctgcagagtgggcaccatctctccaactgtgaggtggaaagtgtgggtctcaggcctccatctatccacaagagcactcagaagcgccgcgtcaatgtggattcgttcggaccttgcacgtgaaggctcgaccaaccgtgcaaacgtcaacaacccagctgctctcagcctacaacatgacagagcgcaagttattaatacatgaaaatataaacaccttgtattagtaaaaacaatatattttcacacaccttgaaacccaacgaggatcaatacgccaatattgatccggtcctcgcatctttagcacattgcagaaagttcctgtactaagacgtcgcgatcgatggttcctatcgatctccttgtctataagctgcccatcatattgatcagcaatacctgcagatcgaaaaccacattagtacaatgcacgtatggtaccagtacagtaaatgtatgcaacataattcaagtaacaaatttgcatgccatttcaatttaaaattacagtaccagcacacatagatacagataagaacagttcagtacatttcaatttaaaattacaagcccacgacacatatattatgatattacaagtgcagtgcagttcgaaatttaaattacaattccaatacaaatacatgacgatattaaaagtgcagtgcagttcaaaataaaaattacaaggccattacaaatagattcgggtaataaaagtgcaagaaagttcaaattaaaattacagacgcactaaacataaattgaacgataacgatcttcaaaatagggagtccaccaaggataatagcgaactaaggattatttttcttcttcgacttcccctttggaacgcgacgaacatcagcgcctgtggcatcttgccttacattgtacatgctgcaatctttacgggaatggttctccccgcaaagaatgcaagctttcttacgacgagaacgatctttcacttcaacttcatccataaggttcttgatcctgcgcgactggcgacgacccttagtatcaagtaataaatttgagtcaggaacccaattggcttgccctggaggaggacgagtgaaatcgcacacggcacgccaaccacgcaattcaccacgccaagttgcctcccacgattcctttctaaagtagggagaaacaaaaatgtttccatcaacacccccttttgcggaagcagcaagaacatgggaacatggccgatgtaacaggtaaggcttgttgcaattgcatttgcaagcgtgatactctggccacaacgtgcattccaatgtgatgtcagtagtcccaatgccgacaccactcttgtcacgaagtcgtatctcatataacaactctctattcccagcaggccacactctgtggattcctcccttcttacttttctcatccatgtactgtgtaatagcggggctatacttaacactgggtttgctgaggttcagactagccatggaataccttttacagagatacttctgtgtacccctcgtgatgccctccaggatagcaacaagtggtagaggtcgtgtattcttcataacccagttatacacttcagcaagatttgttgtcatcacaccatacctcgatccatctgtatcgtacaacaacgaccatttctcccttggctcaaattctacccactccgtgaagcacttcgtggcccttccacgcttcctgcgccgagtaatacttggtgcttcattaggaatgggttcaagtccctccggctcctcctgtctggcaactatagggtttttcctaacctcttccatgtgtgtagtggtcaaacgatccagttgatcccatatggcatcaaactttctttgttgattctgcttgcataacttcttgaacaggtccatcaatctcttactcctgaattgtctataaaaattagccccaaaatgtcgcatgcaccatctgctatgtaaatctggccatggcacggactgtgtgacatcttcttgaagcttctgtatcgctgatagcaaaccggcgtgtcggtcatgcagaacacacacatttggtctgttttcaacaacacacattttaatgtgctgcaaaaaccatagccagcttgatgtgttctcgctttcaacaaatgcaaaagcaacaggaacgacatggctatccgcgtcgactccgatcgcggttagaattgttcctctgtacttgcctgtcatgaaagtgccatcaacacagagcaaaggaatgcaatttctaaaggcctctatcatgcacccaaatgaccagaaagcccgacgaagaacattctccccatattcattcacctcatcgagaatagccatgtgtgtgcccgggtttcttgcctgcatcacctccaatagtgggggaagattgtgataagaatcctcataagttccaaacctcatctccaatgctttctattttgccctccaagccttgtcgtacgatatctcatatccgtactctttctcaacgtcatgcattatggtgaaaggggacaaagatgtttttctaaccacctttgaatataccatttgtgccacaaataccgctgtcaggtttctgtgcaccagacaggtattctccaacaaacacgtatgttgctcaacccttgaagctacccataaagtgtcatgttgtggcttgtaaccatgcactctccaaggacatccaccctgtatgcacttcacgtcatacgtcgtcctatttgaaaccttcaccctgaactcacgcttctggacaaatgcccacctcttcaccgcatcttgtaagtgacctttgtcatgaaacatctgtccaactttcacctgcttactatcataacaccagtgggcatctaaaccatcgtttaccttcatacgactcattgatatggtcgtccaatcatcgggtatgttagtttcgttgtcccacagtgttgtatcttctccttccactacaagcgcaaggtattcctcgttttccacttccatctgatccactaccgcctcattctcctccgctgcatcaacacgcataggcgaatccggttcttcatcgtccgagtcgttggcctcacgattagtaccacgaacaatgacctctccttgtgtattaccctctactacttcttcccctcgaccttgctcagtccgccaaacattttcagcttgtccaccttccaacggagtttcttccaccacggcatgacttgactcccccgatcgatcaacacatgttgtcttctgcaccactattgccaggctatagcctttctcccttactttactaacaaacttcctccaactcccagttgacgcaacctccactactctccactgccatccatgttgacccctcactggccacacggcatttatgacaaatttatcgtgcactggatctaccccaaacatattatacaaccaccctaacacgtcgttcaaacccatatgctctggtgcattcagactagtatcatggaaggcatatacagtcaaatccaccccgctatcacatatttgtataggaacatcgccataatacagacgaatgggcatatcacctgacatcctgataaaacatgacaaatagtctcacgtttaatcatttaatcattcgataattaccctattacaacttatactacattgccgtgtactaatttacaactattagtaacaaagaactagtttaataatccaaataaaatataacacctttgtacctattttaacacacaacatatcaataatatgtactaactaagaactaatttaaccgtacaattacttaaatacctctaccaacatttagcaataacaaatatgtgctaaccatacatactaacatcgaacaatgcgaaacaattaacaactcttaaaccaattttttattaaactttcatatgcattgtacttagggattactaatgtataccttaacttcactgctggagggtgtcgccaaccctttcctcccggccggcgcctcctcggcctcctctccggcctgctatcccctcccctcgctccctccggcgctcacggcgacgatgtggcgactctcggcggcggctggcgatgtggtcctcaaacaaatcgaactcgcggcctgggtggacggggctttaagccggcctgtcgaacgcccattgttcgatagggtcggtggagggccctgtcgaacgcccccggttcgacaggcctcgcggcgccgggtggtgggccctgtcgaactccctccgttcgacaggtgagcgtgtcgaacgccagccgttcgacagggctttgtcgactgcccgtcgttcgataggtgccctatcgaattgcacccgttcgacagggacctactttcacgattttccccggttggccactacttttgcgattttccataaaaataatattaattctcaaaaaaattccccagaaaccgcccaccaactttcgccacccgccggtcgccggggcggcgtctgagaggacgtcgggcagtgcgcgggtcggaggagggcgatcgagatgagggagctgggccggcagcctctagacatggagcggcctctcgctgcgggtggggcacggcctccgcccttggcttcgccgcataccagtgttgtagaagacggaatacggttgtcggacaaaaagggtatcgttcaccgattaatcgaaattatacggaaatttgacgttcgcgaatatatgtacaaattttattatattatatacttatttgaagaattatatttgtttaactatataaatcaaatatcttcatgttgttttttaattaaacagataagtaaaacattaactcttctaacaccggatttatatatcatatggtggtagaattggttgcattaaataagtaaaacataaaaatatatgtaacaaaacaaaaacaattctaaattaagtaaagaaaacaacactaaatgatcatcaaatacaacatacggacgattattcaggtgatttaacggaaaacgaccaactaatcgctaaaaacgagttttaacgttcgtgaacaataaatgtacaccgtatcacattaacgcggtggtggttttaacgttacgaccgattagtcaatcggtatggccattttccacaacactgccgcatacaccgccttcgatctggtgcgtgccgtcccaccccccttctcccctcccttgcccagacgtcatcccatacgagtagtctgtcgctcgattgctacgagtaaccgtcgctgcgtgtgaggcacgcataccctacactatagaaagacatgcatgtacaatctggagatgggttataatcacttgagtggatgttccattgtgactcgccacgtccatgcgttgcatgagcccacatctcttgaagcgtgtgtgttatggatcgagcacgcttgtaatcgatggtgaacatactggtatgtaatggtgttgcatgcgtatccattaagtaaaataattctattttttttagataataatagaaataattctaaatttaactaaaacagattatatatatacatatatatatataaccgatatacaaaccgagagaaattacacacgaattaattaagaaattttggactaaactaaacacgctctctagctataactagctagttgatggtgcactcgacggggaggcccgtgtccttgaaccgtttggtgtcctcgcagtagtcgtagagcaggtgctcctgcctcgccttgctcagcgccgccgcgtccatctcctgctgatcgaaccacggcgactccggcggctcatcgccgcaccacgccacgccgggggacggcgcgcacggcgtcacccggagcccccggtagtaggcgaagaagggtgcctccgaccagtccgtcttcaccctcccgccctgcgtcgcccagtcgtcggcgttccacaggctgccgtgggcccgcatcttctgccacgtcgggaacgccggcccgccgcgcgccgccgtgttccggtagtccctgatcggcacgccgtccaccagaattctgcatcaatggcggcgtgtcaatgcgaagctctctgtctcgatggcaatggcggcggagagggatcaaacgaactactatctacgttttaggttatacgactttctactattgctcacatttatataaatgttaataaatctagacacatatatgtgagcgtgaggaaagctgaaaagtcttataatatgaaacagaggaagtagtacttacatgatgtgcttggggttccagacgatggagtaggtgtggaagtcggcggtggggtcgaaccagaggcggaactgctgctcgcggccgccgacgccattggcgaagatgttggtgtgcagggtgtagggctcgccggtgacgttcccgaggaactccaggtccacctcgtcgtggtactcccacggcacgtcgtccggcatcaactgcacgtacgcacgcacacgacgacatgtcgatcagcatgcatcgtccatggcggcggcggtggccggcggcgaggaggaggaggaggaggaggaggagggggaacgtacgtagagggtggtgacggtgccggcggagttgttggcgacgagcatcatgtcgacgtcgaagcgggcgtagaggtaggcgtccctggagcggaagcccgagccgtgggtctcgtcgaggcagagcgcgagggcgtcgccgtcgccgtccatgaagaagaagctgtggtcngccgcccacaccaccttcacgtngtcgtacatcgacgccgtagccgncgncgncgncgncgncacaaagacgacgaagaagaacgccaccaccgccgccgccgccgaccaccacacgcggcggcaccgctcaccggaacacggcattgccatggaatattaattcttcaattgattcttcctgatcttcttgttcttgttcttgttcttgctgttgctattcgatttcgagcggaattgtatttataataaccaatcgagaacaggttgatcatcgagaagatgatagaatttgcaggaacatgcgaggcatgttcgtggggaatgtttgagataggggacatggcatgttaggattcatggggatgtcaggctggccaaacactgcaataatctgcatgcatgttgcctcgcctggaatgcatttggatgatgaacacagttgaacacacacgctggtggctcgtgcatgcaggagttcgatcaagagcttaaaagaaaaataaaaaagaacttccatggggagcgacgaa

SEQ ID NO: 4922 - DNA, 14160 bp, Oryza sativa
cccaagtaatcaagcactctctttgcaacgtagcccctccgtcagaatagaaattcaaggagtaccatttgtggccaatcttatcctgttagaatccaaagaccttgatgtcatcctagggatggactggttagccagacataaaggtgtgatagactgtgctaacagaaaagtaactctcaccagtgatgatggtcgagttgtaactgttcatgcattgtcttctgagtctttaaggtcaagtctgaaccaaataattttgaaagagattcctatagttcgggggtatcccgatgtgttcccagatgacttacctggtatgccacctaaaagggatatagagttcagaatagatttggtaccaggaacaactccgatccataagagaccttatagaatggcagccaatgagttggcagaagtcaagaggcaagtagacgatttgcttcagaaaggatacatcagaccgagttcatctccatggggagctccagttattttcgtggaaaagaaagatcatacccagaggatgtttgtggactatcgtgcactaaatgatgtgactatcaagaataagtatccgttgcccagaattgatgatttgttcgatcagcttaaaggtgccaccgttttctccaagatagatcttcgatcagggtatcaccaattgaggattaaagaggaagatatacctaagacagcttttaccactaggtatggattgttcgaatgtactgttatgtcttttggacttaccaatgcccccgctttcttcatgaacttgatgaataaggtgtttatggaatacctagacaagttcgtggtggtctttattgatgacattcttatctactctcgaaccaaagaagagcatgaagaacatcttcgccttgcactagagaagctacgagaacatcaactgtatgctaagtttagcaagtgtgagttttggttgtctgaagtgaagttccttggtcacgtcatctcagcaggaggagttgccgtcgatcctagtaatgtggaatccgtaaccaactggaaacaaccgaagacagtttcagagattcgcagtttcctaggcctcgcaggatattatcggaggtttatagagaatttttccaagattgctaagcccatgacacggctgcttcagaaagatgtgaagtacaagtggtcggaagaatgtgagcagagttttcaagaattgaagaatcgcttaatatcagctcctattttgattttgcctgatccaaagaagggtttccaagtgtattgcgatgcatccaaacttgggttaggttgtgttctgatgcaggatgggaaggtggttgcctatgcatctcgtcagttacgtccgcatgagaagaactaccctactcatgatcttgagttagctgcagtggttcatgcgttgaagatttggcgtcattatcttttcggtactcgtacagaggtgtataccgatcacaagagtttaaaatatatctttactcagccggatctgaacatgagataacgaagatggttggaattaattaaggattatgacatgggaattcattatcacccgggaaaggctaatgttgtagcagacgctcttagcaggaaaggctattgcaatgctacggaaggacgacagttgccattggaattatgcaaggaatttgaaagattgaatttgtgaattgtcagtagaggtttcgttgcagccttagaagcgaagcccactctaattgatcaagttagagaagcccaaattaatgatcctgatattcaaaaaatcaagaagaatatgagaagaggaaaagctatcggtttcttggaggatgagcaaggaactgtatggttgggtgagagaatctgcgtccttgacaacaaagatttaaaagatgcaattctgaaagaagctcatgataccttatactccattcaccctggtagtaccaaaatgtaccaggatctcaaggaaagattttggtgggcgagtatgaagcgtgaaatcgcagaatacgtagcagtatgtgatgtttgtcagcgagtcaaggcagaacatcagaaacccgccggtttgctgcagcctttgaagattcctgaatggaaatgggaggaaatcggtatggatttcatcactggtctacccagaacgtcatcaggccatgactctatttgggtgatagttgacagacttaccaaagtggctcatttcatcccagtaaaaacaacatattccggaagtcggttggcggaattgtatatggcaaggattgtgtgtttgcatggagtgcgtaagaaaatagtgtctgatcgaggcagtcagtttacttcaaatttttggaagaagcttcaggaagagatgggttctaagctgaactttagtactgcttatcatccgcagacagacggacaaaccgaaagggtgaatcagattttggaagacatgttgagagcttgtactttagacttcggtggaagttgggataagaatctaccttatgcggaattcttgtacaacaacagttatcaagctagtcttcagatggctccttacgaagcactgtatggtcggaagtgccgcactccgcttttgtgggatcaaacgggagagcgtcaggttttcgggacggatatcctaagggaagcagaagaaaaggtgaaaatcattcaagaaagattgcgtgtggcccagtctcgtcataagagttatgccgacaatcgtcgtagagatctaagttttgaagaaggagattatgtgtatcttcgtgtcacgcctcttcgaggagttcatcgtttccacactaaaggaaaattggcacctcgttttgtgggaccttataagattgtcagtagaagaggagaggttgcttatcagttggagttacctcaatctttggcaggagtccataatgtgttccatgtttcgcaattgaaaaagtgtttaagggtacctaccgaagaagctaatcttgaacagatagaagtccaagaggatctgacctatgttgagaaaccaatccgtatcttggaaacaaatgagagaagaaccagaaatcgagttatccgcttttgcaaagttaattggagtaatcactcggaagaagaatcaacttgggaacgagaagatgagttgaagtcagctcatccgcatctgttcgccagttcttccgaatctcgaggacgagattctgtttaaggggggtaggtttgtcacaccctaaaaatccaaaatatataaattgttgtttaaatagaattattagattttattttaaaagcctagaagagaagatttaattttaattaataaattccaacataaaatggggccagataaaatttcattaaatactttgcttaattctataattcctagatttttctgggatttatttgagctaaggaagtatttttaataaatggaattgcatttaaggaataatttaaattgaaaaaggtttttaaaagtcttctttcggctttgggccgaaagtcagcccaaaaccctctctctctctccccggcccaagtcggcccagtccgccgcagccgcgcgcgcgccctcgctcactgacaggtggggcccgcctgtcggagtcgtcgtctacctccggccgccgccgcccgaaaccctagcgccgcgccgccgccgtttccttccaaatccggccgctcctttccttctccggagaaatcaaaagaggggaaatgtttcccgagatctcctctaccttttcccttttggaaacatcatctatttcggtttggaaatcgatggattcgagatcgaatcggattcctctctctctcccgaacccgaggtttccttcgcgtcgccggtcgccgtgggccttcgccgccgccccctagcccctttaaaaggatccccggtgtctcctctacccgtcgccacccttgctttcgtctctcgccgtcggaagcgtcctagcgctgtgtgacctagcgccgccgtcgtcgccgccgctccagccgtgcgccgccgtcgttccagtcgtcgccgtcgctcgggaaggacgtcatcgtgatcgccatcgcgtcgccgtcctcgtccgccccttcgcagtcgctgttgaccgccggagcaccgtcgccgccgtcgacccgatcttctccgcagcttcaacttcgacgccgtcgccgtccgttgatcttccgccgcttctttggtcaccggtgagttcgccgcgccgtccgctacccgtgggtgttctccgttcgcgccgcagcgccgtcgttcaccagcgagcttgcgcgcccgagccgccgagccgccgccggtgctgacgtcatcaatgacgtcaccgctgacgtcatcgtggctgtttgccgtgagccggtcgtggaccgatcgatctcggccgtccgtttcggatggatcgatctcggccgtccgttctcgtgaaccgccgccgtgcgcccggtccaccgcaaaccctagccgctgacgcaataaatcccttttccttttcaaaaataattcattattgcgtcataattcaattaaaatcaatataagtgttttaatccgattaaatcttcaaaaattcataactaattcatcttagctcggatttagttggttcaagtctctaaatttttctaaaattgagatctacatgttaaaaatatacacatgtactgttcatgcttgtttatgtgctgttttggtgtttttgctcttttctgtttagattccaacgtttccggagagtccgttttcgcaggagaagattttgaagagttccaaggccagcaaggcaagtcacacagatcccaaacaaccctttgagcatgttgatcctatttaaagctattgtttctattcaactattgtatctattttcgaatgtcattgggtggaattaacctattctttgttatggcccttttgtacttgattactttattccttgataccttgggtgattataattggactagttgagctttatatatattggttcaactagatattagatataattgcttagccatgcttagaaacattagcacactattgggataacttatgactcactattatgtaatgatggcttaatggtagttcacgatggtcaatcgtgatttgttaattaattacttgccaactaaaacttgataatggtgggttgtgagcacatggttttgatggtcgtgctcatgacaattaaggaccggttcacgagtttcggttgtgaaacattaaccgtgccaaccacaagccagcgtgggcaacggctttaccttttgtaaagcatggttcattgcggagcaccagactgagaagtggcggagataagcccacgggggtcgctggggagtccatgccttgtttataagggggtgattatgatccaggaaaggtgcgctgtagtggattgtgttgtgcgaggggtattgtcacagctcctttccgaggtaccgtggtggtattgaggcacatggtgacatgatgtggggctgtgtcttgtgggtacagtggtacacctctgatcagagtaaaactattcgaatagccgtgcctgcggttatgggcgggtctaacaatgtctttcgtgattagtttcacacctctcatcataataacagatgctataattggtaataatttgattagctcctggtttggaatggtacattcctggtttggagatagatctgtacagccgggtatggttgttcaggatggttgggcctgtgcagcatggatgtactgttcagtgattgattaatattgatgattaattactctactgttttactactcttaaatgtttgctaaatgctgcttttgcaaatgagccctatattatgccattctttgttatcctgtgcacttgcatatttgctgcgtgacttgctgagtatgtcatatactcaccttgcaatcattcatcagaggaagagttctacagtggtgctgatggtgtggaggattaggtgtagccttggtcaagctgcttgtggagtggagccgtctgcgccgtttatcttttattttccgctgcttagatctttattgattgagaggaactatctacctctgtaatgacattttattcgcttattaattagagtaataattgtactctattatcaatttgttattgtgtgcctcggctgattcctggacgagggttcacacacatgtaagcgtttggaattttggatagaaattccgggtgtgacagatcagctcgggctgatctgggccgtcggttcccatggaccggcggtggaccaccccgtggtcccggtccacggtggaccggcgcccttgtgccgctgaccggtggggcccgcttgccggcgccgcccctcccctttgatgacgtcagcaaccgtcttttcctttggaaaaataaataataattgcgtcataattcgttaataattctagaaattcatttaaatggctcaaaacttctaaaattcatatctaattcattcgaactccgaattgagccattcaacttgcaaaattcatctaaaattgagctctacatgtttgtttagtttttatgtactgtttccttggtttttattagagtttttcctcgttttgcgtgccagcgtgtagttcccgtcgttttggaagatcgcgttcgcaaggataagagttcagaagatccaagtgaagaagcaaggcaagtcacacattccccttgagcatgttgatcccaatttacaaatgttttactgtttgcaaataaatatgcatgttttgctaattacatggggtcagggttttacctatctgctcgcttgtgccatgtttacttgatatatgtcctttgtcaacattgggtaataaatcgactagctcatgttacttatgtgacttagctagaactatatgcttggccatgcttaattaccactagctcagttgatggggtaattacagttttagaccttttagtatcagaatgagctgcgtgctcgagacatctggccatgcttcatggtcgtaattatccaactaaaatgcgactgaatggtgggctgtgggtgcatggttttgctagttgcacccatggcaattaaggaccggttcgcgggatgccctggaagaacttatcgtacttaccacaagccagcgtgggcaacggctgggcttgtagtgtagctttcctctagccgacgcatccaggcaagggtgggcgtgatggagtttggatgggccctgcgacggcctatgcggcttccggattcacctaggcacgagaggggactgcccgctgccttgcgaggagtgggggtgaaacctgaggtgtggtgtgcttggttagagggggttatgcgaagggtcctgtcacggcctctttccgatatgtcgtggtggcatgtcggtgcacggaaacgtgtcgtggggctgtgtcttgtgggtacagttgtacacctctgaacagagtaaaactattcgaatagccgtgcccgcggttatgggcggtcgaccagattcaccgtgattagtcccatcttaatacatgtcgcgaccgggaaaattgccttttcccgaacgctagtgtattaatccccgtcccaggaaaagccggggtacaccatacaaacatgatataaaagacacatctttattatatcgataatatttacattattacaaaggcgcttcaggcctgacaatcaaaaataaacagcagcggactagcgggcctacggctccatcttcacaggcgctcaactggggtataagccaggactccacctaagacatcttctccaaagcttctcttactgaagaggggaaagattgagcaagaatgagtacaaccacagtactcagcaagccacaccggagatgcataattaatgcaagggagtacaaggggataataatataggggttaagttttgcagtaacagcctttaaaagtcacttagttgcccaaagccattttataaagacgatcctagagccacacagtattattaaacaaggccgtgaaccctcacgaacctgccttaacccaaggcctacgatgattcagaccgaactggcaacccgaccctgggtcccagctcgtcccaagccaacccaggccaaccattccacattttagttgttgagcaaattttaagaatttgaaacactgacttgggtacattgctcggcttgcccataaccgagggcgcggctattcgaatagattatactctgatcagaggtgtacatctttacccacaagacacatcttcctcacgtgttaccacgtgccacataccaccacggtatacggacggaagacgtgacatagttcccaacccatcctagccataaacaagagtaccgacccaatccccctacggccgggacacccgggacaggcaggcaggactgagccccctagcagcagggcaccaaccctctgccatatgacatctcgactaccgggccgcagctcgtgtagccttcatttgccctggagaatgtccatcgacccccgacttcatccatctccaatccgtgtactttcgtttatgactagactgagccacaaactaagccttacccactagacatgtggaagtacggtagtgctttgcaacagaggcccgagcttaatccttatagtggccggggtgctacttcccacaactggcatgcacccaaaccccaccgaaaacaggttttaggggttttgaaagaggaagagaggtgtatgtccaattccaccatattccaacaattccatagtgtccaaatgatatgagaattcccaaagtctaaagttataaaaccacctaatgttacctaattagatcgcgaagcatctacctaaaattaaactagtggtgtcataagtagagtgtccactagttgaggttttgtttattctagggtgaacaaggtaataataacaataacaataatagtatggtcataacaaaggtaaataggcatggctaaataaaacagtgataacgcgggaatttaaataaagcgataatgcattaatttaaattaaaataattttgtaaactgggattcaatatgctcaaggatgatgtgacttgccttgctcactttcccaaacgccggcttcaacttccacgaagagcggatcttccgaagctgcagcgtctacacgaccaacggaaaagaaaaggcttttactctaataaactccaaacaacaacagaaacaaagcacaaaaatgggttcttgacttcttaaggaaaaattagagacttgaacggtccaattccgagttcaaatggccaagatatggtcatttgaagtttatatgctctttaaatggatatttacgaatttcttcatttaaattttaattaaaaacgcatttattgcgtcagccgggagaggggcgcgcggaccgggtccacgggaagtggggcccacgcgtcagcctctcggtccacggtggaccgggcgcacgcggctggcggcggtcggcgccgtgggtcccgcgcgtcagccgcacccgcgggcgcgggcggctgacggccgggcccacctggcagccgcgagggcgcgcccgaaggcggcctcgccggcacggccgacgggagcggcgcgcccgcgccccgatggtcaccgccggcgaccatcggcgcggcggagcagcgcccgagagagcggagaggagggggaaacggaagggacggtccacggctcaccccgagacacgaggacggcggagacgacgaacggagtggagaaacgcggcggcgcggctcgggatgacgatgacggcggcgctccgacggtcggcgagcgaaacggaggcgcggacgaggtcgacggcgatgcggcgatgccgagggaggtggcgccgagccgggaggaagaccggagcgacgacggcggcgaaccggagcggaggaaggcgacggcgcggttcgggatgccgagggcgacggtgctccggcagccggcggacgaagcggagcggcggacggggtcggcggcaacacggcgaagcggatggaggtgtcgccgagtcgggcggaggaccggagcgacgtcggcggcgaaccgaaggtcggcggcgacggcggagagagaggagcacggcgcgagcacggatccgacggcgagagcgagcggcgagcggtggaaacggaagagcggagctcggggagcaattatatagcaccgagagggggagaacgcggccggagaggaaggaaacgggcgcggggatctcgggctccatagatgtcgccggcgaggattacgggatgaatccggacggatccgagggagagagagaggggaaatcgggggaaacgggggagggaaacgcggggaataatttccccctctttaaggcgcgcgggcaaggcgggatgcggcggaatccgcggcggcggcggcgctagggcacgggcgggcggcggcttcggcgcgaggaggaagacgacgggtgggtcccacccgtcagcgagagtggagggcgggcccgcctgtcaacggcgcgcgcgcgcgggggaggccgatgggccgtgggggaagagagagagagggagggactgggccgagccggcccaagaggggaaggggggggaaaagaacttcttttaagatttttctttttataaacctttttaactttgtttatttcttctcaattattatttgtgctctgaaaattccactaaaatttgagggctcctttttgaccaaggggaatttgacaaaaattctccgggccacatttgaatttttcttgtacgtattttagtgtttgccaatttcttttcgaattttaattaattctattattccttttagagaatgatttttaattcgggatgaatttatcaggacgtgacaatacatcgacccaatgcactgtagtccaggtgggttggttgggcctgttcaacgtggtgtagcgttgatcagtggagatttaatgttactctaattactcaaccgttttactgatttgctcaataaaatgttttacaactgcctttatgcaaatagccacaaacccctccttgtatccccttgcacgtctgcatcgttggtgtggcttgctgagtacggtggttgtactcagtcttgctattattcccccttttcagaagtgtagtgcttctgagctgaagatggagttagaggaccaaggctcagaccccagttgagttttgcctgtggagtggagctgaagccccgctaggatcgcctttttccgctgctgtcgttctgtttcggtgcgaggactaagtgcctcttccgtaagtattttacgctttatttacgtttggaactgtatattacttgtcgttttgtgtaccctggctggtcctggacagggatttaatacgcaaaatagtctggaaatttgggttaaatttctgggcgtgacacgtacccgtgttctacaatccccaagttgagatgttcaagctcctgttgcaattcattacacatgccttcggtgcataaagcattgcagtagcttttcctgctcaaggcatctgccaccacattggctttgcctggatggtagtgaatgcccatgtcataatctttgattaactccaaccatcttcgctgtcggagattcaggtcaggctgggtgaagatatatttcaaactcttgtgatcagtatagacttcacagtggttgccaatcagataatgcctccagattttcaaagcgtgaaccaccgctgccaattctaggtcatgagttggatagtttccttcatttggacgcaactgccacgaggcataagtgaccactctgccctcttgcatcagaacacatccaagcccgtggtgggacgcgtcgcaataaacttgaaaatctttcgtctagtcgggcagaattaagaccggtgctgatactagcttcttcttgagctcctcgaagctgctgtcgcactcagctgaccatttaaatttgtcatctttattcagtaactaagtcattggtttggcaatcttggagaaattttcaatgaaccgacggtaatagcccgcaagtccaagaaaacttcggattctgagatactgtctttggtggggtccacttggtaactgagtccacaagcgaacaaacctaaacatgcaaactaatagacaattactaaacagaacgatatgctaagggaaaacgagcctagtgctcggaacggctcctgcggtcgatggagtcgaaggcgtcctcttgctcatctcctggtccctctgagcggctcctggagtcctgcacgtacgtctcgccactgcccggctctgagctactggaactgctgctgtggtcgcggctgccactgggagtagcaggcaaccaacctccactgccactggctgggcccctgtaggctgaagctggagcatcggtgaagacgaactcaggcgcgggagctgaagatgatgctggtgctgaagctggggctggagtgggagctgcgggcgctataggaggtgctgaaggtggaggaggcgggttcccggatggtgggttcctgggcaccaactggatgcgcacaggtgctgtagtagacttgctcggcatggtgcggatgcgggctcctaccactgctggacgtccctgcagcctagcattctccctcttgaggcgagcgacctcatcctgcaggctggcaatcctgactagcttctgattgttgagggccttggacgccttgtgaagctcagcatagaccctgtcgtagctgcacatcacccctcgcatgtgaccaaaggtggtgtcgacctctcccctgcaagacctgaaggtgctggtgtcatcattggcgccacggcggggatagtagcggtaggcggtgctacgaaggtcgttgtcgtgcaggtctcgcagtcttgccatcatcatgagagtagcttcttcacaggcatgatcaaacgtgcccccactagctgtgaccgtcatgttgggcaggtaggaagggatgccatggacctccaagcgaacctgatgcggaaactcgccactgagggggtgaatcctggtgtactccggctcctgggtaaaaccaatcacgaatgccatgcaggcgagctcggcgacaaaacctcccatgtcctgatcactgtgcgtgttggggcggttggccatctatagaagataaaaggagggggaatcaatgcatgctcaaacccaaatgtaagtaaacgataaaggactcaagcaagataaacaaataagagcagaattttgtgcataggatattttgcatgagcgaataaatacgaccgacatagttaagcaataaggtagtgcataaattagatacataataataatagtagcataagtaaactttgcaacccatattccttagttaggacctaatgcatacctcctattaaatccgaactgactgacctcatttgaacaacgagcgatcaagatttttcccatgaaccaaaggaacaaatccaaattttcccgaaacaaaatgcagcggaaaaataaaagataactggagctaagccttgacttggattgcagcggcaacaccactccacaggcatcctcgacggcacggacgaagcctactcctcggaatagccaccatctgacgcatactcaaactctggggttggggaaaagtagagcaagactgagtacaaccaccatactcagcaagtcataccggaatagggcgtatgatgcaggatataaccaaaggatagctagagcggttcatttgcataaagcgagcatttataaatagtagttgaaagcagtaaaaatagtcgtaataattaatcaatattaaccatccactgtccaacgctacaccacgttgcaacaggcccaaccatccacctgaactaatcaattccattagactaaactaggatgagactaatcacggtgaatctagttgaccacccataaccacgggcacggctattcgaatagttttactctgatcagaggtgtacaactgtacccacaagacacagccccacgacacgttactgtgctctgacatgccaccatgacataccagaaagaggccgtgacaggacctttcgcataaccccctctagccaagcacaccacacctcaggtttcacccccgtccccagcgggcaacgggcagtcccctctcgtgcctaggtgaatcggaagcgacagaggccgtgtagggcccgccccgctccat

SEQ ID NO: 4923 - DNA, 25444 bp, Oryza sativa
cttttatttgagtttatttggattttatttgaattctaactgaattcaaatcatttcttcgcacgtaattttagagcccgagggagttgcggatccgagcaaggatcaagacccgcaggactacgagcaaggcaagtcatcactattctttgaacatgttgatcccaattgcgaaattattttgtttacaaataaaattgcatgcaatgatgaacatcccacttttgattatgccatgccttgattattgtttactcttaaatctttgtaaccatgattatgtatgagtccctagtcaattatgataattgcttagaaatgctattctagaatcatgcatattcatatttatcaaatgctatatgcttgggcaattacctttgggaaggtaattgagatgtggcatgtggagacatgagcgccacattgccatgatattgatgacatgatttgtgaaaggaaaataaagtgaaacaactgttttcgactggccgtggatggaggatttgggtggtgtccggaaaaggctagtgccgtccctggtcagttaaggaccgagccatgaagttaagcatgaaacgacccccgtacgaccgcacttctcgaatgggtatagacctagcggagtagatagctgtgcggaggcagtaaccatgcatagtagtttcttgatgtgtgaggcaggggctctacggtggggcagccattggtaggaccgcgaggcgggtgtctacagtggtgtcgccattggtaggactgccatgtgagaatctaaacataattataccttaatgcatgtgtgagtcttcctttcccgggtgcgccagaactcctctcactgctagaaatcgtattacgcctagagtgcatgaggatgtaaagttcatggagcgggtactgccaatgcgaggttatcgaaaagctttgccatgacgcgtctcatgtgttgggacgaggctcatgtgttgggcagtcgcggagtgcgggtaaagtgtacatccactacagtgtgagtaaaccaaatctattcgaatagctgtgctcgcggttattgagcaccgggacatgtattacacttggctagactctaaattcttaacttgtgtggggtggaatattgcatgatgattttatgctgatggagccacttcctgagaggagggaaggtggtcgtcctcagaaaaccatgacgactcaatggcgggaagctatccttgggatcacaatggatggtggacagaaccgtcgttgtttaatatgaacactggtactaaaatttgatcagtctatgctaggtcttaggcttgtgaaaagaattacaaaacttgctttgcacaaaaaaccatagccatcccttgaataccccctatcatgtgcattgttgttgtagtggcttgctgagtacggttggtactcacccttgcaatatacaaacttaatcagaggtcggaattatagcttagaaggatccatacgcttactccggaaagggtgatgaagacgatggcgctcagtaggtcttagttacggtcgttgcctgtggcaatggcgtgccattgccttaactccgctgcgttatatacttctgcttttggaatgtattccggaccattcggtcctatgttctaagactatgcctgtgggcctatgatgtaataatgcgcactagactctcgtgtatgtgcacttggtatttcagctatgaactcgtgtgtaccagactacttgatccagggaaatggtactatttacacgattgattcttgttataaaaacgggggtccacaggagtggtgtctagactacgggatatcattatttggagttatatgctgcggttgagaggtgggccgctgatggtgacagctcagtacgggtattcctccgcgcgtgtatatagtactaagttaatttcctagggaaggtattcctccatattcagccccggttgtatggtcatgacgggctgtcgtaaggaactcggcagtcaggggtggcttctcgaagtaccaggagggcatcggatagagggtattagctagtatatcagataactaggatgtatgtatactatgtatactagaattataggaatagattctttttctattttcttcccacttagcttagatattttagtatgagaatgagtagcttcctgcttgtgtgtcactctacccttgaattatcttaacccctgcttagagtatgattattacaaataacatataaattattagtctagttctctctaccatgatcttcctacgggattaaataaatacgatacccttggaatactctcgagtgaaatgctacaatggtatatccgtgcgcttgcggatgaactctgtaaccataatataccaagagtatttctgcgccattgctgggaattatatttctagtaatgtcgttaagaaataccaacaacatgctagttctccatgttgaaatgataaataattgatctgctttatatctttaatgtatgtgcacatagttaagtactctctcaagttttaagtgaaattagccaaccattatacgggaacctgagagaactgagttgcacattgcatgatctaagtctaggttgttgtgagatatgagatagtgaaatagagttactatattcttgttccacgtttgactaaaactccggatattttgtttctcagaaagataaactcttgaagttcctcatttgatatgaattcctaccagagccaaaaaaaatgttatacaatgttgaacccatatacattttggttacttgtatgtccattgaacaaattccgtgacttgtgtagatgctcttcatactttatgattaagatcatacacccacatatatgcacatgtgctaagtttctaaactggaagctagcatccatccattccatcatatatcacatgtgtcatccaccaaataaatactccatgatatttatacctctttttcaaaagtaacataaaagaggagagtgactaaaaagaaataaaagagagagagaaaaggaatttatactcatgcaaattatgtggcatgaactctctcaaaaatattcttgaaaaaaaaacgaaaaagagctagccaaaaagactccctctcaaaagctttcaaaaatggaggaagaggtatacaaaaggagtagtcatattcatttcattttcaccgtatattccacacactatgcacgatcttgagtatgatttgttatccgctttagtctagatttttgacttagtgataaatgtgattgcaagtatgccttattcttgatcactaacaaactacacatattcagctttagtgtaggaataaaaaaggtataattttggtgaggaataatatgtatacacattgagtgattgagagaatcatttaaagagcatggttttaatttgcaaaatcatttgaaaacttccagaataagagctaggcaaagaatgagataatggtactctatgatctgttctgtctcccaaccgctcaaggcaaagagaagcatgtgttctgtcacaccccgaagttttcctccctagccaaaatcgtaattttcaaatgaccccaagaaaatgcaggtgaaatcaggagaaaaccctaagaaagtaatgcaaataataatcggacttgacatgtggaatttttcttaagttctacatgtcaaaattcattaacaggatttttagtggaattttcagagctctagaaataattttaaccaattaaaattgggcaagcaatattttaattacagggaaaatcctttttctttttctttttctttttcctctctttttcctcctttttgtcaaatgggccgtcggcccatttccctctttccttccccctcctcctttctgggccggccgcaggccgaggcccagccaggccgcccgccgcctcctctctcggggtcgccgacaggtggggcccacctgtcggtcccgtctccctcctcccgcctctcccgctcgcgccgccgcacccgtaacggccgccgcgcccacgcctccgccttccccgggccacgtcggccacgtccgcgcgtgcgccgcgctctccgcgcccattcccctctctctcccgctcgcgcccgcgcccgagatggccgggattcgaaaaccgaatcccgcctctctctcctccccactcccccgcgtcggccggcgattcccgcctcttccggccacgtccggttccctctccccctatttaagcatcgccggcactccttctcactttttccccattgcgccgacctctcccgagctccccatcgctcccgcgccgtgcaaccacccaccgccgcttcttcccgcactccggccgccgctagccgccgctaggctcgccgccgtcttgcgccgtcgccgccgttagattcgcgcggccgaggtccacctcgtccacccctcctccgttgaggttcgccgccggagacccatccccgccgtgcgccggtgagtgacgccatggccgccgccttcggccggcgcccttgcgctctcgcgcccttccctctctctctaacccctctccttttgttcgttaggaggctccggagctcgttccgccgtcgccatcgtccttcgtcgcccgccgtcgtcgaccgttgtcggtgaggccctcctcctcgttttctctctcccgcaccgtttagccgccgcgtcgccgcctagctgcgtagccgccgctcctcctctagccgccgctctccgccgcccgcgctcgccgtcggccgtcgccttgcgccgctgctgcatgcgcgccgccgccgcgtgagcgctgcgccgccggcgccatggtcgccggttcggcttgcgccgtgcccgcgtgccccggccgcgagctcccaccgccgtccgatctacccttgggtagatcggggccgtcggtccggctgccacgtggcgccgccgcccctttctctctctcccgtgccgctgaccggtgggccccgcatgtcggcgccgcaccccccgtgctgacgtcagccctggaatttattgcgcaataaattgtttaaggtttttcttttatagtaataaacacagtgaatcttctaaaattcataactaattcatccgagctccgtttaatcccattcaagtctcagtaaatcaaggaaaatgtgtagaatccattaaaaatggttttgttctctgtttcagtagtcttatagcctgtttgcaatgtttgctttgtatgtcggtagattccgtttcctccgacgctccggtgtacttcgagatagtcgccgaggttcctccagcagcagagcaaggcaagtcatgcttgtcacttgaacatgttgatcctatattgcaaatgctctattgttttctttcaaacattgcattgttttataatcttactatgggttgtttacctattgttacagccatgctattttgataccatgctcctttgttagcttgggttataacatgattagagttaggactagggattgcttaaccatgcctagttcaactagttcacattggagaaaaccctattaatgtttagactgttggttctaatggtttgttggattagtgacaccgctttggtgttggttaattaaaataaatcatggtgggctgtgggtgcatggttttgctggtcgcacccatggcagttaaggaccggttcgcgggatgccctggaagaatttatcgtacttaccacaagccagcgtgggcaacggctgggcttgtagtgtagctttcctctagtcgacgcatccaggcaagggtgggcgtgatggagcggggcgggccctgcgacggcctctgtcgcttccggattcacctaggcacgagaggggactgcccgttgcccgctggggacgggggtgaaacctgaggtgtggtgtgtttggctagagggggttatgcaaagggtcctgtcacggcctctttccgatatgtcgtggtggcatgtcggcgcacggaaacgtgttgtggggctgtgtcttgtgggtacagttgtacacctctgatcagagtaaaactattcgaatagccgtgcccgcggttatgggcggtcaaccagattcaccgtgattagtctcaccctagtgtaatctttgaatttggatagtttaggtggatggttgggcctgtcgcaacgtgggttagcgttggacagtggatagttgttattaattaattattacaactgcttttttttttcaacttctgtttataaatgctcactttatgcaaatgaaccacgctagctcttcattgttaattccctgcatcatacccctattccggtatgacttgctgagtacagggggtagtactcagtcttgctctatttttccccaatcccagaggatgggtttgtgtcagatgaaggtttccccgaggagtaggcttcgttccggccgtcgaggatgcctgtggagtggggttcccgctgcagttctagtcaaggcttagctcctgttgtttttcttttcttccgctgcatttttgtaagacttttatgatgtttgtaagacgtggatctgaatgtcaacattgtcgtttgtgtaccccggctggtcctggacggggattttaatgcacattctgcttggaattctattcgggaatttctgggcgtgacacagttgggccaggctagggttctgacgaacctccctgagcatcgttgatctccctctttggcttggatgtccaggatgcactctcattgacggttggagggtgtttccggcatttacaaccgtcataaccatcattgagaggctatataaaggggtcacctcactctctcccacacacactccaagaagaagatcaagctctctccaaagtttagattactgttctagttctagtggagtagaattagaatagttttcttagtcctcgagtcttcaggagatttcggatatggctctagtagctcttctctcttttgtaagacttatagaattaatgaaatattcttctttatttagcttcggtcttttacttaattcatattatctaagtaccaactttactttatacttgtctcgatgtaattgtgtagctagcttaccagagatatgtgttggcgtgggtttaatgttcacgcagatgattgctcaatgtctttctaggggatatagagcaatatttaataatgtaagcgtgatgcttggattattaagtatcattatttgaggttatatactgcggaacagtaaaggtgggccgctaatggtgacagctcagtatgggtattcctctatgttaggatagagtcctaagacactttcctggtatggacactcctctatatgcatttccggttgcatggctgtgacggattgtcgtaacaaactcgacaaacaggggtggtctcttgaaccaacaagggggcatagttagggggtaattgctacatgattgtatactagtgagtgtaaactaaagataattgtatattggaagtatatgaatgatttcttttcttattctttctctacttagcctagaatttatttagtgagagtaacctgattcttcctcgtgtcacctaccccttttgaattaattaaccccatacatagactttgatatatgcaagtaatatatgaaattattagcatagttctctcttatcatatttttccttgggattaaataaatacgataccttggaatacttctgggtggaaagctacattggaatatccgtgcgcttgcggactatatctgtaaccataatataccaagaatatttctgcaccattgctgggaattatatttctagtaatgtcgttaagaaatatcaagattgtggcgaaggcagagttatggttggcaattgtatattccatctagcacaaccacacgtcagcctctgggtaagtaacttgatcaaatggagcatttcgaagtaatgagttgacgactgtcatgtgctctgcaggtatgcgtacggaatcgatttgcactggagctacatcttgggggttcaacttcgccatcctccaatgatctctgcagtgtacggtcatgtgcacctcagtcttcgatctcctcgtcgattacgttcatgtcatgtggtgtgtttgatcctgttaacaacggaatttcacatccgattcaaagaagaagatacaagatctaagtggatttggtatgaaatcaaattggaattagagtcggactgcgcatcggctgagtatcgtatcggctgaaggcagagcagaggcttgacttagtgataaaccctgagctccactagagacactcaaccctgagtagatcaaccttatttctacaagcaaatcgaagaaacaaacaagaacaagataaaagcaatctgaattgcagaaaggaattgaatacaaatgataagttggggtttcgtaacgagcaaaccggcgatctaaccgatcacaggattatacagcaaagtagtgaggctaaactttaatctaaacaaaacccaagaaaccctaaaggggtacctagctatttaagtatgtgggaggatgacctaggggtccctagggtcatgctccacctggttggagcgcaccccacatgggccctacttgggctggggtcccaaatgaagttacaagcccataggcccattataggagactcaacaccttgtttttgtgatcgcggtcaaactagatcgaattcggagatgaggctggatcacttggaaagataactctgagagctttccatcaagtactcacgggctgaaaacggagctcgtatcttagatttggtggccgtttgaattcagcaatgtcgtaggtggccgaatcagattccatcactcggtgaacttgatcttgatgtgagtgacggttgtataaatagtagtcatagtcacatcatcctccccttcttcatagataaccgtcctcggattttccatgtggtgctcgctgcatagtgcatggtcttgcgcgtagaattgtctacaagaaaacaaaagcaacaatctttcggcatgtaatatcattagctctttagcaaatagtatcaatctccaatgaaacaattgtacctgattatgaggtaacacaacaaaaaatgtaggcactgcatatgtaaggccctttagtagctcatgttgcacccctttctcacatgtcaagtaatcacatggtacatttttaatggagtatggtagcagcattgagggatttggtcgctccccttcttcaaaaccatcctatttctttacatcaaaacaagaaaaacttgagataacatgataagcaataatatgtctctctagcttgcaatttttatccacaacaacatctgtaaactctatgcaccaaatatattcctctatcattatattaaccaaagatatgaaaattagcattagttggatagatatggcaaattagacttagcaaataatttctccttcaaattatcgagctcacaaaatccatgaaacaatacatagcccaaagtttttaaagaagatagcaattcacgttcctcaacttcattagcaatttgaacaacatgctcattcactataaatagcatgttcattcagtagttgtggcattaatataactgaagaattatcacacaactcttttttatcgcaaggaatagcaagtgtgtagctaatggtggacatgtgtagctcggcttgagaatactcaccttcatttatctcagcaccatttaatttaccttgcaaactttcttcaaacatcgcaggtgcttcatactcctccgctttcttctcaagaacattattctcttccttttgttgaatgttttgaactccctgcgaaacgttttgaactcacaggagacacaaaagattgctcctcccatgtttgcacaccatcattgcataaggatataggagattcagaaacaggagataaatcacattgttcatgcttccttgcatttgattatgatccgagtctaaatgctatgagcaagcatgaatatgtgtccaatatgattatgtgtcatattagcaagcataacctgaacttcagaattaataccattgataaacctacgcattgtgttttcattacattcttttaaagcactgtagatgatacaaactttaaattctcagatgtacaccttaacatttctatcatcttgtttcagattttctaatttctcaataatagtacatttgtaataagaacttacaaaactctttcccatcattgttttgcattcatcccaagttttaggtttattactcacataactccaccaaaataatgcagaagaggtcaacttattattagcagccttaatcatttgagcatcagaaaaatcttgtcaaattcattgtctattgctagcttccaatcaatataagcaacaaaatcatacttctcgtcgcataatgataacttagattcaactcatgcaaacttatagtcaggtacctcatatgcacttcatggagaagttgtcatatctcatctaaggtgaagaagtcgatgatctcttattcccttgcgcaatcctgcgatggttagtagcaaacaacaaacatacacaagaatatgcacgctcctatcaactacttggtcgtggtagctcagatatcacacactcaagcttttaaccaagctcttacaaaatcttaccaatgcaagcggaatggtgatgtacactgactcaactaagcaccccaatggaggttggatgtatcgatgcctttacaaacacctgtcgtatagctgcaaacaaatatgtggtctgatgtggagatctgggtaagcttaaatatgtagcaaaggaatagaaaatgctgaaatcagagagtgcaatgttcaataattgtgctggttctaggctagaacgtaatagagacacgatcctagacacaaactagcagtagaaaaaactcaagcacactatgatatatcaaattcagctaaaaaaacaacttattttctctcttctttttttctctctcttttttctttcttctctgtcttttcttttttttctcggtgcgtcttttttttttgttttttaagcacctttctgtcttctctctctttttttgcctttttcttttcaaaaaacgactcaagcacctcaatgcaaaattgcagggactcaaatgtaaatacaaaaatcactaggacttaaatgtaaaagtcccaaccgaaatcaaaattatacaaaaatggaatgctcttgtcccgtaggtttcgtttttgcaaacggatctccaatctgacacttgcaaaattttcaccaaggtgttgagctactcaaagtattggaggaaacaacagtagagggagagaaacggtggggaggtggtactggccacatgttaagtgcagatgtggtgcacaggataagagggaaactaattctagcagattcaatctattatttcttcccaaaacaaacctgactacttccaaaatctgatttggtaattcaccttcctcctctcgtgcacgacacaagcacggcaagaaacacagccaagttggcaaaccctagatgaaactcacactgctggagaaagcgtttttaaccccggttcataaccggactacgaatccggctatctttagtcccgggtgaaacaaccagagttaaagatccatctttagtcccgattggtgttaccaaccgggactaaaaatgaatgcatctttagactcaggactaaagatttgttttctttcttttattattttttgttgtatgcatattgatttcataccaaactcaacaacaaacatccacgttcacaaaaccattagaaaaacttccacaaatttatagatcgaatggacatacccagattaacatcacaaatttaccattcccatcacaaatttatagttctaaacatcacaaatcaataaaaactcacggatctaaacatcacaaatcgacaaaaaatcacaaaaaaaaaattccgagcggccactgccctcccgctccgccacctgcaccagagctggcaccgccgcccccctcgctggcaccggccacagccaccgatacggagcgagccgccactgtagccgccgggctagcgcaggccactggccaccgctgcccccaccttgctatactatgtgttgattgctagtcccgattggtgttaacaaccgggactaaaaatggtaagggggcggacgcttttttaaccgggactaaaaatgatatttattcccggttggtaacaccaatcgggactaaagatcataaaatggtgctggctttttaactggggttaaatatcatttttagtcctggtttttggtcaaaccaggactaatgtggtttttgggcaacccaacaaagatggtttctccagtagtgtcaataactccaaaacagattgacagaaacttctgaaaactagaaaaatggaaccctagcagaaagatgattccgttttcgtaggtctcgacgacaacaaagacacggcgactgcgatgacagtggtacaaaacgtgtacataactcaaaactctaaacgaactaggcgctaagaccatcaactcgatgcgacaatgcaacgcaaaactcaacaaagcaaaaactgaaagaacaatgcaacgggcacaaagaaggctaagtaatggatgcaaacttttattgtatggctattttctgcttatgggtagatcaaaaatcactgagcaacaaaatctcctataccagttgataaaacctgaggtccactcgtgacactcaaggctgttgatgacccaatctttcagtgagttgatgatgactacaatttgggagaaacgttgatgacccgactacaaccgtactagatgttgttgcattgtgccttagcaatcattactcctccccgtgggttgttgattttgccgatgcagatcaacattattcctgcaagcaaatcgaagaaacaagcaagaacaagataaaaacaatctgaattgcagatatgaatagaatacaaatgataagttggggttccgaaacgaggaaaccggcgatctaaccgatcacaggatcacacggcaaagtagcgagtctaaactttaatttaaacaaaatccaagaaaccctgaaggggtacctagctatgtaaggaggtgggaggatgaccaaggggtccctagggtcgtgctctacctagttggggcacaccccatatgggcggggtcccaaatgaagttacaagcccatacgcaacactttgtttttgtgattgcggccaaacaagatgtaatacggagataagactggttcccttggaaacagggcttccgagagctttccattaattacttacgggccaaaaatggagctcgatacagatttggcggccgtttgaattcagcaatgtcacaggtggccaaatcagattccagcacttggtcaacttgatcttgatgtgagcaacggtttgggcttggtttgagcataaattgtgataaacgttattgcaaattagagatagacctcgaataaggcaattgcatgtattaattaggatatttaagttggtttattttagatttgtgttggtatttcttacgaccatagataaatccgcaagcgcacggaataccgctatagcacatcaccttcgggtgacccaaaaaggatatcgaactcagggaatgtgtataatctacctaaggctaagacaatccaaggacaacaactgtaggtaggctaggctagagaggactttctatgttttttaattatctacgctaagcaaaggtaatttcctatctgttgcttcgggaaccgacccctacttgtctgctagcatggttccggctatagctctatgatgtatccgaacgtggaggattactaggacgggatttagagttgtcaccacctgccacctacctctgacaaatccgtgggatacacaacaaacaaatccgagccgtctaggtgaaagtaaatggcgggaagcgctaggattggttcgaccgaaccaaaaaaccgtcctcccggcctctcctttggctggtaggttgcttaatggccccccaacatcttgcacaatgttttggctcaattctaagtggttttggttgacatatggaccctccaatccatgtaaacgtgtcctgaatgagcagaggtccattttgtcgcatggcggatgtgttttctcctcaaaatacctgcatgcacatatttcaccaacactagtagaaatgatttgtaataaaccctatcactaagttggatactatgttttatttcattatatgcaggtattgacggtcaaatgttatgatttaaggaccgtcaacaatttggcaggagaacgccttgaggtcttgtttgtatcttatctttaggaaagtttgagtcgtgtccataacggactaaatttgtattcggggtatatatacagaccctgactattgtaatcagggagacaatccaatacaacttcgatgcatcgccaccctttttgttcttcttgtcggtgagttctctcgacaagaggtaacccgtctcgatggcttgtgctatcagcccatgaccatctgctgtcatatgtcttagttaatctagttttagtatctcaaattagccctattggctagctctcgttttagggttcttgccagtatcgactaaattgccttactagattgtattaactaaggcatctaccatcttaaaaagtgattaattccttgattgtttagaatttaggtttctttacttactttgagatacatcatccctagtcttgtctagaaacctagaaactaatgtggaattaattatagttagagatagtatcggagtttcagccgatcttacctaatatacatgctactttactagttttatgtatatttgtcacttatatagatagatcaccctatataaatatatcaagtctagatcagcattggctatgttatcaaacctggcagtagatcgttatttgatatatttctatagattgatttgtttatataagtttgtactagagtattagctagtacattatctttatctatctatcttgctctaaatactgttccattggctatttctataatatcgtctgacttgtacttgacaaacttattagatgatactacagccgatgaggcatatttagtgtttatacttattttatatatcaattcatagtcgactacatctgctgggatcactaatgatacgtcatcggcctgtcggctaactaactttgtttgttgttttggcaaaccccgagctccactagagacactcacccttgttgttggcacgatcttttggtgagttgatgataactatgatttggaagaacggtgacgatccgactacaactatacaagacgttgttatgttgcgccttagcgatcgattcacctcttcttgtgttgttgatcttgccaatgcaaatcaaccttattcctgcaagcaaatcgaagaaacaagaaaaaacaaaagaaaagccatcaaatccagataggaattaaatacaaatgataatttggggttccgaagacaagcagacggacagtctaaccgacatgcgcactgtaagcaagtagatatggctaaactgtaatctaaacaaaacccaagaaaccttgaaggggtacctagctatttaagaaggtgggaggactacgtaagggtccctagggtcgtgctccacttggttggggtgcaccacacacaagccccacttggctcggggtcccaaacaaagttacaagcccaaaggcccatgacaggtgccacagcacattgtctctccaattctggacagctgaggtggaatttggcgatatggccgaatccatcggaaagaggactccgagacttttcatcaactactcatgtacccaaaacggagctcgtatgcacaattgcacatctaacggcctttagaagtcagcaatgtagcatgtggctgtatcggattccaacacttgaagggacttgatcttggtgtcttcttgtttattcatgatatgagcaatggttgtatccataatagccatggtcacatcatgtttcgttgctggttgcaagatcaaaccagctggcatgcccttagcacactcgaagcaagccttggacctgcactggagttaagcagatctcctaggccaccgtgtttctcgtcaacagatccaaaaaattccaggttatccagaccatgaagaatggatggttcgcgggagtcgaacctgatgtgtatgatagtatgatcttgtcgttctaaagtgttgctgtccatgaatgcgttgcgagtctcatcttgtctggcatggatcgggcgacatgtgactcgcaccgttggttctataagcttcatgaatacttcgcaactggtgagggggtgattctgagttttgtgaatcggacaccacgccctgtaaggagaggcacgctgaatcatgcgttcttcgcaaccgtcgagttcaactttgtcttgaatgatcacccggcacccgatcaatggatagctagttgtcttgtggatacggcaccaggatcaatctttacttgaagacttcctaatcggtgcacatttcttggtggaatcgaggagcaagacggtttaggagtcttgcaatgggtaacgaagttggcgcaccgttgtcaggatgaaatgaagaaggtgttgtctgtgttgatgtatctgcttggtccatcattatagccacatcttcgctaggtaccaaaggggaggagatcgggatgggagcgaaaactgaaaagataatggatctgacttggactaatgtgtaggatggttggattggatctaccaagccaggttggtcatagaaaccctcgtcagagaatccggctcttgagtttatctcgttgaaactcattagcaccaagcccactacctagcgcgccactatcgagggtggacatctcgactacggtatttggatagtatgggcattgttggaaccaaggtgtacttgagactgtatcaagcagacaagagacaaagatttatactggttgaggccctcaagatgagtaatagccctagtctattttatatgaattatggatggaaatatcataaagagtagaatgaggagtaagaagatcggactaacccgccaactagatgatgacaagaacaacccgatgagatatattcggcgagtacggcgctggctccctcctgattgatcctccttatgatgatggccacaccatgtaattcaatgcccctccctgagcacggggggcttgtagatatagcatagatcatcttcttctcgaagtagatctcggagagataaaacaggaaacaggctcaagaatacattatcttccccagtagaactctaacaccttatatctggaaagataatttccttccttatccgtcgtatttccttattcataggatatcttcttgtatgtagtcgagtatatgttattaatgtattccataaatccgtgtataggatgtatgccctatccttacactgacagaaagtatgacaacccaatgtatctcctacatttataatcaactcctctatagtaaccattgccaattgacattcgtgattttttcggtaagagtttttcacgtaaaattcgtgtctccgttgtgcatctaattttataacaaatgggtatcagagtattggagatccgttccgacatccctcgctgcagtgtttatcatatccgtcgagttcatcgttccgctgtatgaccatatcaatctgtcagcaagattgcttccgaagcggagttgtgatatcaattccgagttgtcattgcgtcgagtccatgaggaaataagcacccggcgtcgtccacaccaatctgccaagactcaatggaagtacaacagcctgtgcatgtcacatcgtccaccagggcagcagccaacgtgcacacatccactgaagagcacggttcccaaggcgcacacgcccaggaaatcaagtccttgcattgttttggttttattcggtgaatccatgttcgcgttcaatccatgatgtgtggggcacggttgtcatacccagaaattcacgaacgagaatttcaagcagaatatgtattaaaacccctatacaggaccagccagggtacataaatgacaaagttgatacacaaatccacgtcttacaaaaatataaaaaagtcctacatatgcaacgaaattaaataatcgagctaactagccaatagagctctcggataagcgtagcatctccaaatccacaagcatcctcgatggcagcaacaaccctactcctccgaataatactctgcttctaagggtcgggggaaaaataaagcaagaatgagtactacccactgtacttaacaagtcataccaaaagaagaggcatgatgcatgataatttcaaaggaagctatgcgttatttgcataaagcagcatttacaaatcacaatttgaatatagtaaaatagcagttagaaattaaactatattaaatatcactgcccaacgctaaaccacattgaaataggcccaacaaaaccacctgaactaaaccagttcattaaggcaaactactatggtgagactaatcatggtgaatccagttgatcacccataatcacaggcacaactattcgaatagttttactctgatcagaggtgtacaactgtacccacaagatacaatctcacaacacattaccgagcaccggcataccacctcgacataccggacagagattgtgacaggacccttcacataaccctccctaaccaatcaagccacacctcaggtttcgcccccacccctaaactggcaaagggcagcgacgctagtgggagctagcaacggccggagattgaagtgtggcggcggcggcaagggcaatggcgcggcggcgatgtagggcctgggagtggtggaacaaatagggaaaaggatggaggggggttttgggatgctttttaaggcgaatgtgggctcgaaggtgtccggtggtcggcaaatttggcggcggcacggttgggaagggagagagaggtggcggtggatagggttggatatcccgccgattaggaggggaaaagacgcggcgattgcgggctagttgggaggaggtggacagaggcacaggcgagcgagggcgaaaccgggagcgacacggctcgcggcggaatcggcggcggccggaggttggagacaggtcggacaggtgggccccaactatcggtgtccgaacgacggggctgttgatggtcgttatagaccaatttcgaccgtcaatataactaaaataaaggaggactagcgcttgcaatgaatatttgttttaggataatctatttccacttgtacttggattcttgtcggtgatatgggtccgagggtacccaacctgtgaggaaggccctacccccgatagccacgtggttgttggtaattcttacggtcacagataaaatccgaaagcacacggatatatcgatgtagcacttcccctacggattatttcaaagggtatcgaatccaagggaacgtgtgtggtcagatcttcctccagttcatccaagggtaccaagaaaatgataggctaggatagagaagatttactagtgagaaatagtgtctagggaaagcttaagtttaatcctaacgcaatactttaggcactggcaacccgctgttcccagatgtcactctactacatacccggatagggagggcttaagtgatctcgaaggctgtcaccacctctacacctacctcaaacgtactatgggatacgcagcaattactggataacaattacctaaacaccacgtctaagcaattaatatctactttagtgtttataactcaccaaagcaatcactatattttagttgattatagtgaacaataatcccgtatgctatttaggaactaaccaagagatgattctcacaagataaatctaaattacttaggaagataattctattgaaatcaaagtaataaaccgaataaaagaaatgagagaagattaccgacaactccggaattcttccgacttcttctactctaatctcttcctattctagtatacaatatagtacaataaagcctcttataattcaggtcaagcttggaagtgtgtgtgagggtgaaggagtgaagctccttttatagggcagttatgacaattgtgagaagaggaaatgttcgaactgccctgcaaccgccatcagggagtgatctggagcgtccatgccaaaccccaggatcaacggtgatcaccaggatttggccgaacctgtgctgggccctcctggcctaggcttcggcctgtggactccctctgctttgctttatccatttctgtaaattttgggctgattctttggtattttgatgaagttcacaactcatcctagtatggatacatgtttctccctcactttagtctgattttcctcccaacttctgggtttaacacctgcatcaaataaacaccaacacttgtggaatatgtgagatttaacatctatctctatgttggatgttttattatttggactttatacagaggttagcaatatagaattggcatttaatgaccgccaacagtggcctttcctctagggggttcggcccgaggcagggcggcggccgttccccacgtgccccagggttgggtcaccccgacccccaccacgtggcggcaaatgtgccgcgccagacaggcgctcctagcacccacctaaccgcatttaaggcggtctgagcgagcgctccacacatcaggctggtatgtgaccggtccatgacaggtctgtgaccgatgattgaagtggccgaggtagtgtgcctgcgccctggctgcatgtcaggcggcctgctgcctgacaccccccgtctcatcacaattgtgagaggcagctcagcctatcacgtctgccgaagacggtttgcctaactgtttatggcagggttcccatcttctagtgcaaatgaggaccgaaaagtcctcactctttaaatgtcgaatgacgactacgtctcctgcgtcaggcaggaggatttgaaaatcgccatcattatcgtgcacgtgcaaggcacgttttgacagtatatattaacaaacgaagaagaatctatgtaattgtttttatgcaatgcactccatataaattcttttagtaattaagacaatttcatataaactatactaacctgacaatttggatggttctctataaaaacagaataaaagcaaaaatattttatggatcaagcacaatttatacattgcactcctaaggtcaactcaatcggagtaaaaaattgattatcacaaacaagaaaagtacactaaaaaacaattacaagaaaagcttgcacttctaatgtcagtagcaggacagaggagagggagatcaattatgccatcaactttggtcctacaaaagaaagcaaggacaggagtttaacatatccgtgaggttacacaagaaaacggtagctgaggaggaaaacaatgcattttgtttaccttcaaataactattgatcaactccatctactacaccaaaccaaccgtcacaagctataatatagcattgtctccacctgggagatatattatacagatgagaaatatgtgaggttatcttaatggcatgcaacttgccacatctaataaatcaaatactaatggagggtaactattcagttataaaaccaggttttgaaaatttgcacaaagagatctatgggtaagggcgatccctctgtacttttttttttaaagataatggatagaaatccaacctttatatcaagggagccagaaaaccgatagatcatatagaatgctataaccttagatatgcttcactgataacttaagttcatgtttcaatctttagttctaactttataggtcacatatacactggagaaggagcaagacaagccaaaaagtaagacagcgcagaatgaagtgaactattaccagcatgcatggagtaggcttattcttatcacatagtaattagttatcgagttagtgtagctttattattcctgaagtgtgtttgtcggagatagtaaatatacaacacggacaagggtccgaggaaaactaactataatttacctttgaaggaagatgtggcattgctgcacggctacacctgaagccaatatgttggtatggctactgaagccatcctacaaataaattaatcataaaaatgattaaagtatcttttcaagatctgcaagttcacaagggaaaagatgggaaaaaagagaaaacatgtcatcatcacaagtatgtaccatgcagaaaacagatgcagagcactattttgggctgtgcaatgaaccctttttagaaattactcatcattggatatggtgctaatcctggatcagggaatccactattgtacacagtagatgagaaattagaggggcatgacggctgtttccacattctttcactgcgccctgacatttccatcgttaatcagtcaagcatccataccaaggcatcatcagctcacggactcaccaagtactacctgacaaccaaattatattcagtttagggttcaagtaacacattacattcctttccaatcagaaaggataacaagttagtctatctgtactccaaacatgtaattgtgactaaagaggataacatgaaaaaaaatacctctggcatgtaaggaaaaaaaatgagcagccaaccgaaagggaattgtatttgttggtggataaccaacaaagaagtaatttacaaaagttttctagaaacaccctatcagcacactgcagattttattccaatgaaaaaacagccaacgtttgagaggcaagccacgatttcagatgttgggatcgactactttaattagcatcaagcattggtctttctaaaaaatagaatggatcaatagtacttatatcaattgattaagaaatgtcaaattttgtttccataaagtggtaaaagtgcttgcaatattgacagggattcattttctagtatagatatgtaccttagcataaaaaaagaccaacaattcattgaaagaggcagctgcgtcttcgtccaccggggcaacaatgatttgtgatcctgtaattccaaatagattgcaaaatgaattgattgggcataagaaccaagcttggagacgatggtgagtagagatgtcattgcctcttctgctggtgacgcccgcgatggtggtgggtaaaacgtgggttcgtggttgtagctgcctatgcaatctcgtcgtcggagatcgcgaagcagtgacgctggcagccgtctggcagatacttcggcggcggtgaagacgtacgatcccggtccacatctggccatggcggctggcgacaacgacaccaccagaggtaggctcttctcgggatgcagcgatgggggcagcgacgcgagagtcgaacggtgaaggcggcgtagcagcgaccaggaagcaacagagtggatgacgccatgtgacctcgccttcgagcggctggaagtcggtacggtggaagatcgaaacactttaggaatactgtcaaaaagacaataatttacaaatccgcggcggctggggacgaccactccgtcggcggcggcgacggcggatggggacgacgtcgactccgggcgtggccgatggggaagaccacggcagcggtggagtgcgcggtggcggtggtggtggcggcggaagggaccgaccttggctccggccacggcggatggcgaagaagtaggatccggcggctgttggaaaagaagtcagcgtgggcggcggaaggggacaacctcggctccagcgagagtagcgctggagcaaggctgcggcctgcggcgccagtacacgcggagaggagcgaggaggaggataggattgcgcgtggagaggcgtaatcttcgcacgcggggaggcgttgtcttcgtgtggtaaaatcgtgcgggggagattggtgaaccatacggattatacctgatttgcggatggacggttgggatttaacaggtgatttcaccgggtccaactcctcctttttatattagtatatagatacatgttaggataataatattccactagtacttggttcactaaccttttgcagagaataaccataagtggaggagaattgacatcaaatcaaatgataaatcaatcgaacgatgtcgaggaccagacttatgtatgaataggccaagaactcagaattgacatgataaattgggccaaaattcacaagtatataaagtaaagcaatggaggaggccaccagccgaaacttgggctagttgggccagcccctagttcgaccgaacctcccgcagcgccgatagatgcagggttttgatggaccgctgggattgatccccaatgacggttggatggtattaccgaccattccaaccatcataaccatcattacctacctataaaaggagttcactctcttcagttcaatacacacctcaagcaagagctctctcatattctctcaagtttgtttagtattcttatgctagtggaacaggaatagagtagaaatcggagtccggaagccttcggaagagttcgggtatggctctagtagctcttctcttctcttttgtaagctttgtactttatttagaatattcttctttatacatttatggtattaaaatactttctgagtatatgaatgccaactttacattatgtttatgttatctgggagatgctttggtgcgggtataatgtttgcatatgcaattactctatgtcatgacgatgatattagagtagtatctggtagcttaggcgttgtaacaccctaaaaattcgactgacaaattcgaaaccctaaaaatacggaccttcaaaaactttttaaataaattacatcatgccgattttattcgcctattttatttggatttgatttcggagttcattgatcgtgagtaaagaataatcaattaggaataaaccctaaaaataaattggcaaaataaataattgaaatataatttaaaataaagattaggcgaggatagaaataaatagaatattatcgtgaccatattggtaataattaaatttaagtgcgatggaataagaattagccctaattaaaaattcaaataaattatataaaaataaaatatgggtaatattaatctatggtgaatcattggttagaataacacaaataatgagtaaacttcatttatgcaaaaattaagatttatagaatagaatttagataggaaataggctacaatagggttaattgggatctggcactattcattgcgcgctaggtgttcgtgtaacgaccgagaataccccaacgggcgttcctgacgtgcgtgcattaatccctgtcccaggaggcaaggtacaccaaaagttgagacaattcagagttaacaagcgcgagcgtaaat

SEQ ID NO: 4924 - DNA, 1583 bp, Oryza sativa
ctcttactgaaggggggagaaagatagagcaagaatgagtacaaccacagtactcagcaagacacaccggagatgcataattaatgcaagggggggtacaaggggataataatataggggttaagttttgcagtaaacagcatttaaaagtcacttagttgtccaaagccattttataaacacgatcctagagctatacaatattattaatcaaggtcgtggacccacacgaacctgccttaacccaaggcctacgatgattcagaccgaactggcaacccgaccctgggtcccagctcgtcccaagccaacccaggccaaccattccacattttagttgttgagcaaattttaagaatttgaaacactgacttgggtacattgctcggcttgcccataaccgagggcgcggctattcgaatagattatactctgatcagaggtgtacatctttacccacaagacacatcttcctcacgtgtaaccacgtgccacataccaccacggtatacggacggaagacgtgacatagttcccaacccatcctagccataaacaagagtaccgacccaaccccacctacggccggaacccccgggacaggcaggcagaattgagccccctagcagcaggacaccagccctgtgccatgacatctcgactaccgggccgcagctcgtgtagccttcatttgccctggagaatgtccatcgacccccgacttcatccatctccaatccgtgtacttttgtttataaccagactgagccacaaactaagccttacccactagacatgtggaagtacggtagtgctttgcaacagaggcccgagcttaatccttatagtacccgaggtacgactatcaaaacccaaccacgcacctcgagcccagcctaaaaccaatttggggattttgaatagaaggagcggtgtgaagccaattccacaataaccaaaccattccatagtgtccaggtgatatgaatattcccaaagtctagagttgtaaaaccacctaatgttacctaattaaattgcgaagcatctacctaaaattaaactagtggtgccatgagtagaatgtccactagttggggttttgtttactctagggtgaacaaggaaataataacaatagcaataataataaggtcataacaaaggtaaataggcatggctaaataaaacagtgataacgcgggaatttaaataaagcgataatgcattaatttaaattaaaataatttcgtaaactgggattcaatatgctcaaggatgatgtgacttgccttgctcgctttcccaaacgtcggcttcaacttccacgaagagcggatcttccgaagctgcagcgtctacgcgaccgacggaaaagaaaaggcttttactctaataaactccatataacagcagaaacaaagcacaaaaatgggttcttgacttcttaaggaaaaattagagacttgaacggtccaattccgagttcaaatggtcaagatatggccatttgaagtttatatgctctttaaatggatatttgcgaatttcttcatttaaatttaattaaaaactcatttatt

SEQ ID NO: 4925 - DNA, 10709 bp, Oryza sativa
gcagccccggccttttcgaccacggcctcggccttctcttcctcttccccttcctcattgccatcacgctctttgacgtcgtcctcgtcgtcggcgtcggaatcggaggtagcaggaacccttcgcttcctaggggcaagcttcacttgcccgcgcgtccgctttcgtgaaggccctacgtcgtcgtcgaccttgtgggggttcgcccagggaggcaatttgccgttataaacccggttcgcccggccgaccgcatatcgtgtcagcagttggctatactcgacgactgacacgtcgtcgatcatcttccgggcttcggcattggcctgattgagggtcaacactgcaaaaaatagagggtgcagccacattaagcgtcgaacgaagcaaaataacgaagcgcaggcatgcatagcgaaagtgcagtcttaccattcgtcccctcagggacaaccaatttcggcagaccatcaacctcttcgccttggtcaaccgtgacttgccatgactaggagaggggaaaatgcggaagcatgcagaactcctccaccaagtcacgacagctaaggcgggagcaaaccttacacagcagagcgaaccgcgcctccatagcgccgtccacggcgatcttgggtttccggttcggcgcgatcgccctgcgccggcaccggagggccttcgctgactcggaaccagcttcaaaggggatggtgtggtaaaaccacctcgccattgtcacgcccagaaattcccgaatagaattccaagcagaatgtgcattaaaatccccatccaggaccagccggggtacacaaacgacaatatcaacattcagatctacgtcttacaaacatcacaaaagtcttacataaatgcagcggaaagaaagaaagacaacaggagctaagccttgactagaactacagcgggaacaccactccacaggcatcctcgacggcacggacgaagcctactcctcagagaaacctccatctgacacaaactcatactctggggttgggaaaaatagagcaagactgagtactacccactgtactcagcaagtcataccggaataggggtatgatgcaggcaattatcaaagaagagctagagtggttcatttgcataaagcgagcatttataaacagaagttgaaagatttaaacagttgtaataattaattaatattaactatccactgtccaatgctattccacgttgcaacaggcccgaccaaccacctaaactatccaaattcaaaagattacactagggtgagactaatcacggtgaatctggttgaccgcccataaccgcgggctcggctattcgaacagttttactctgatcagaggtgtacaactgtacccacaagacacagccccacgacacgtttccgtgcgccgacatgccaccacgacataccggaaagaggccgtgacaggacccttcgcataaccccctctaaccaagcacaccacacctcaggtttcacccccactcctcgcaaggcagcgggcagtcccctctcgtgcctaggtgaatccggaagccgcataggccgtcgcagggcccatccaaactccatcacgcccaccctcgcctggatgcgtcggctagagaaaagctacactacaagcccagccgttgcccacgctggcttgtggtaagtatgataagttcttccagggcatcccgcgaaccggtccttaactgccatgggtgcgaccaacaaaaccatgcacccacagcccaccatgtgatttattttaattaaccaacaccgaagcggtgtcactactccaacattaccattagaacctacagtctaaacattaataggattttccccattgtgtactagttgaactaagcatgactaagcaattcctagtccaaagcgtattcatgttataacccaagctaacaaaggagcatggtatcaaaatagcatggctgtaacagtaggtaaacatcccatactaacattataaaacaatgcagtatttgaagaaaaacaatagagcatttgcaatataggatcaacatgttcaagtgacaggcatgacttgccttgctctgctgctggaggaacctcggcgactatttcgaagtacaccggagcgtcggaggaaccggaatctagcgacatacaaggcaaacattgcaaacaggctataagactactgaaacagggaacaaaaccatttttaatggattctacacatttttcttgatttactgagacttgaatgggcttaaacggagctcggatgaattagttatgaattttagaagattcattgtgtttattactataaaagaaaaaccttaaatcatttattgcgcaataaatcccagggctgacgtcatcaagggggcgcggcgccgacatgcggggcccaccggtcagcggctcgggagaggggggaaaagggcgccggcacgcggggcccaccggtcagcgactcaagggggagggcggttcaccgcggaccgggaccacgcgggtggtccaccgccggtccacgggaccgacggcccagatcgccctcggggtcgatcggacgggcggcgacgacccggctcggcttggctcaaggccggcctaccggccgcggcgatgacgacggcgtgcgcgcgcgaacgcgttgccggcgacggcatccggcggcggaggcgacggcgcaaaggcgacgcgaaggcggcggcactaagcggcggctaggaaggagagggaggggaatggatgggagaggaaacctcaccgagggtggccggcgcggaggaaaacgacggcgaacagcgacggcaagccacgggaggacgacggcaaccggcggacgggtttcggggtgtcctaaggaaggaagagagagagattagagagagggagatgaaccacggcgaccggcattcatggccgaaggcggcggtaggggttgaactcaccggagcgcgaggggatgcgaattccggcgacgaaactcgacggggaaggggcggccggggtggagcttagcctcgcgaacccgacggcggtgacggcgcggcgcggcggcgaccctagcggcggctagcggcggccggagtagcggaaacggcgccggcgggtggttgcacggcgcgggagcgatggggagcacgagggagttcggcgagatggggaaaaagcgagaggaggcgacggggaagcctaaataggggaggggagccccggacgtggccggtaggggcgggatttcgccggccaacgtggggagtgggggaggagagagaggtgggattcgaaaatcgaatcccggccatctcgggcccgggcgcgggcgggagggagaggggagtgggcgcgggagatgcggcgcacgcgcgggcgtggccgacatggcccggaggaggcggaggcatgggcgcggcggcggttgcgggcgcggcggcgccggctggaggaaggggacgggtccgacaggtggggcccacctgtcggcgtcccgaggagagagggaggggcggcttgggccggcccacaaggaggacggcgcgcgcggcggggtggactgggccgatggcccaagaagaggaaaaggaggggaaaggaaaaaaaagaaaaagaaaaggaagaaaagaattccctgggatttaaaatattgcaagctcgattttaaaaggttaaaattatttcgagagctctgaaaattccactaaaaatcctgttagtgaatttcgacatgtagaactcaagaaaaattccacaagccaattccgattattatttgcattgatttaatagggtttactcttgctttgcaccggtattttcttagggtctcttattaattcaattttaggcttaggaggagaacttcagggtgtgacaaacctaccccccttaaacggaatctcggccccgagattcggaggagctggcgaagaggtgcggatgggcggctttcaactcatcttccctttcccaggttgcttcctcttctgaatggtgactccactgaactcggcaaaacctggtgaccttgtttctggttcttctttcgctggtatcaagtatacgaaccggcttctccacatatgttaggtcctcctggatatcaatgtgttccgaatcagcctgttcttcaggtacccttaagcacttctttaattgggacacgtggaacacgtcatggatgccgatcatattggatggaagttctaactgataagcaacttctccccttcgttccaggattttgtagggtcccacgaagcgtggtgccaacttgcctttcgtctgaaaacggtgtactcaccggagcggagtgacacgaagatacacgtaatcccctgcctcaaaagtgagctcccttcggcggttatccgcgtagctcttctgtcgagactgggcaatcctcaacctttccctgatgattctgactttctcttcggcttccgctaatacctctgtcccgaacagttgacgctcgtctgtctgatcccaaaagagaggtgtgcggcacttccggccatataaagcttcaaacggtgccatctgtagactggcctggtagctgttgttgtacgagaattctgcatatggcaagtttttgtcctaagttccaccaaaatcaagagcgcatgctctcaacatatcttccgagatttgattgactcgctcggtctgaccatcaatttgcgagtgataggccgtgctgaaatttaaacgagtccccaattcttcctgcagcttctgccagaattttgaggtgaactgactccctcgatcagatacaatctttttgggtactccatgtaaacacatgattctcgagaggtagagctccgccaaccttttgcccgtatacgtggtatgtactggtatgaagtgagcaaccttagtgagtcgatccacgactacccagattgaatcgtgacccgatgatgtccggggtagtcctgttataaagtccattccaatctcctcccatttccattcctggatttgaagaggttggagtaaacctgctggtctttggtgctctgccttcactcgttgacaaacatcgcagagtacgacgaattcagctatttctctcctcatgctgacccaccaaaacttttctttgaggtcttgatacattttggtgctgcctggatgaatggagtactgggtctgatgagcctcggtgagtatcagatccttcagttccttgtcgtcaggtacacacaatctttctcccaaccagattgtgccgtgttcatcttcgtggaaatcccgggcttttccgactctcatgttctttttcagctctgctatttcagaatcatttacttgagctgctctgacttgatccacgagcgtaggccgtgcctccaaagcggctacgaacccgtgttcaacaattcccacgttgagatgctccaactcctgccgcaattcctcacacatgccctcgatgcatagagcagtgcagtaacttttcctgcttaatgcgtctgccaccacattggctttacccgggtggtagtgaatgctcatgtcatagtctttgattagttccaaccatcttcgttgtcggagatttaggtccggttgggtgaagatgtatttcagactcttatggtccgtatatacttcgcagcggttgccaatcagatagtgcctccagatcttcaaagcatgaaccactgctgccaattccaggtcatgagttggataattcccttcgtgtggacgcaactgccgcgaggcatatgcaaccactctgccctcttgcattaggacacatccaagtccgtgacgggatgcatcgcaatagacttggaagtctttcatctggtcgggcagaatcaaaactggtgcggatactaatttcttcttgagctcctcaaaactcttatcgcactcagctgtccatttaaacttctcatctttcttaagcaactgagtcatgggtcgggcgatcctggagaagttttcgatgaatcggcggtaataacctgcaagtccaagaaaacttcgaatctgcgacacggtcttcggtggggtccatttggtaactgactctacgttcgatggatcaactgccacaccctgagctgtaatgacatggcccagaaatttgacttccgtcaaccagaagtcacacttgctgaacttggcgtatagctggtgctccttcaacttctcgagtaccagacggagatgttgctcatgttcttcttcggactttgaatagataagtatgtcgtcgatgaataccacaacaaacttgtccagaaattccatgaacactttgttcatcagattcatgaagaatgcgggtgcgttggtaagtccgaaagacataaccgtgcactcatatagcccgtaccgagtggtgaaggccgtctttggaatatcctcttcccgaattctcaactggtggtagcctgatcccaggtctatcttagaaaacactttagctcctttcagttgatcaaacaaatcatcgattcgcggcaaaggatatttgttcttgattgtgacctcgttgagtgcgcggtaatcaacgcacatcctctttgtcttatcctttttctccacaaaaatgaccggagcaccccaaggtgaagtacttagtcgaatgtaccctttctgcagctgctcatcaacctgcttcttgacctctgctagttcgttggccgccattctgtacggtctcttgtaaattggagcggttcccggtgccaagtcaatccggaattcaatctctctcttgggtggcatggtagtaaggtcttcggggaacacttctggatactcgcagactatgggtatatcttccaatttcctcaaattcttctccacagtgtccactgggatttccgcctcaatctgattcaaagagaccccttgctttggtgagtctggtgatttgtacactactgtttctcccttctcgttggtcaaggtgactgtccgattcgcacaatcgatgactcccttaaacttggtcagccaatccatcccaagaatgacatccaggtctttggattcgagaagaataaggttggctagaaatggcgatctttggatttctattagcactgaagggctaaaactgactgaggttgaactatttcccggggtatgaaccctcattggtgtgctaagctcttctttccttaacccatgcatcccgacaaacttctttgaaatgaacgaatgcgttgcaccagaatcaaaaagtattgttgcagggattgagttaacaggaaacgtacccagtacgacctctggtgctgcttgtgcctcctccgcagatgcgtggttgacacgggcctggataaaccttggcccggcacgcctaggcttcgggcatttgtcagcgaagtggccaagctcgccacagttgaagcaggaccctggttttgctccagtctccttcttggcttgcgcggacgggcctgactgtgccggtgccattggtgggcgtggagctgcaccgcggttgggctgacctccatggtggttctgactgccactggcgccctggggaaagttgctagggttgaacgggcggtactggtggacgatcatggtggtaggtccaccctgctgcccgggagcgaagcgcggcctctggtgacttccctgaggtgccctgaactgagcggcctacctcttcctgtccatcttgttgcgttgatcctcctgacggattgccttgtccaccagtctttcgaaatcggcgtaatctccagatatcaactggttggttagctcatcatccagacctgctaggaatttttcctgcttctcggcgtcagtacggacatcctccggtgcatatcgcgcgaggcgattgaactcatggagatactccgtcacagtcctgttgccctgatggagtgcccgaattccctcttcttttgtgccacgaccccgtctggcacctgcgccttcttgaagctacggcagaactctgcccaagtgacttcagtacatggtgggcgggtggccatgtgattgtcccaccaagctgacgcaggaccttgaagctggtgtgtggcgaaagcaaccttctcctgatcattgcactgcaggagattcagtttcttctttatggcatggagccagtcattcgcctccatagggttggtggtgctggagaaggtgggtggcctgacaagtagaaactctggcaacttggactgagggggagggggaccaaactgctggtgctgctgttcggcgtgctgcagcatcctctggtgcatctgctggtgctgctgctgcatctgctgcatcatggctgccatcatctgagtctgatgtgccatcacttgggctagcgtcggattctcgggaagtggtggcggaccattgccggaattgctgttgggatgcacaccctcagtgcgctcttcaccgttgctgccctcgcctgttgcgcggctaccattcctggtgtagaccatctggaggaaaagcagacgggggaaaagaagaaaaatagaggctcaaggactaggctttattatataggaatttaaactgcaattgttctgatctgaattaaaacacttaaaaagcaagcaaaaatccttattaagacagccatatcataggcacatgatatcgaccgttgactgacccacaagcaagcaacctaaacacacaaactaacaaacaaatgctagacagtcgataaactaatggaaaacgagcctaatgctcggaacggctcctgcggtcggtggagtcgaaggcgtcctcctgctcgtcaccaggtccctctgagcgactcctggagcttggcagataagtctcgccgctgcccggctctgagccactggagctactgctgctgagatcgcggctgccactgggagtagcagacaaccaacctccgttgccactggctggacccctggcggctgatgctggagcgaaggagagagcggacgcgggagctgacacgtgaacgggagctggagctggtactggagctgcaggaactaccagagctgcgggcggaactggaggtgctgcgggagctgctgatggaggtgggttcctgggcgcaagctggatgcgcacgggtgcagtcgtcgtcttgcggggcgtagtgcggatccggactcctcctagagcgggaagaccctttaactgagcattctccctcttcaggcgcgctatctcgtccttcagagcgacgatcctcatgagcttcccatcattcaaggccttggacgccttgtgcaggtccgagtgcatcctatccaatcccctcatcacagcacacatgtgaccaaaggtggtgtcgttctcgccggctgtcggacggaaagtactgacatcagcaccgctggctcgacgagggtgaaatcggtacgccgtgtcgtggaagatgtagttgtggcgctcccgtagtctggccatcatcaggtatgctgcctcctgacaggcgagatctgctgtgcctccggatgcctcaaccaccatattagctaggcaggtacccacgtagccgtggacctccaggcgaacacggtgaggaagctcgccactgagcggtggaacagtcgtgtactctggcgcgttggggtagcctaccaccagcgtcatatgtgccaactctgccacaaagtcaatcatgccttctccgcggtggttgggtgggtggccggccatctagagaaaacaaaggagtaggatcaatgcatgctcaaatccaaatttaaataaagcaattaaagactcaaataagagaattgaataagagcgaaattttatgcatagatcgttttgcatgagagcgaataaataagacagactcacataacgataaaatattggggaaattagatacatactaataataacagtaagagcataaataccttgcaacccatgttcctgagctaggacctaatgcatttcacccatcaaatcccaactgactgacgaataaatctcaatagttttactaaaaccctggactgacttgttttgacaaatctcacttaaacgagcgaccaagatttttccccttgaaccacaagaacagatcccaattttcccggaacaaatccaattgcaaagaacatatgcaatgaaaaggatttagagggctcttaggtttttccatttggcttgtcctacggtcaaggtcggctctgataccaacttgtcacgcccagaaattcccgaatagaattccaagcagaatgtacattaaaatccccatccaggaccggccggggtacacaaacgacaatatcgacattcagatccacgtcttgcaaacatcacaaaagtcttacataaatgcagcggaaagaaagaaagacaacaggagctaagccttgactagaactgcagcgggaacaccactccacaggcatgctcgacggcacggacgaagcctactcctcagagaaacctccatctgacacaaactcatactctggggttgggaaaaatagagcaagactgagtactacccactgtactcagcaagtcataccggaataggggtatgatgcaggcaattatcaaagaagagctagagtggttcatttgcataaagcgagcatttataaacagaagttgaaagatttaaacagttgtaataattaattaatattaactatccactgtccaatgctattccacgttgcaacaggcccgaccaaccacctaaactatccaaattcaaaagattaca

SEQ ID NO: 4926 - DNA, 30296 bp, Oryza sativa
ctaatccaggccaggagagatccgctcagactacacggacccgaggaccccggagtccatctaggatctacttcgctcaacaccttaatatgtggattttgtacgccactatgcttctataagtggagcttgcatgttgtatgagggcgaaagcgtatccaggccctagaacagtctgggtcactgggcacttcttaccgtacttctttgagatatatgaatgctaaagtacctaggacgaggtctaggagccaatcaacctatttgctttatccctagttgctttatcctaagtaccccacctattttaaggatggtttaagcatgccatttatctcaattgtgagttaataactaatttactggggaaatggggtaccctagttcccatttcaccaacaaacaccattcgaggaatgggagaaaaagaagttaaatctctcatacttgcgcaaatggggatgtttggctaaggtcaatgttcctatagtaaaaaagcgcaaacttggaccaaagcctgtagattgtgtgttccttaattatgttattcatagtatgtgatatatattcttaatagtaaattctagagtacctgacatgcgtgttggcacaataactgactccagagatgctatattttttgaatgaattttctatgaacgatgcacctagcacttctagttaagtacctattttatcccccgagtcatttgtgccgatagaatacaatgattaaacacctggggaaaatcctaaggaggataatattgtcgctacttgacaaaggactgcaaagtcttttggtgataactacattgtatatattgtggatgacactgcaaaaaccatagataaggcatattcatctcctgacgccgactattggaaggaagcggtacgtactgagatggactctattttgtctaatggtacttgggaaatcgtcgagcgtccatatgggtgcaagcctgtacgatgcaaaagggtcttcaagaaaaagtttaggcctgatggtataattgaaaagtacaaggcaagacttgtggccaagggttatacttaaaaggaaggcgagtaatttttgtacacttactcaccagttactagcttgaccacgattcgagtattacttgctctggcagcctctcatagtcttcttgtccaccagaaggacgttaagacagctttccttcatcaagagttggaggagtagatctatatggatcaaccagacgtttatgtattagaagatcaagagggaatggtgtgcaagctattgaagtccttgtatggccttaaacaagcacctaagtagtgacatgagaagtttgacaaaacaatgacacttgttgacgttgttatgaacgagactgacaaatgtgtatactattgctatggtggtgggggcgagagtgatcttctgtttatatgtcgatgacatattaatatttgggaccaacctcaatgtgattgaggaggtcaaggacttactttccaaaaactttgagataaaggacttcagtggttgatgttattgttaactttaagctaccaagaggagatgatggtgggattacacttgcgcaatatcactatgtggacaaggtattgtgtcactttggttatagcgactgcaagccagcttctactctttatgatcccagtgtgctattaaggaaataccttagaatagcaagggatcaactgagacactcctagatcattggttaattgatgtatttagctagtgaaacaaggcgtgacatctcatttgctgtgagcaagttgagccggtttgtttcaaatccaggagatgatcactggcaagctttggaaagattaatgcgctatctaaaaggcacaataagcagaccatttcaacgagttcaacaatagaagctgaactcacagcattagacactgtcacggttgaggtcgagtggcttcgtgagctcctaatggatttgccgatggttgaaaaaccagtaccagctatcctgatgatctgtgataatcaaacattgaatattaagatgaacaattcaaatgacaacatgaagtcatccaggcatgtaaagagaagactgaaatctgtcagaaagcagaaaaactccggagtgatagcattggactatgtccagactgctaaaaatctagcagatcaatttactaaaggactatcacgtaatgtgatagataatgcatcgagggagggcttgagacccacttgaattacaaaacagtggtaacttgtcctatgtgatcggagatcgtgtgaatcaggacggcgaaacaaactattgaatgactaggaggagagtctctaaaataggtccatctctttgatgtacttcactcattttctataaggcaggatggtttataacttaatgtgatatgtatggctttcttaagcagagatgttgtcctacagaacatcttataaggaacacgcctatatgagtttgattactagtaacactctatgagatttgggtgatctctaaatactcataaaaaggtatggagtatgaagtataccctccaaacagaggggatgcaaacgacagcctagtttgagctaaggaattgagtacaaactaattgcacaagactgacaattcaaggtttagtccatttttcagttgtagccaagagttgcctcttttcaaggtggaagttcaacttaacaatctcaagcgaaacactgatataacaaacagattcagaacagagaacattttttttgtgctcttaaatttggtggagattgttggaataaatgggctagcccaatttattcctaataaattccattggcccataattaacgttaagagattaatacaatcatggatattgatgtggagagatcacaacctaaataggtagctattagagagcacatgttggccggttgaggtggtggtgggactgccacacgggggctggggcccggggctggggggttgtgggcctgggctggggcagcgaggtgaggctaggcgaggcacttgctctctctctctcgttttgcaacggatgggaaatgaatgggtttgagtcaaagcaattcaacgccattgaatcaacatcattaccattgtaacattcgagagaatcaatcccgatttgattatcagattgattctgttgattactccggtaacggacgaagatattccactccctctcgcgcactacataagaccaccaccgggacaaacagataggcatgtgtgctctctctattcatcctcactctcgcacatctcattctacttgggaaactctttgtttttctattcctactattctgcaacgtcgtctcctttgcaacggctgtttactacgtctacttcctctacatcacgatgtcttccaccgacatcagtgcaactggagtaggagggaacgacggcacacctggaggaggatggaacgacagcacaggagagaacgtcaatatcaatggaggcaataccagtgcctcattatcaactggagcgttctctgggtatttcacttctctcaacttggtgttaaacatattgctaaatgcttttgttccttttagcatattcttgtttatcaccatgctagaatcactatcctttgtaaatatcatgtttattacattaattttatggattaaagtattctgaattatgaccaaatttccaacagctacaaggttgatctgttgcagttgatgaagagtcatttcaggtttgggcttcgagcccacttaaacttgaaactgggagaagcacttgagtcggaaggaattctgtgttaactaaggctgacaacaatttctttgcatgtctacttacatgacgtgcggttaactattactcttgcaagaacctgtgttttttttaataggcacaaagtttgctacagggcatccaaaaaggtgtaattagctgatggacaccgcaagaacacaaatttgctattgggcacagaaaaaattggtaattagctgatgtacactcatagccatattttattacttctggaggaattggagagtgaaactgatgtgagagtacgattctacccctgagtcgccggtcgtcgaccacgccgctgctactattttaccgcgtcgccgtgacgctgctggaccccaaggcgctcctgctccggtcggtgaggacgcagtgggacgccgagccggtcggggtcagcttcgtcgacaccctcgccgccgccaccgacggtgccgccgccaagtactgcttgctcagccctcgtgttgggccgctcaaatctccagcctcactgcgcaaggactgtggcggcactgcgcccggagctcgccaagacgatttcctgcgcggcggcgcccgcgccggccgccaccaccgctgtcggtatgtccatgccgccgtcacccacatacacacagaaaaaccataaattgccaaatttacagaaccaacagtatgcactacctcgctggaatggctcaccaccaacgaccaccacaagcacaatcaaatacaataccccaaatctttcatatttggaaaagcaagcaaattcttcgagataaaaaaattcgagctctccataaagtcaacgtagatgtttgcaagattgatgctcccatatgcagcagtagccattgccattggagtaggctactgccatctagcggcttggagaacttgtggccggaatggcggtggtgctcttcgaggatgcagaaaggcaaaattgtccttaatgactgtttctctctccaattctgtaaaaaataataaaatatggccgcgagtttccattagctaattaccagttttttttttttgcccgatagggatgcaaacggggtgggcaagcgggcttttttttccccgcttatcccaattctagttcatttttttaaaaaaattatactaccattttggaaaatagactagtaagtgggtttttatgtgggtagcgggactacccacttacatccttagtgcccgacaccaaattcgtgttcttgcgatgtccatatgctaattacacgttttttgagtgtactatatcatattttgcctttttaatatagaaagggcaatccgtaatggttgttagaaactcccttcgctacaaaatataagtaacctagtactggattagaaaatatactgttggcccttttttggcaagaagacaaatataattgggatacctagatgccttgcgatgatatggagtcgccaaccacttcaacctagcaaaagctacattaagatgggttttgatagattaaaccggctagcagagccgatttagatgaaactagagataaacgcccgactcgtgagcgaatagaaggtttacaagacaaacctacaaaggggtttcgtactctcgcagccaaggcgcacgatttacaatacaaatcggcaaagatggatgaactaggcgaaaagtagatacagtattgaaaaaagcgattcaattggctcaattggggttgagagtagattgttctccaattgaaccggccttggcccttatataggggttcgtattgcctcctataggtcctccttcacattcaactcggagtagaaaccaatggaaatccgaaacgaaccttctcgagcaaggaaacccgaaacgaacctgacgaaaacagctcggggtcggactttgccggtcagaccagccacatgcatgtggccggttagaccggcccacaggcggcagtcagattggctccgggatggaaatcggcgctttcctaactttgcaatattttccgatcttgatcctagttgccaaatttagatataaacatatactacatatgtatacattgaacatccagattaatatactagcctgtgtttaatccagtatggtgtattagaaacggaggaattagtacacttagcaaacacggaagaatggataagaaaaacgtctcaggcaaggcgctggctaaacttgcacaatccttagttaaatgtaacatactgtattttgcattatagtagcatatgtacttgttgaaagaatttattacttccattaattgtgaggaaagtttctcagtacaaatcgtttcaaatgaaattttaattacatgaattcattaccagctaattcataagatttgggctgctggaatcagaaaatattgtgtgatatagtgtaggggccacgctgtggtggccctcgtgctgctcagtcccggggcggcacggggggagaccaggcaagcaccgtcaccactctcttccccttctctccgccttgccaccacttgagtgatgccagcaaagctgggcgggtgtaaggatagtggaggcatggctccctaccttcctctcgcagttgcggcggcttgggcgctaccaagactagagggagggcttcgggtgtcggatggcggtagccagatccagcgtccttagggccggatccagtccccacgcggtcggatctagtgccctagtcgatggatccaatggtggtcgcgatggcccaacgaggaagagaggagaagctggggctgcgtgacggtgggattacgggggagcacgatggaggatgatggtggttgagcaatggagcaatagttgcacaccgactaggggcacgtggcaggtgtaaaacctagctcggtcttgccaggccaatagcgacggtgcttcgggcaccgttttccttcttgggggtgttgtcgagcctttcctctccctttggtggggctatcaggtgatagccttgtcttggttctcctcgaggcatcgacggacagcggcgtcgatactcatcatcgatactcctctcagataggttgtgcatgcggtctctagatgtttgtcctcttgccggcgacatcctagcttatgaaacttggccatgttgataggccttgtgtggaaaagcggttcctttcttctctctcaccctctccccttcaatcccagggcatggataaagttgagtgcggtgctcggctattagggtttgattttgggcagttcggctgtagcttctttgttagtgtggcagcaaccggtccggtgttagccttcttctgggttctgtgtacgtgctgtcggtgtgtggtgatggggttttctttctttcttgacttttgccttccagggtgctagtattggaattttttcctactctattcaatctattcaatgaatcatttccgtctggtgttgttcattaaaagaaaagagaaaatcccctatgtacccttaaaagtttactcaatcccttctatacccctgagatttgctcattcccttccatacccccaaatttcagtttagatcccttctataccccttccgttagtggaccattaaattcctacgataaagtccattttgcccataggtatcaagaaaatataacattatgaagtatattaatggagtgtaaaactttaagtttattttgcaagatattatttaacaaaaataatattttagttttgccacagcgaaggcaaaacaaaaataatttttatttatgtcaaaatttatatttagaatattctttatcattaaaaactgtatatatagcatattttgtaatagtagtatgacatttttataagataaatctattgatgtgctaaataagtaatttttaataactaataaataaattctatttttatgccatatctaaaaataaattattttaaatattatttatgactttgttatgcaagatattatttatgataatttatttttgttatgcaagataaaaattatttttgttaaatactatctcacaaaataaactcatagatataatagtcgcatacaatatatttatgtactcgatcaatatacttcataaatttatattttcttcatatcaaagggtaaaatgactttatggtaggaatttaagggtgaactagcgaaaggggtatagaagggattaaatttagaggtatgaaagggaatgaacaaatttcaacggtatagaagtgattgggcgaactttcagaggcacacagggaatttcctcttaatgtttgggcacggacatatttttttaagaataaaaattgagcctctacaggccataacatgaacctatgtgaaacctgaagccaacagatatgtttttacatatatattttttcacactttctttttccaccgaagccattttatcagcaaccttttggttcgggggtggctgatgcgctcagccatgcggcgcaccgcgcacctccccctttagtctattaagtatctataagtattatgcatatactttgtatacacaagtataaactttggatcgataataaaatttttatacgtatttacacaaagtatatacatacgtatatatataatttctatatataaaaaaattgacatataaaaaatatacatgtatacaaagttgtatacgtacatatacaaagtatgtatgcgcatgtatacaaaatttgtatatacaaactttgtacaaaacgaaaaaatacatcacgtatataaagtttgtatacgtatatattaaaaaaaaacatcacatatataaagtttatatatgtacgtatacaattaaaaatagaaaaaaaccagaaataccgaaaggaaataaacaaaacagaaaaaacctaaaaaaacgcgaaaaaccagaaccagcctggcacttgcgtcccttgcccgccacaccgttccgccgccgccctctcctcgcacgccacgaggctgcgccgtgcgggagaggcggcgcatggatatccgcgtattatcgatttcgttttggttcttcttattgttattgcaggtggtgatggtggaacaggggtgttgtaatccgcttaaggttcaaatcctattcaattacttacaaattgatacgttttaatggaaactaatttatcgatactttgtgtatatttggattgaaaccaaatcattgataaaaccaataatcaattcggtattaatctctatatggtcaatatttagcttcatattggtgtgaatccaaatatgtgtaatacatcttcaccctatcaaaatattagtaatgtcaaaacttaccaagaatttgtagacaaaccatccaattaaactatgtatttactgcacttttatctctttgagtgtggtagggaaattcgtggatgtgggcatttatagtatattgttttatgcatgtttctttgacgtgatgaacaaaatttagccaattttgtcttactaatcatgtcaccatcgattttaagtcagctccacccgccagcgtgatgacgatatgacagaaagcaaaacgattggctagtagaagtactatacagtacaaaattttacaatttaattttcattttcattgaatcaacattttcaggaagaatttgctttgctgtgtcaatgaactacacggtttgctgcagttctatactactatgatataagcgggtcaattctatgtaaaatgtaacggggagagattttattgaggcaccagaaatactacatctccggcttcaaccgcagaagcatgcaaccaaaaattcgcgagtaaattaaacattttccagtgagtagttgaatcctataaattctagtaggctctaatcgtgagagcagcaaatcgtcaaagtgaccaaaagtcacttacgcaagcgatgctatacctactagctagctagctactctggtaggtagcactgctatgccactgccaccacccaccagttgttgctgattggtagtacaagtcgataccgcacgcatgcagatggttacgcatggcatttgcgaagtgatggcctaattaaccacaagtaattcgaggcacccaggaattaagtagacgaaacaaagacgatgagaatgtagaatcatatagttatatgtccgaagattaacttttttataaacacaaaagcttatctgaagactgaatagctatctagctcatagtacaattgtactccgaaaaaaataaatattgagctagccaaaaaaatcacagcacatgagttgaccagaatgagcaaattccaccgttcacattatagtgttattcaattgtaatgaagggcaaagcgttcctggaagctcacttggattctgcggaattcatcttcttctctgcttggtcttatgaagttgtgatataaggttttagggtaattttatcatttttaagaaaacaaaatttaataccttcagatattcggtatctatgtaaaaaatttttagatccctcaataaaatttaatacctaaaatctaaacgtattaaattttgttttcttaaaaattataaaattaccctaatacataatacctcaataaaatctaaaaattttacgtacttcaataaaatgataaaattaccctaatacctaatacctcaataaaatctaaaaatttttacacaaaaaaataatacctctatgtacaaaaatttaaagaccgtaaaatttctcaaggtttaattttgggttactagctatactgttggtatttcttaacgacattattaggaatataaattcccagcaatggcgccataaatggtcctggatataccgcaagcgcacggatacaccattgtagcatttcacccgagagtattataaggtatcgtatttatttaatcctaagggaagattgtaagagagaactatgctaataatgtatatatgccacttgtatgatcagagtctaagcaggggttaatatattcataagggtacagtgacacgaagcaataaactcatatatctcattatgtggaagaagaaatagaaaagcaatcaattcctatactcctagtatacactcaatcttagtttacatctgctactatacagctatatagccaataacccctaacagtgccttcctggtgtttcgagagaccagcccgggttgacaagttccttaccacaacctgtcatgaccgtccaaccggggctaaatacggaggagtaccctccccaggaaaatttcttaggaatatatactaacgtagaggaatacccatactgagctgtcaccattagtagtccaccttgactgtcccgcaacatatatgcctagataatgatacttaataatccagacaccacacctacattattaaatactactctatatccccaagaatgacatagagcaaccgaataatcgcacattaaacccacaccattgcacctctcgtagtaggctagctacacaactatatcgatacagatatgaaggtaagcccgatactcaagataagctaaaggtaccgagagtatataaagaattataagatttcattaattccgaaagtcttacaaaagaataaagaaaagctactagagccatacccgaattactccgaggactccgagagctattatattctactccacttagcactagaatactaaactaaagtgtagagagaaatgtctagcttgcttgagtgtgctttgaagtgaatgaggcctaattcttttataggcaagtaatgatggttacactatgcgaattgtccaatttgccctgcaaccatcattgagtagctatcaggagcgtccacatggaaagccgggatgagaggagctcgctagggctggcccaacatgcctccacacttcccagggtcactgacagggggcccttaaggcgattatggtagctatggcggtttctaggacagttacacctgacatgtgggcccatcttatcctttttttagaattatacagtacaacgtagacactcacaacgcacgcgcactcacccctatgaacacacgcacgcaaaccctacccctatgagcatgaagtgtcctcatttcttcttcatttatgtattaatctctgcaaataaataatactccaggtacatagctaattctcatagttaatctatgcaaataaataatactccaggcactatattattttgaaacaaatatgcattgcaagcatagctaattctcctttattttagttatagtgacagacgaaattggtctataacaaccgtcaaccaaccccccaaggttgaacctttgctcgtctcgagtaaaggacttacagagaataaacttggttgttgaccaggagttgctactatgttatatatctagaatgtacaagtgcaaaatttgagtacactatctcatattaagcaagtaggcacggtggcttaccaatacgcccaatcccgtggtggaacatgtcacgcccagaaattcccgaatagaattccaagcagaatgtgcattaaaatccccgtccaggaccagccggggtacacaaacgacaatgttgacattcagatccacgtcttacaaacatcataaaagtcttacaaaaatgcagcggaaacaaaagataactggagctaagccttgactaaactgcagcgggaacaccactccacaggcatcctcgacggcacggacgaagcctactcctcggggaaaccttcatctgacaaaaactcatcctctggggttgggaaaagtagagcaagactgagtactacccactgtactcagcaagtcataccggaataggggtatgatgcagggaattaacaaagaagagctagagtggttcatttgcataaatactggcatttataaacaggaattgaatgcgaaaacggttgtaataattaagcagtattaaacatccgctgtccaacgctaacccacgttgcgacaggcccaaccatccaccaaaactatccaaattcaaaagattacactagggtgagactaatcacggtgaatctggttgaccgcccataaccgcgggcacggctattcgaatagttttactctgatcagaggtgtacaactgtacccacaagacacagccccacgacacgtttccgtgcgccgacatgccaccacgacatcccggaaagaggctgtgacaggaccattcgcataaccccctctaaccaagcacaccacacctcaggtttcacccccactcctcgcaaggcagcgggcagtcccctctcgtgcctaggtgaatccggaagccgcatagaccgtcgcagggcccatccaaactccatcacgctcacccttgcctggatgcgtcggctagaggaaagctacactacaagcccagccgttgcccacgctggcttgtggtaagtacgataaatccttccagggcatcccgcgaaccggtccttaactgccatgggtgcgaccagcaaaaccatgcgcccacagcccaccatgtgattcattttaattaaccaacaccagagcggtggtactaatccaacattaccattagaaccaacagtctaaacattaatatgattttccccattgtgaactagttgaactaagcatggctaagcaattcctagtccaaactctactcatgttataaccccaagctaacaaaggagcatggtatcaaaatagtatggctgtaataataggtaaccatcccatagtaatattgcaaaacaaatgcggtatttgaaagaaaacaatagagcatttacaatataggatcaatatgatcaagtgacaagcatgacttgccttgctctgctgctggagggacctcggcgactatctcgaagtacaccggagcgtcggagggatcggaatctaacgacatacaaagcaaacattgcaaacaggctataagactactgaaacagagaacaaaaccatttttaatggattctacacattttttttgatttactgagacttgaatgggattaaacggagctcggatgaattagttatcaattttagaagattcactgtgtttattactatacaagaaaaaccttaaactatttattgcgcaatatattccagggctgacgtcagcacggagggagtgcggcgccgacatgcggggcccaccggtcagcgacccgggagagggcggtccacggcggatcgggtccacggaccggggaggagcggcgccgacatgcggggcccactggtcagcgacccgggagagggaaagaaagggcggcggcacgcggctcggcttggctcaaggccggccgaccgaccgcggcgacggcgacgacgcgcgcgcgaacgcgttgccggcgacgcatgcgaccgacgacggcaacgaccggcggcacgcgaggcggcggcggtcgaaggcgacagcgcgcgacttgaagcggcggcgcggcactaagaggagaggaaggggaaaagaggggaggggatgcctcaccgagggtggccggcgcggaggaagacgatggcgaacggcgacggcaagccacgggaggacgatgtcggcgagcggacgagcttcggggtgccctaaggaaggaggagagagggattagagagagggagatgagccacggcgaccggaagccatggccgaaggcggcggtagaggtggtgctcacccgagtgcgagggaacgagggctccggcgacgaacctcgacggaggagaggtggacggggtggatctcggccacgcgaacccgacggcggcgatggcgcggcctggcggcgaccctaacggcggctagcggcggctggagtagcggaaacggcggctgcggatgggcgcacggcgcgagagcgatgggaggctcgagagagtacggcggaatggggaaaaagtgagaggggacgacggcgatgcttaaatagggggagagaggaccggacgtggccgggagaggcgggaatcgccggccgacgtgggggagtgggggaagagagagaggcgggattcgaaaatcgaatcccggccatctcgggcgcgggcgcgagcgggagagagaggagagtgggcgcgggagacgcggcgcacgcgcgggcgtggccgacgtggcccggaggaggcggagacgtggacgcggcggcggtttcgggtgcggcggttgcgggcgcggcgtcggccggaggaaggggaaagacccgacaggtgggccccacctgtcggcgaccccgggagaggtgggaggcgggcggcctggctgggcctcggcctgcggccggcccagcaagggggagggggaaggaaaggggagaatgggccggcggcccattcgaaaaaaggaggaaaaagggagggaaaagaaaaagaaaaaggaaaaaggattttccctggaattacaatattgcttgcccaattttaactggttaaaattatttctagagctctgaaaattccactaaaaatcctgttaatgaattttgacatgtagaacttaagaaaaattccacatgtcaaatccgattattatttgcattactttcttagggttttctcctgatttgcacctgcattttcttggggtcatttataaattacaattttggcttgggaggaaaacttcggggtgtgacaaacctaccccccttaaacggaatctcagccccgagattcggaggagctggtgaagaggtgcggatgggcggctttcaactcatcttccctttcccaggttgcttcctcttctgaatgatgactccactgaactcggcaaaacctggtgaccttatttctagttcttctttcgctggtatcaagtatacgaaccggcttctccacatatgttaggtcctcctggatatcaatgtgcttcgaatcagcctgttcttcaggtacccttaagcacttctttaattgggacacatggaacacgtcatggatgccgatcatattggatggaagttctaactgataagcaacttctccccttcgttccaagattttgtatggtcccacgaagcgtggtgccaacttgcctttcgtctgaaaccggtgtactccccggagcggagtgacacgaagatacacgtaatctcctgcctcaaaagtgagctcccttcgacggttatccgcgtagctcttctgtcgagactgagcaatcctcaatctttccctgatgattctgactttctcttctgcttccgctaatacttctgttccgaacagttgacgttcgcctgtctgatcccagaagagaggtgtgcggcacttccggccgtataaagcttcaaacggtgccatctgtagactggcctggtagctgttgttgtacgagaattccgcatatggcaagcttttgtcccaagctccaccaaaatcaagagcacaagctctcaacatatcttccaagatttgattgactcgctcggtctgaccatcagtttgcgggtgataggccgtgctgaaatttaaacgggtccccagttcttcctgtagcttctgccagaattttgaggtgaactgactccctcggtcagatacaatctttttgggtactccatgtaggcacatgattctcgaaaggtaaagctccgccaaccttttgcccgtatatgtggtatgtactggtatgaagtgagcaaccttagtgagtcgatccacgactacccagatcaaatcgtgacccgatgatgtccggggcagtcctgttataaagtccattccaatctcctcccatttccattccgggatttgaagaggttggagtaaacctgctggtctttggtgctctgccttcactcgttggcaaacatcgcagagtgcgacgaattcagctatttctctcctcatgctgacccaccaaaacttttctttgaggtcttgatacattttagtgctgcctgggtgaatggagtactgggtctgatgagcctcggtgagtatcagatccttcagttccttgtcgtcaggtacacacaatctttctcccatccagattgtgccatgctcatcttcgtggaaatcccgggcttttccgactctcatgttctttttcagctctgctatctcagaatcatttacttgagctgctctgacttgatccacgagagtgggccgtgcctccagagcggctacaaacccgtgttcaacaattcccatgttgagatgctcaaactcctgccgcaattcctcacacatgccctcgatgcatagggcagtgcagtaacttttccggcttaaagcgtctgccaccacattggctttacccgggtggtagtgaatactcatgtcatagtctttgattagttccaaccatcttcgttgtcggagatttaggtccggttgggtgaagatgtatttcagactcttatggtccgtatatacttcgcagcggttgccaatcagatagtgcctccagatcttcaaagcatgaaccactgctgccaattccaagtcatgagttggataattcccttcgtgtggacgcaactgccgcgaggcatacgcaaccactctgtcctcttgcattaggacacatccaagtccgtgacgggatgcatcacaatagacttggaagtctttcatcgggtcgggcagaatcaaaactggtgcggatactaatttcttcttgagctcctcgaagctcttatcgcactcggctgtccatttaaacttctcatccttcttaagcaactgagtcatgggtcgggcgattctggagaaattttcgatgaatcgacggtaataacctgcaagtccaagaaaacttcgaatctgcgacacggtcttcggtggggtccatttggtaactgactccacgttcgatgggtcgactgccacaccctgagctgtaatgacatgacccagaaatttgacttctgtcaaccagaagtcacacttgctgaacttggcgtatagctggtgctccttcaacttttcgagtaccagacggagatgttgctcatgttcttcctcggattttgagtagataagtatgtcgtcgatgaataccacaacaaacttgtccagaaattccatgaacactttgttcatcagattcatgaagaatgcgggtgcgttggtaagtccgaaagacataaccgtgcactcatatagcccgtaccgagtggtgaaggccgtcttcggaatatcctcttcccggattctcagctggtggtagcctgatcgcaggtctatcttagaaaatactttagctcctttcagttgatcaaataaatcgtcgattcgcggcaaaggatatttattcttgattgtgacctcgttgagtgcgcgataatcaacgcacatcctcttcgtcttatcctttttctccacaaaaatgaccggagcgccccaaggtgaagtgcttggtcgtatgtaccctttctgcagctgctcatcaacttgcttcttgacctctgctaattcgttggccgccattctgtatggtctcttatagattggagcggttcccggtgccaagtcaatccggaattcaatctctctcttgggtggcatggtagtgaggtcttcggggaacacttctggatactcgcagactatgggtatatcttccaattttctcaagttcttctctacggtatccactgggatttccgtctcaatctgattcaacgagacccctttctttggtgagactagagatttgtacaccactgtttctcccttctcgttggtcaaggtgactgtgcgattcgcacaatcgatgactcccttaaacttggtcagccaatccatcccaagaatgacatctaggtctttggattcaagaagaatgaggttggctagaaatggtgatctttggatttctattagcactgaggggctaaaactgactgaggttgaactatttcccggggtatgaaccctcattggtgtgctaagctcttctttccttaacccatacctccccacaaatttctttgaaatgaaagaatgcgttgcaccagaatcgaaaagtactgttgcagggattgagttaacaggaaacgtacccagtacgacctccggtgctgtttgtgcctcctctgcagacgcgtggttgacacgagcctggataaaccttggcccggcacgcctgggctttgggcatttgtcagcgaagtgaccaagctcgccacagttgaagcaggaccctggttttgctccagtctccttcttggcttgcgcgggctggcctgactgtgccggtgccactgatgggcgtggagctgcaccgcggttgggctgacctccatggtggttctgactgccactagtgccctggggaaagttgctagggttgaacgggcggtgctgacggacgatcatggtggtaggtccaccctgctgcccgggagtgaagcgcggcctctggtgacttccctgaggtgccctgaactgagcggccttcctcttcctgtcgatcttgttgcgttgatcctcctggcggattgccttgtcaaccagcctctcaaagtcagcgtagtccccggatatcagttggttggtcagctcatcatccagacccgccatgaacttctcctgcttctcggcgtcggtgcggacatcctctggtgcatatcgcgcgaggcgattgaactcgtggaggtactgtgtcacagtcctgttgccctgatggagtgcccggaattccctcttcttttgtgccacgaccccgtctggcacctgcgccttccttaagctacggcagaactctgcccatgtgacttcagtacctggtgggcgggtggccatgtgattgtcccaccaagctgacgcgggaccctgaagctggtgtgtggcgaaagcgactttctcctgatcattgcactgcaggagattcagcttcttctctatggcatggagccagtcattcgcctccatggggttggtggtgctggagaaggtgggtggcctgacgcgtagaaactctggcaacttggactgagggggagggggaccaaactgctggtgctgctgttcgacgtgctgcatcatcctctggtgcatctgctggtgctgctgctgcatctgctgtatcatggctgccatcatctgagtctgatgtgccataacttgggcaagggtcggattctcgggaagtggtggcggaccattgccggaatctgtcacgaccggaactgacccaacgggcgttccttacgtgcgtgcattaatccttgtcccaggggcaaggtacaccaaaagttgatacaattcagagtttaacaagcggaagcgtaaatagttaatttattacatgggcagcgaaggcccagcacacacaaagacaaacgagaaacagcggaagactagggcgacgaccacaggcacttgacggcaggcacgagctagacaccaaagccttcatcttcaaggggctcctcttctgggtttgggaaaaattgagcaagactgagtacaaccaccgtactcaacaagacacacccacaagtgcagaataaatgcaagggagtacaaaggagttataatataaagggttagggttgcagtaaacagcatttaaagatatttagttgctcagggctattttgtaaacacgattctagaactaaacaatattatttatcaaggccatgaacccacacgaacctgccttaacccaaggcctacgatgattcagaccgaactggcaacccgaccctgggtcccagctcgtcccaagccaacccaggccaaccattccatattttagttgttaaccaggttttaagaattaaaacacttacttgggtacaattgctcggcttgcccataccggagggcgcggctattcgaataggttatactctgatcagaggtgtacatctttacccacaagacacatcttcctcacgtgcaaccacgtgccacataccaccacggtatacagacggaagacgtgacatagtttccaacccatcctagccatagacaagagtaccgacccaatcccacctacggccgggacacccgggacaggcaggcaggactgagcccctagcagcaggacaccggccctgtgccatgacatctcgactaccgggccgcagctcgtgtagccttcatttgccctggagatgtccatcgacccccgacttcgtccatctccatccgtgtacttttgtttataaccagactgagccacaaactaagccttacccactagacatgtggaagtacggtagtgctttgcaacagaggcccgaagaccggtccttatatggccgaggtgctactatcaaaaccatgcaccccgagcccagcctaaaaccattttggggattttgaatagagggggaggtgtgaatccaattccacaataatccaacaattccagtgtgtccaggtgatgagaacatcccaaagtctagagttgtaaaaccacctaatgttacctaattaaaagcgaagcatctacctaaaatcatactagtgatcccgtgagtagagtgtccactagttggggttttgtttattctagggtgaacaaggaaataataacaatagcaataataataaggtcataacaaagataaataggcatggctaaataaaacagtgataacgcgggaatttaaataaagcgataatgcaataatttgaaacaacataattttacaaactgggattcaatatgttcaaagatgatgtgacttgccttgctcgctttcccaaacgtcggcttcaacttccacgaagagcggatcttccgaagctgcagcgtctacacgaccaacggaaacgaaacggcttttactctactaaactccatataacaagcagaaacaaagcacaaaaatgggttcttgacttcttaaggaaaaattagagacttgaacggtccaattccgagttcaaatggccaagttatggccatttgaagtttatatgctctttaaatggatatttgcgaatttcttcatttaaattttaatttaaaatcgggtttattgcatcagccgaggggaggggcgcgcggaccgggtccacgggggtggggcccacgtggcagccccacggcccacggtggaccgggcgcacccaggctcgcaccggccggcgccgtgggtccctctgaaaattccactaaaaatcctgttaatgaatttcgacatgtagaactcaagaaaaaattccacatgtcaaatccgattattatttgcattactttcttagggttttctcctgatttgcaccggtattttcttagggtcatttataaattacaattttggcttgggaggaaaacttcggggtgtgacaaactggcccaaaactaggtcaatgtgcttctcgttgattcctcggtctagctagtagtgtagtgtttgggcccatttgataatattttaatgggtttagaggcccatacacgcataagtctacctcttgatgaatttccatttgtgtagcaatatctgcaaacaagtaaagtccaagtaaaagtggagatagattattctataacaaacatgcattgcaagcatagctagttctcctttatttcggttatatagacggtcgcaattggtttataacaaccatcaacacacagctgcaagaacacatgaccacgagatccctcctcgtaatcaggaagtcatcgatgatcctccccgctgcgcaaaacaaaaacggcgagaatgcctcaccacaacgtcttgcccaacatgtcgccccgatgagttgcccacgatcttcgcgagcatctgaacagccgaaggcataattgacaagaccaacggaacaatggccatcgacaacatcgcgatcggaatcgccaaggcaatcgtctacacgagaaccaaaaccaagaccaaattcgaaatctttaagatcaacagcgttagcaggacaagaacggaggaggtcagcgcaatcatcatgaagacagtcggcgaagcggttcacgatctccagctccaaggcgagatcaagtccatgacatacgatattgagatcgcacacctaacgatagcgatccatcttcatcgtctaggggaggttcgtgacgacctcgcggtcaccgacccccactcatacccagcggcggatgcaggatatttagacccgctcttcgagaagtcaacaggccctcaaaattccatcccgtaccattggacaaatacggaggaagcactgatcctgaggaatttctatgcgtctactctactgtcctatacaccgccagcgcagacgacaatgcattgacgaattatttgccgatagcgttaaagggatctgctcggtcatggctcattcatcttgctccatcatcaatctcatcctgggcagatctttggcaacaattcgtcatgaatttctaaggcacatacaaacgacacgcagtcgaggacgatctacacactctcagacaaaacctagcgaacctctttgggacttcatctggcatttcaacgaatgatgtaatacaatcccggaaatcaccaatgcaagcatttaagttgagcgtctgagatcgctatacgatccaagagatagctacaagatggatcaccttcgccatagattgtgttaaatttctactggatgatgaaaactcaagcagttagacttaattctttcttcttttctactcaggctgaacaaaggagaaataaagctcgattattgctggcttgttgctgggaaaattgttacggagagatttttcaaaacgaacacatcaaatccactctaatatgtccaaaactcatggtatagtgttttttgaactatttcattccggtgaaaaacatctcactcgcgtgagtcaaatctgtaataaatacacaagtactccgataacttacagtggctatcaaagattccttttgaattggtcatacagaactttaatattctatgtttcaaatgacaatgcatttgtactgaatgttgatggctgaaaatttgcttaaattgatgaattggagtatatagtagtaaataaccaagttcatttgcataacctgttgaggaagttctgtttaataatccatactcaatattggattgcattttagttttatatatcttttttgggcttggaacacaattttgctaatggtatcaatatgttttctatgacggttgtccgtcggactccattcacaggaataaaccaacagaaatgttttttctgtatggaaaccaacaagaaaattgaattttttccgtggcgattttttcagctattaccgatcgtccacccaaaggaaaaaaattctaatggtaaaagcagtttttccgatggtttcgctcctactagatggtgttgacgatcattagcgatcagtttcgcccgtcaatactaccaaaataaaggagaactagttatgcttgcaatgcatatttgtgttagaataataaatattccactagcactaggattactaaccttttgcaggcaataaacataaaatggaggagaatcaacatcaaaacagacgatcaatcaattggacgatgtcgagaatcagacttgtggaaagatgggccaagaactcagaaatgacacgatcaattgggccaaaattcacaaatctggagtgagcaataggagaggaggccgcctgccaggaactgggccggttgggccaacccaaggtttagctgaaccagccgcagcgccgatggatgcagcgtttggctggacgggtgggattgattcccaatgacggttggtgggtattactgacctttccaaccgtcattactagcctatataaacccctcactctctccatttcaagacacacatcaagcaagaagcttcatacatctctcaagtttagtatagtctctagagtatagtggaatagaaatataatagaatcttcagtcctcggagtctttggaagaattcgggtatggctctagtagcttttccttcttttgtaagacttgtacttttattagattatttttctttatactactttggtattgtattattttccgagtatatgaataccagctttactatatgttcgaattatatttattatgatgctagcttacctgggagatgcaatggtgtgggtataatgatcgtatttacgatgactctatgtcatgacgatgatattagagtagtatttggtagtttaagcgtggtgtttagattactggatatcattatttggggttgtatttggggttgtatgctgcggaagcgaggtgggccgctgatagtgacagctcagggtattcctccgcgcgtgtatatagtcctaagttaatttcttagggagggtactcctccgtatttagcccaggttggatggtcatgacggattgtcgtaagaaactcggcaatcaggggtggcttctcgaagcaccaggagggtatcggaaataggatattagctaagtaatgatataactaggatgtgggtataatatatatgtatactagagatataggaatagatctttctatattatttccacttagattagataattatgaatgagtataaatgcttctgcttagtgtcactctaccctctgaactatattaaccctgcttggacttttgttattacaagtaatatataaattgtatgattctctctattataatctttccacggaattaaacaaatacgataaccttggaatactctcgggtgaaatgctacaatgttatatccgtgcgcttgcggatgaactctgtaaccataatatatcagaagtgtttctgcgctattgctgagaattatatttgtaataatatcgtttagaaataccaacagatgggacgatgatttggctagatattcgtcaagatgttacattatatagtacagcttttaagttgttgcactagcacaaaattaagtactccctccattctataatataaggcataaatagtttttaaagttgtttcataatataaggcatagatacatgcatgccattaactaacacatcttcttcaccaaaatattattattcaaattcttcaccatcaaaatctctaattttattggatgcatgtattacatttattagattaatccaaattatgaggtgataataattattttttggtttttgggttaagggtggttgtgtcttatattttggaatggagggagcagtatcacgtcgttaaagttgttgtatattgctaaaacatgggagtaataatttatttgcgaacttaatatcattatcattgttgttgttgactcctctttcatgtaaaaaaatatatatactcaaattattcaactagatggggtggtaggtaagggatctcaggatgggacctggcacccatatccaccaaccactgttgtccctgagataatagacgcgtgctttgcagagtgatccaaagctagctagtcctaccaacaatggaggtcgccgccatggagatctctacctcattgctcctcaccaccgtggctctctccgtcatcgtgtgctacgccctggtcttctcccgcgccgggaaggcgcgtgcgccgctgccgctgccgcctggccccaggggatggccggtgctgggcaacctgccgcagctgggcgggaagacgcaccagacgctgcacgagatgaccaaggtgtacggcccgctgatccggctccggttcgggagctccgacgtggtggtcgccggctcggcgccggtggcggcgcagttcctccgcacccacgatgccaacttcagcagccggccacgcaactccggcggcgagcacatggcgtacaacggccgggacgtcgtgttcgggccgtacgggccgcggtggcgcgccatgcggaagatttgcgccgtcaacctcttctccgcgcgcgcgctcgacgacctgcgcgctttccgggagcgggaggccgtgctgatggttaggtcgctggcggaggcgagcgccgcccctgggtcgtcgtctccagcggcggtggtcctgggaaaggaggtgaatgtctgcacgacgaacgcgctgtcgcgcgccgcggtcgggcgccgcgtgttcgccgccggcgcgggcgagggcgcgagggagttcaaagagatcgtgctggaggtgatggaggtgggtggtgtgctgaacgtcggcgacttcgtgccggcgctccggtggctggacccgcagggcgtggtagcgaggatgaaaaagctgcaccgccggttcgacgacatgatgaacgcgatcatcgcggagaggagggccggatcactactcaaaccaaccgacagtcgtgaggaaggtaaggacttgcttggcttgctcctggctatggtgcaggagcaggagtggctcgccgccggcgaggacgacaggatcaccgacacggaaatcaaggcccttatcctggttcgtgattcatgctctgatttagtagatagacactcactcgttcattgcatattaactaagtagctataattttttaagaaaaataataaaatatattagtatataatatattactttacaaacatataaattaaattaaatttgatttttataaataacatatagattataagatccacgttaaatgagtctacatccactcaattattagaatctgtcccctgaacttttttactgttgtctgtctacgtcatgtccaaaacactagtaatgtttgtttctcctttgttgagaatctgtttttcccacgtcgatgtgctttctgttcggaatttggtttgggaatttggggatatgcgtcgttttgcgcaccagaagaccagaacacgtacttgtcgtcatcaccactcatttgggtaacagattatcaagtagactggttgtcgggcttccaatagtaaaatctaattcgagagccctcctgttttagcgctatcattcgacgctggcagagccgtctgatcgctcgcgtcattatcgagtccatctgcgtaggcctcgcagtctactggtaattcttacgatcacagataaaatccgcaagcgcacgggtatacagatgtagcacttcccctacggagtattccaaagggtatcgaatccaaggaaacatgtgtggtcagttcttcctccggttcatccaagaacaccaagcaaaggatagggcgggatagcgaggattcactggtgagaaatagtgtctaggaaagtttaagtttaatcctaacgtaatacttcaggcactggtaacccgctattcccagatgttgctctactacgtacccggacagggaagacttaagtgatctcgagggctgtcaccacctctacacctacctcaaacgtactgtgggatacacagtaattactggataacaattacctaaacaccacgtctaagcaattaatatctactttagtatttataactcaccaaagcaatctctatatttcagttgattatagtgaacgataatcccgtatgctatttaggaactaaccaagagataattctcacaagataaatctaaattactcaggaagaatattatattgaaatcagagtaatgaacaaaataaaagaaatgagagaagattaccgacaactccagaattcttccgacttcttctactctactctcttcctattctagtatacaatatagtacaatagagcctcttataatttagctcaatcttggaagtgtgtgtaagagtgaaggagtgaaactccttatatagaggtaggtatgactgttacacgatgcgaattgtcggaaatgccccgcaaccgccatcaggagatgatcaggaccatccacgccaaaccccagcctgaacggctgagattttggttcggccgaaccaaggggttcggccgaacgtgggctaggcccacctggcctggccttcggcccatctcctccgctggtcctcctttatccatttctcggagttttgagctgagtctttgatattttgatgatcacaacccatccttgtatgaatacacgtttctcctcactttagtctgattttactcccaacttcggggttcaacacctgcatacaaatgaacaccaacactagtggaatatgtgagattaaacacctatcgctatattgaatgtgttattatctggactttatgcagaggttggcggtatagaatcagcatttaacagccgccaacatagtcgtaggcatggctttctggataaggatcgagatgaaaccactccaaccacacgtcacacgcaaatcctgctttagagagtcacagagagagaggttacagtttctcccccatgtccttttcctcttcaaacaatgttttctctcaaattacctatccgatcaacaatccgattacaccattgtgttcgttacaattaaatcatcacaacaagctctgacatgattatattacgatgaaaaaatatttatatttataaattacttttattatatatgtaagttacttttatcatacatataagttgcttttagatttgactaaattccttttatatttgacatataaaagtaaatttaataaagtctgaaagtagtttacatatattataaaattaacttaaaacaaaacggaagtacctttgtcacgacattagaagtaaattcgttgtagggataaaaatattcctttatctaaaattaaatttaattagcacaaatcaacacacgtaagtttaacaatttttaaaagtaacttcaatgttaattggaagtaacttttgcatggttcaagttgaaaggagatactagatggagtacaaactagctaccactagctgtgtagtcacgtccaatgaaaaaatgcattaattaaagttactttctttttgttatagttacttctataatatatttaaattacttttaggctttattgaatttacttttatatgtctaagaagtaatttagtgaaatctaaaaataatttagatatattataaaagtaatttattatttttcatcaaaatataatcatgtgagatcttgttataaagatttaattgttacaaacacaacgatataatcggatcgtagatcagataactagtttaagagaaaattgtatttgaaatataggtggacaatgtctctcatatatggagtggtagctggtttagacaaatcagctaccacttgctgtgtagtcacgttcccaatcgtaaaatcctccttttccgtgggaataggataatgcaccacctaaattattttaatgctaccttactctaaacttcggatatccgcacggtcttcaaagcagtgacaaatctagaatttttattttggtgtgcccacacaatcctcaaaagccaaatcagagtcactcatatacacaaatacagtaaaagttctttttttaaaggaacacaacaagggagggccccattgctaaaagattattattaaaaaagaaagaaggttacaaagcaaattacaacaaaaggatccaatctctgactacatgttgatcactcactttcaacctaaacagcaaaaggaggaagtctcctttaagaagttgcctccaagaaaaaaacaaaggtaatctgttctcaaaaatgaaaccattcctttctttccaaatattccaagcccctaaaaggaacttttctataaagcattgcccattgt

SEQ ID NO: 4927 - DNA, 17539 bp, Oryza sativa
acgaggcggccggtcggtgaagacgtaaacgcccaacaacggcagcattaaaggccagccgtgcagacgaaaacaccagtcggcgacggcgaagacaagccggtcggtgaagaagtagacgcccatcaacgtcggcattaaaggccagccgtgcaggcggaagcaccagtcggcggcagacgaggcggccggttggtgatgttctgactgatccattcatagagcgtaagagataagcttaaagccatgaatcccttttatgcatatctggatctggatcctgcagaacaaacatataggatgagtagtatctgatataaatataatactcgagaaaaaatcaagtattttaaaatatttataaatatgtatttctcctcttgtcaattttgatttccccgagcagatgactctgtacgtttaaacactctgcccgactagtcataaccaccaagcatcgggagtcggcctaggcacttcccaaacatgcatatgagtgacatgagttcgtcattaatggaacaaagtttcacggatcagaatttactactcaggtacttttgcaattattaagagcagaaaataaatttatctcatctctatgcttttgatttattccgaataatacttagcaccttgcgttactcggtccatccaacgagcccccgggtgctaggaatcggcccaaaggcaaccatccattggcaaaccaaacggaaagcataggaagatagaactccataactcgataggtacttttgtactcagattatgtcgcaagcaatcaagataaatattatgaaaattgtttaaaaaatacgatataacatctatagcccccgactcactagtcaacggcgaaccagttgatgtagtgaggcaaaggaaaagacaaaatatcatataaagaataaaataaatgatgacttagctttgtcgtattccctcgatgacagcagaagtagccgatgtgggaataaagcagtccatcaatggtgacaaaaacaccagtcggcgccagtggaaccaagccagtggtgtaaatgatgaagcccattaacagcggcggagtccgccaaccgtataggcaaaaacaccagtcagtggcggcagaggccagccggtcggcgaatacgtggacgcccatgaacggtggtgtgaccaaccaaccgtataggcgaggacaccattcggcggcaatggaggcaggccggcggtgaagtcgtagactcccaacagcggctgcataatacgccacccgtgtaagcggaggcaccaatcggcggctactgaggcaagccggtggtgaattcatacacgcccaacagcggcggcataatataccatccgtgtaggcggaggcaccactcggcggcgacggaggcaggccggcggtgaagtcgtagacgcccaacagcggcggcataataggccagccgtgtaggcagaggcaccaatcggcggcgacggaggcaggccggcggtgaagatgacgatgcccatcaacggtggtgtgaccaaccgaccgtataggcggggacaccagtcggcggcgacggaggcaggccggcggtgaagatgacgatgcccatgaacggtggtgtgaccaaccgaccgtataggcgaggacaccagtcggcggcgacggaggcaggccggcggtgaagtcgtagacgcccaacagcggcggcataataggccagccgtgtaggcggaggcaccagtcggcggcgacggaggcaggccggcggtgaagtcgttgttgttatcagcaatggcggtggcgaagacaagccggcagagtggactcgcggccgatcgaccggaaagctgagacgcctcgagtccatgaccagcatcaatcgcctcaatagtgccgcgtaattatatgcgaacaacaacaaaaaatagcaagagattaatctgagattaaaaatcaatatgataaataatgataaaaatcagattgagtttccccctgactgatttggatcaagtcagagaagaggagcttgtataaatggctcaaggaaaggaagggaaaacttccaaagcaaaaaccaagttgggcaattattaaattgattccatcgctctcattgataggaaactagacgcaacccctacctggcgcgccaactgtcgaaacatgaattcggcaattataaaacggggtagctcaccagacctaaaagtggatggatgtggagacaaatgatttagacatgttcaggccctctccatgagaggtaataccctacctcctgtttgggatttgaaatccgccgggtgtattatagatctgacgatctagttgtctcatgccccctaaagggcctcctgcccaccttatatagggtggggggcaggattacaagatagaaaccttaaccaatacggtatcggtttcctaaatctactttacaatattatcaaaccaggactttaggctgttccgtaatatataaggaaacgtaatacccgagtcatgatctattacatattccatagatataagttatcccctatgactagtcggataaccatgccgtatgggtatggggtacccataatatccacagaacatatatcaaggaagtttaccaattgaaaattatattcagaagtcttgcagggaagacagacattatattcacggacattactcatcgtgataacaaaatctgatcagctaaaatattcaaaattgacaaaaaaattttcttgtcttccctaacctgatcgttagttttaggcaaatgaaattgacaacataaatattccttctcaaaggaggagtgtttatatttctatgcatgtgtgtttaattgttgtggagtgtggatgaatataaagagctatcaggtttctcagaactggtatttggaaaaaataacatatcctagctatatgtttagtaagacaccaagaaaatggaaaacaaaaacaaagcactatggccatgatctatggtagcagctaagaaccctggatatcatgttatctgaccttaatatgctctatggtttgccaggtgatggtaaaagtatgtcttgtaaaactaatgacaatgcaatgcatgtcattgatatactcatgtctcgtgttaagtgatggtagcatgaacggatgggttaaataaattgataggctaattggaaacttggcatgaaatgaagtaatgaactggagagaaatgtaagcactataaagaagaggtaagcttatatataatagccaccggtgctacggtacaaaatcatccattgtggcatgtttctaagttatttttagatatcctaacaatgccatcatattcagcaagagggataactatttttgttcagagcttggcttcaggattcatcacgacaattgatttttgctctacctaacccgaatatgcaatctgtaacgaagttatttggtaatgggagagacaagttaaattctaattgtgctcacagaaaaaaaattgcagtgcggcacatctaaagagggggaaatgatacaactgaaaagcacttcagaatattcagggcattcgtcatcatcgggtaaaatccatcaaacaaaaacaacaacatagcgttcgcaggtgaagtgaagagggaggctctgtgggctagggtttttagggatgggaattggctaggtgcggcggaggccaacgttggaggcggttcgtgaatcgccggagaagggcgagaggaggggagaatttccctagaatgaatgctagctttttcgctaaacacccttggaagatcaagttttacagttatgtcctttgaaccatctctaccgttgattcataatccaacagatgcgggcgcgaaccgatccttggaatagcacgtggccacgtggcgcgtttcaaagatatgtaaactttgcttctaggtttagccacgtggcccaatgagatggtagtgtttgcaccctgaaatcggtattctagattcgagatgaattcctaaggtaatagtacatatgaactgtgcccatgaaaaattcagaacttagagctgcagtttgaagatctcttcagtattgtgcccttctcaacacaaaatcatactaacctgccagcaggaccaacaagcccaaagattcatatctcatcacccgtcacaccaaacataaaaaaaaggggaacggatgcatacctctcgtcccctgatgcagaacgatgattggcgcaggtgaagatggcgtcagctgcgtggaggttgcaaccgcaccgtacatgaggggagtcttctttgtcctcctactttggattggaaaaagctgatggcgcacacaagatcgttcctgagtcatggctccgccgtctacctcctaagcacgccttagggagagggagggcagcgcctaggccaccacgctggcggtcgagcagtgagcaggcgacagcgatggacatggtggaggggaaggatgcggcggcgtgatggtgatcctgattgtcgtctcctccccagatctgacgaggccgaggacggcgagggcaggacgaggatgcccttgggcgtgggatgcgggtccatggctggagccgtgtgctcttggtctcctgacccctgacactgacgataatggtgcggattaggtcggccagcggcgcagacaaccgcagcgatcagcgagcacggcgcacggttgatggcccgggctcgtcaccacgcagcctggatgcgtcgcccgcctcccggaggagtagtcggcgctgggggaggaacaacgaccatgagcagctagccacaggactccacgaggtagcgggcaagcacctccccttgccccagcatggtcggctgggatttcagcgaatccatcggttgggcctcatttgatttggtggacggcggcacgatgaaccgtggaggagccagattccggcgacggcaatgcattcatgacgactttggagcagcaccctccatcgcgacgtagttgacgaagaagaggcggatcggggaacatgttgccaccacgaagcaatcgtcctcgctgtcgctccactctgaatctggcgacaactgagctctatagtgcagcgtagaggacggctgcgaccaacgagcactgtgcacagaggatggccagggtcgccgctccaaatccggctccagtgggactcagcttcggtgacttagtgtaggcaattcacaacgtgacataccatgcatctcggccgtccaaaataaatccaacggagatggcacttgggcccgcctgtaggtcgaaatatcgccgcccgccgcccatccagccatcccgcgtccgagacagcgcccgcccccaatctttcccgcacgcttgcatcgctgttgtgcctcgcccgcgtccggccgtcgccgcgagcgcgagccagctaggaggctcgccaccgctacgcctgccctaggccgtcgtgctcgccacgactggggaggggtccgggcggccaccgcgcgaggccaactccctgccctgccctgccgcgacccatggagaggcactaggccgccaaggccctgccctgccgccgcgaccgggggcgcgtggaggcggccggccactaggcctaacggcgcggtggtgcaggcgggcggccgcgcagcccgagcccgacgcgtggaggaggggacgtcatggaaaagtcgcccaggaccaggatgtatatggaattatgaatctgatggggcggctaatgggcgggtgatcgctccaggcgacctctttgtgcatgaaatgagaatgccagaatgaggctgtcgctttgaatgatctgatattctgtaattctgctcccattttttgtctaacggtgaatcaccaacaattctgaaagtcccatttggaattgtttaatgcaaaaagtgaacggtttttcagctgaaacagaaaggtgatagccgtgtcccagggcacaggaagaggtgcagcgttctccacaaacacaaccaccagtgactcctaccctgaacgaagatgggcggtggtgtcacctctcgccggcgacaaagtgggcggccgaccggtgcgggctctggatgcgggctcggacactgaaatctatcgtggagtcgaggccgccgaaatcaggacgtgcggtgcggcaggagcagcgcagcctcctccacgcactggactcaggttggtgggccgcccacctgcatcagcacatcatcaggcccggtggccggccgcctccacgcgcccccggtcgcggcggcctggcgcctctctgggatcacaacagcggcgcaggtgcctctccactcgcggctggcccggcggcctggcgcttctccggtcgcggcggcggccggacgagggcgaggtgaagcgccggcgtacgcggatctgagggcgagacgaagctgagtccgtctcaggctaagcgcgtcttgtgcgcgtgcgggcctcctgataggctgaaaccgagatatttcgacctgtaggcgggcccaagcgccatctccattggattcgttttggacagccgagatgcatggtatgtctcgttgtgacttgcctacgctaagtaaccaaagctgagtcccgctggtgaggcgcgctgacagcagtgcccgctgttgttgactggatcgccgatccggaaaaaaaggacgaatttggggaaatggatagatggtactccctctgtcccataatatagcaacctagtaccggatgtgacattttatagtacaatgaagctagacaccctgctgtccagattcgttgtactatgaaatgtcccatctgggacatgactacatagagaccacactctatattgtcttaaccagagactcatcttagacctggttgcatactagtacacctaatgatacatgttttttttcttcttatagattttccttttaaattatttatccgatttataatccaattacaccattgtgttcgttgcaattaaatctttacaacaagatcttacatgattatattttgataaaagaaatatctatgttgtaaattagttttattatatatgtacttttatcatatatataaattacttctcgatttgattaaattacttattatacaatcataatgttgtgagttgtttattttattatcttttttagtcaattccataatttgtgctgattaaatttaatttttagatagactcacgtttttacatctgtaacggatctacttttaatgccatgacaaagttactttctttttgtcttaagttacttctataatatatgtaaattacttttaagctttagtgaaattacttttatatgtctaagaagtaatttagtgaaatctaaaagtattttagatatactataaaagtaatttgtaatttttcatcaaaatataatcatgtgagatcttgttgtaaagatttaattcttacgaacacaaccgtgtaatcggatcataaattggatgagtagtttaaaagaaaattttatttgaaacataggtgataggaatatattttctacttacttgatggagactagtactacaggtaaggcatctagatagggtctctcgttagcacttaaacgagaggcctcttgatttagattttgcccccatccggtactaggttactatattatgggacaaagggagtagttatgggtgggtgggttacaaaactatcgcaactcatgactttgtcgcatgcgttgtgatatgcattgcgctataaatcgtcacggactaacaatattcacttaaacaaaattgttagtcctctctaatcgtattgtcattaatcatagaaaaaattaggggccttgatgcactttcatccacaaaaataaaagagagagaaaaaaagaaattatggatcagatctagagaaagaacaatggaggagctctggatttggatctgaatctgtcgccggtcctcctcctcgtcggcgtcgtccctcatcgccgagcagctgtgcctttggccctccttgcctcaccgagccgctgttgctagctccgctttgccgagccgcctccattggacctcctcgtcagtgccgagcctcgccgagccgccaccaggcggcctccttgccaaaccgcactgaccccgccgacatctttccgccttgccgagccaccgcctctggaacactcctcgccgagccgcaccgaccctgacaccgaccctcctcctcctcctcgccacgctaccgccggccctccctgccgaaccaccgccggacctcctcctcctgtcctagctgccaccgaccccgccgccggctctcctccttgtaggctctgaggagagggagagggagagggggtgagaggagaaggagaggggtctgatggagggatgttcttcaagattaaattcaatactataaagtaatatccgtaggattgctacgtaatggcatattgacatcgtgagaaaaaaacttacctagcatatgcttagctaagttggtacaccaaaatactaaattgtcaagttcttgtactaaaccgcacccacttgtcaagttgttgcactcgaacgttcaattcttaagttcttgcactggctcgcacccaccagccaagttgttgtatcgtgggcaatgttctaaatctctggctatagcggcacgctatagccggagatagcggataggaagggaaatagctaggatacttcacttttaatgctatgatttagcaaccgctaatagtggcatttagctagagatagccgatgaaataggcttgacttaggctaaaatagtcgctaacataggccagaaaaattggaaagctaaattgaaaatgggcttttgacatgcgtggcccacaaaattcagcccaaaatcaaaccctaaatcccccactcgttctctctcctaagtcccctcaactctcatccgctcctctccccaaaagcgacggcagcggctatggccaagagtgacggcggtggtcgcgaccggtaggcggtgaccctcggcggccaggcgtcggagttgaggagtagaggattcccacccttgttgtctctcactccctcaactctcaggctctcctttccccaaagagcggcggcagcggcaatggttgtgtccgggagcggcggcgggcaccgtttgcgaccgacgatagtggcggcgctaacggtttgacctgcagcaacagcggctcctcccctcgagaagtggcggcgagctggcgacattgaactgctgcaccaacggtggctgctgcttcccctggcggcggcagaggcttttccccgacgatggtaggcaccattcccccatttcaccattcctcctctcccccgccctgaggagcattacctagctacatgtctttgccgtagcaacatacagccatacagtcaaggatttagcccaaattctatcaaatttttgaatctttcttaatatctttgaaaaccactaaatgccttagctacagctatagccggctatagctgctcttagctattgtagagctcaaccgctaagaggcttagccggagatttagaacattgaccgtgggtgcaatttactcaaaaagaaaattatatcaccacccgcacactgacaacaccaacacacagatccaggagaaggctagcaccagaccggccaccgctaggccaacaacggaacacaactgagatcatccaaaacccgacccttgcaaccaacacaaagctcaactctatccaagtcttcagcatttaggaagagagggtgagagagaagacaaaacacctctccccctaggccctccgacgcggccaacttgtacaaactaggatgccgccacaagaggatgagaatcaagagcgtgcttgcaccaattgcttggggggtttcggcaaggggatgcttagacgacgtctccaagaagaggagcgacgaaacacctccaccgatgtccgtcaaggtctcaaagagagccgagaccgagctttcgcccgatagccatcgagagggcgagacggcacgacaattccctcaggaggggaatgacgctcgaacgtcatcgttgccggtccaaccaaggctgggctgggttttcacctgccgatctatcacagaagcaccatttctccaccgccatctaaacctccgctggtgtgtgggcaccattgcaccggcgccccccgccggctagtgtccgcgcgcttccaccagttgcgcctcactaggccatcggccaccagcagaggcctctctcttcccgctgcgccggccaccgcctccacgcctgcaagccacatcgcgccgcacttgcaatttggttgcgcctccacgcaccgcggccacctcctccgccaccagccgcgcctcaccggcctctgctgtcgccagtcgctccactatgcgcgagctgcctccagccagccgttgctcctcctcctgccagcgtggcatcagccagattgcttcaccgcctccaccttcgcacggccgtgcgaccacctccatatggtcgagcctctgcctccacacggccgcgccaccgcttccgcctccatacgaccatgctgccaccagcaccacacggccgcaccttgccgccttgtcgcctgggggtcggagctcggacaccctgccgcctccacgtgcttcaccaccgccagcggctcgggacggcacccacgctagatccacaccaggagagcgccggatccggcaccgccgctgccgccttcagtcgtcattggctccgcctcctcaccacgtcactgctgtggttgtcgtcgccttggaactaggtcggggttgtcggctccaagcgtcgcgacctcgggggagaaggccccgcgccgccgtcgtccttgcggccgcgtggtttccatcgggccgcttgggcggcggcgaggaggaaggagggcggcaaggggtggtgtcgcggcggcggctcagtcgcccctgccctaggagcgacgcgaggcccagtgacctcagaattgcacaacatccaatagatatacaatacatatattacaatctatattttaaatgagaggataaatcaaatcaatctatactcttggataatttatgctagctgtatttaccaccagtattttttaccataaaaattctcaacaagaggtaggttttgaccgtggcctccctctcacatactgtacatgcatatttccttatgtaccacggtacagtaaaagaaggcatcttcgaaaattgttaagtagtgctatctatgttcctctatcacgatgacacgtgggctcctctttctcttatcatttcctatttcaaaagaaccttatctattagaagttgtctgattttttttagtaatgatctcatcaatttattggatggttcagagtttcggatcatttcaccagtaaagaaataatcttttataccagttgaaaccctccccttttaatcccggttaattatagcaaccgtgaccagcaaattgagactaaaaatctcgatctttaatcctagttgccaagtaaaaaaaatatgggatatgaaattcgaactcaagatctctcaccttaatcctcatgcgtgttatcatcccacctactctacacatctaactttaatagagatgttttccttctgaactaactttgaggacatctctagtaccagttagtaacaccaaccggtactaaaaaatatatctttagtacggatcggtgttaacaagcggtactaaaatgcatctaaaaagatccactagtattagtcttggttggtgctaccaaccggaagtaaacatgtatttctaataccggttgataacacaaaccaagattaaagatatttttagggacttggtcttttagaactggtactaaagagttttagtaccagttcttaatgcatccgagatatttgtgtgtatggggcattgtataaaaggcgagttatcctgtagtaattttttcatattcgcgcgcactcctatgcctaacaccctcctcccgatgatcaccctccaacctacttattggaacggtggaactatgcaagaaaaaccggccatcacatctcatctcaagacttgagaactaaccagacttgagaattaattaactgttgcatccacacgatcgggcccccgcgtcggcccccgcgttgggcgactcgggcagtggaaccctagccaccgccgccacccatcttcgcccccttcctctgcctcgctgccacctgagtgagcggctggcaaagccggcggctcacgagaacggcggcggcggggctcgcggcaggcacaaaggcggaggccggccagagcggcgctgatgtcgaggccggcgcacgggtggaggtgctgtggacggagagcgcatgggagaaggtggtgcagacagcccgatgcacggtggatgacgggggccagagatggaggcggggattggggcggcggcggtggtgggctttcaccgcatccgtgagcgcgaagcaccggtggaggcaggcgaggagaaggcggccggcggcagggttgcagcagcggtggcggcgaggcagcggcggccgtggtgggcaccgccagatttggacccccttggccagatctggcggctgacggcagggacggcgggcgcacgtgctggcacgcgagcaatgccagcagccggaggtggatgtggggagaggaaactggcgacgggctgggctgcttgtgcagagggcacgtgatggcaacgggaggtcggcatggtgacgtcatcggttgcaaggagcacagcgctggtggcatggaggcgtggatgccttggaggcacggctggtgacggtgacaggccgttgcggtgcatggaggagaggacggcgtggtgacatggccggcgacggcggcggtgcgggtagtgccgagagctttcggtacgagcgacggcagaagtcgtcccgaccgttggtgcggagcgccgacgctgtgactacagggagctggcggcagggaggccggtgaagctggccagtggttggtgccggttcagtgcccatgagctgatggaggtttcgatcgtggcggagcattgcggcgacattggtggatagacaggtggcggacgatgggtgaaaacccagcctggtcttggttgggccagcaacaacatcgctttcgagcgttgcattccctcttgagggtgttgtcgtgacgtcccatcacctctaggggttttgccgggtaaaaactcagtctcggctctcctttgaggcctggacggacaacggcggtggtgtttccatgactcctccctggagacgtcgtctaggcaacccctaaccaaaaccgcccagacaaccagtgcaagcttgctctagatttcagtcctcttgtgtcggcgctctagcttatacaagttgaccacgacagaaggcatagggatagaacggttcgatcttgtcttgcaccctctctccctcaatcacaaaattgtggttagagtgcagttctgtgtttgtttgttagggttaggcttgggcgatcccagttgtagtccctctgttggccagaggcggccggtcacgcttagcggtgactggttcggtgctagcctcctctgaggtccatatgttggagctgtcggtgcgtgagtggtggtctttttctctttttcctggttacgatcttgtaattttttttcctgctctgtcactatgaacttcgtattgtcttgtacgagtcgttaaaaaaaacagaaaaaagagttgagaactaccgccctaccacacagatggtaacgttatatttcaaagagtttctagcagctgccccttttcctataatattcaattttcttaggtagtctagactttcatctagcttttgaaaatgtgtagctataattcagaaaataaattagacaccgaaactgaaaaaaaagtaataatcagttttgggatctaaaagctgactactatggccgtgtttagttctttggccaaaatttttttaagtatatgaagacaaatttgaagtattaaacgtagactaataaccaaacaatttatagattgtgcctataaactatgagactaatttattaagtctaattaatccgtcattagcaaatgtttaaggtagcatcacgttgttaaataatgacgcatttaggctcaaaagattcgtctcgcaatttacatgcaaactgtacaattgtttttttttcgtccacatttaggccaaaaatttttagatctaaacacaccctatagcacaaaatgttgagctcacctaaaagcaaataaaactactacaacgtggcgtgtctcccagctgccggggtagctacagcgcgcggtggaaagacatgctcagcacaatcaaccaatgagcgtacgcccagcacaggtcattcaatgagcgtgatagcgatagccataggtgctcgtgatagccatacgtgccacgacccacgaaccgcgaagcaaacatgtaacatcagtctctggaattctggccaaaatttagtagtactcgtccggtttaatgtttttttatagctgaaataaacgtatatcatgattagattctttatacctcaagtaaatatatctcaagtaaatatatatctggatcatataaaacctttcattcattactagtaatatgtccgtgataacgtcacatctcacctcaagacttgagaactacccaatcaaaaaaaaagactttagaactaccgccctaacacacagatgataacgttatgtttcaaagatcgagtttgtagcagctgctccttttcttataatcctcaattttcataagtagtctagactttcatccttttgaaaatgtatagctataaaattcagaaaataaattagacgcggaagctgaaaaaaagtaataatcagttttgggatatacaaagctgactactatggccaatttttttgaagtatatggacacatattcgaagtattaaacgtagactaataacaaaacaaattacagaatgcgcctgtaaactgcaagatgaatttattaagcctaattaatccatcattaccaaatgtttacggtagcatcacattgtcaaatcatgacgcaattaggctcaaaagattcgtctcgcaatttgcatgcaaactgtacaattggttttttcgtccacatttaacgctccatacatgtgtacaaacatttgataagatatttttgatcaaatatttttggatctaaacacactctatagcacaaaatgttgagctcccctacaatcaaataaaactactgcaatgtggcgtgtctccctgctgccggggtagctgcagcctgcggtggaaagatatgctcagcacaatcagccaatgagtgtgcgcccagcataggtcattcaatgagggcgatagcagcgggatagcgacagccataggtgctcgtgatagccatacgtgccacgacccacaaaccacgaagcaaacatgtaacatcagtcacatctcatctcaagacttgagaactacccagtaaaacaaaaaaaaaagacttgagaactaccgccctaacacacagatggtaacgttatgtttcaaagggtttctagcagctgccccttttcctataatcctcaattttcgtatgtactttagactttcatctagcttttgaaaatgtatagctataaaattcagaaaataaagtagacgaggaagctgaaaaataattaataatcagttttggtatttaaaagctgtctacgatagcaaaaaaaatgttgagctcccctaaaagcaaataaggccctgtttagatgggactatttaagtccctatcacatcggatgtttgaaaattaattataaatattaaacgtaggctattaataaaacccatccataatcttggactaatttgcgagacgaatctaatgagcataattaatccatgattagcctatgtgatgctacagtaaacattctctaattatagattaattaggcttaaaaaatttgtctcgtgaattagtttttatttatgtaattagttttgtaagtagtctatatttaatactctaaattagtgtctaaagacagggactaaagttaagtccctggatctaaacaccacctaaaactgctacaatgtggcgtgtctccctgctgctaggggtagctgcagcgcgcggtggaaatatatgctcagcacagtcaaccaatgagcgtgcgcccagcacaggtcattcaatgagcgcgatagtgatagcactggctgatagcgacagccataggtgctcgtgatagccatacatggcatggccacgaaccacgaaagagacatgaaataacagtctctggaattccggccaaaatttagtagtactcgcccggtttaatggttttttttatagccgaaagaaacgtatcatgactagatttatattgtttatacctcaagtaaatatatatctggatcatataaaacctatctttactagtaatttatccatgataacgctacgacgtcaccatagtttggttaataaattatattattaaattgcatgttattcgagttactttttctcggatcagttcaaatgagtcaggtcatatatcaaatatatttaaagaaaattaaaaaatatcatattatttgaaatgttaacttaatatgtaccatgaataattatatataatcacttcaaatattatttaaggatgatacatatccacgcgtccacacatggcagtaaaaaaatgatttgagctccggagtgaaaataacatgaccggtggggtaatgaccgtcggcacgacttttcattaagaagaataaccatcaaccaaactagtcaagaaaagccacaaacacttagagcaagtttaatagtataacccactactaacttcaaatcatctatagctaattcatacaataattgcttactatactattaatgtctggtccacctgttatacacacattacgtcttggagtccgtgctgtagctggctatagatttgtagcccgttgctctgctctctctttgtttatctctttcaaatatgtttatatgtttatagctcgtttatagccttcttttttacctgatcttgtgttccttatggattggtccttaccccgtgctttgaggccctgcctcgtatgcacataaagttgaaactcaataaagttaaattcaataaggtctgcacacattcaaagttgtttctcaaacaatatcctagtatcccacacagtcgacctgttctgatcggagccgacatgcatggttttaattttttttaatcttccaccgtattattatgaccatttatttaagttatttgataggtttatttataaaatattcaatttatttcattcataagtagatcacggtcgacgtctgaggtcacgactatggtatttgcatggtatgaggatcgtcggtaccagggtatatgcgaggtaaaagagacagacacaagccggtgttgctctttattcatatgaatcacacaagtacaataattgggataacctatctagctctcgccgacttagcggtatacataaccaacatgtagtcgacaacagggcagtcttaact

SEQ ID NO: 4928 - DNA, 19364 bp, Oryza sativa
gtatttaattaaattttggagcaaattaaaaacctaatcggcaaatcaaagcatcatctacttgtgcactaatttgaacactagggtataactttcataatttattcaaatactagattatttatcatgagttaatataatttttgtagaatttttacactttgttttgacctcattaaaattcaattcagttctcagcattccccttttcacctttttgccagaattaaaatattacgaatttttgagtgaaactttgaaaaatggaaactaggtaactcaatctatctccacaccagaaaacacatttttgacactcttgtagataggtcaatctagttacccaagaatgagaggaagaaaatgcctgcaaatcaactagtttcaatgtgtacctatgtttctaaccttcctttatctgtcccgtggacccagctcgacttggccccacctgtcactgacctaggctctccaccaagccccatcccacctccaggtcgtgcacccagctcaggttcataaggcaagcaggaaaccctttcatcttcttcccctttcttcctcccttgtctgttctcccatgagctgagctctctcctaattttctccttcccgaatcttcttgaaaatgcaagaatcaagccctgcatgtcacaccactagatccttgtgattctaagctttccatccatccaaatggcttgcacatgcatagatttgtgagggagatcgagaagaaaagagaaggagcttgctgcttggtgcagtagcagtaacacttcgttttcctccacttggtgagcttccttccccatccatagcttctctcttaggttccctaatatgctgagcattcctagcctcctccaccggtcgccggttcaagatttcaaggataggagcaggttgcacgttgttttctgtcctttggtgacaactgctcggtgtcttctttgcttccctgttttggtgaggtatcagctcttcacctcaagccaaaaagtgtcttcttagcagtaggatcaagtccttaatgtatgtttttcttgcatgtgatgttcttgacatgcatgcaatagagcgatccacccacagcgctgcatcgttacatgcatgacatcccgagcgctggcacttgcagccgctgcctgcacctgtccggccaccactgggctgggtagagtataggaatggaatctcaaagacttgatctgcatggtctcttttgaccttgccccaattagagccatcgtttgctgccagcgagcttgagatcgagctcagccatggctgtctatgattgctgctcaattggagaagaagctggaccttgttgagaaatgggaaaacttcaaaaagccataagtatttcattttaactcatctttgaatgaatcaaatccctgtgtattcataaccttgtagaccttatgtttgtaaaggaaaacttttcaacttctgttaagaaaatgtcagtttttcatatgacttaggttagttcatatgtaactgaaacaatgccattttcagtgtatatggcttgttatttttatacctctcaaaccataaatgtaaatgagttgattcttgttcctaaaattagtttatcatactctctacctactgtaattaggccatgatttatagagcatgttgcatatgcatatttatttgaatcttatttgcatatttgcctcttattggtagattcggagaatttggaatacgtggagcaagactcagaggttgagtgtgtttccgcacagcagcaaggcaagcgtctatggatattgaacctatgatttcacaaaacttatttgcttgcaaaaactatatatatgcataagttgaattgccttaaaatgtcggtaacgggtagagttgtttatatccaagttcatgcatttcccttcctttaatatattgttgccatgtaaccttgtcaccttcaattgtaaatggttaggatggtttattctatcatcgaatgcttagccatgcttaggtctactgttgttagaaatcgatggatggagccatcggatgaacttattcaccacccgcgatttatgggcattaaaatctgattacctcactcaatgattaatatggaaacatgctttagcttggacgtgtgatagggcgatgacgggatggtcattttccctgatgcaagtagccttgtctgggttgttaaggaccgaacatgttgacgtctattcaagcaccatacgtacttccacacaccttatttgggaccggcttgtcttagtactatgttgcactgtgctcatctacgtcttgctggtcattcgtgagggtggttttccctttggattgccccgggtgtgcctgattttggcagggggtttctcccgcgatggtgagctggccacatcacacgcacgtggctaagtcgacgggggcctaggcgtggtttaggtggttggggtgtcactaggaaaggacatgttatgagcttgtatcacttgtaggtcacacctgtgtgcgtgtgaagcatttgatccttgttcatttcgtgtgggtaaagttgtacacctctgatcagagtaaaactattcgaatagccgtgtccacggttataggacgatcgcttgatgtgttagtcagtctatgttagcatcaaacttgggttaaatggctggtttagtcatggatatggtgatagttatgtttggaatccatggttgggcaacggtagcccatggatggtgatgagagcaccggttgtgctcatttgtgattcaatttcagatttacttgcttgctgtcctaaatttcggattatgctattttgtacaaatgttatatttgcaacttactacttgctcaacaaaattagctctatgcaaaatctgaaccacttagccatttcctttgatgtagaaatttgcatactcctttgtactatcatatatggtgtaagtcttgcggagtacctttcgtactcatgttgctattttcaggtgaggatgccggcgttgatgttgtgccctactactatcccaccaagggtggcgagggtagcgagtagttgaagttcgctcttgccccgattggttgcccttgtggggttgttggcacaccacaggtttttcttttgcttatgagaaattatgaaacttccgctgctatattttgtgttgtatgatgggcttgtgaaccccgttatgaaatatgtaccttgctgtccttgtatctagatttatgcatttgtgatgtttatcaattgcttgcgatgaaagtgcgaggctagtcagttttctggggactagctgagcatgagtatgaattttgagcaattgagatgttgtagagctttagcattttgagtcaagtctcctgagatgtgtaacacttttggtcgctgccttcgtgtggtttgacgggcatgtctcaggctgcagttgactggcatgctgagtccgaacaatatctcctttgctcatgattcggcattgcggattttatatcgaatggtgttaaattgtgatcatgagcacattgaggtatgagtggctatttatacgtgtatggatcccactcatccaaaattatgtggtggtcacgaattgcactggacgatataatgttcgagtgcccacatgcgggatcattgttcgctatagcccattaatttatagtgattactttactgtttagctagcgctaaagtagttattaattgcatagacgtagagtctgggtaattaatttccggtgattgcttcgtatcccaccgtaggtttgaggtaggcgtagaggtggtgacagcccttaaatacactaaagtcctccctgtctgggtatgcagtagagcaacatctttgagcagcgggctggccagtgcctaaagtatcacgttaggattaaattgagctttccgtagacatggtttctcactaggaaatcctctttaccctttgcctacatttgcttcatgtccttgggtgaacctgaagaggagctgaacacacacgttccctgaggaaatcgataccttggaatacttgagggtgaactgctacatcggtatcttccgtgcgcttgcggattttatttgtgacgttaagaaataccaacaatagcaccaattataaaatgagtaattaattatatggatgacacagcgtcacatcccttcatctgttgtagggacttgtgaaccacatcgatggtggatagttaataatttcaacttacaactaatcacaactgattatacgaaatatatagttaatgtcacacccggagttttcccttttttgtagtttctaaatcattgctaaatcgtctatagaaaatacgttgttaaccaagagaaaaccctaaataacaaagtgtttaataattggaattatcagggagattttttttttgaattctcattgctataaatcattaacgggatgtatagtggaatattcagagtaagggaaataacaaaagttaatttaaaatgtcaggagttgaagtaataataattttcttgcccgcctttggccatgaaccgtgcctggttcacttatccgttagtctgcggttccattttgtataacgagccgagtccgaatccgcttctagttccgtgtccgttcttttcctaaaacggcaccgcatcaatttttcttttcctttccctttttggtcgccattttcggttttcccctccacccccttcctgccgcgcgccgtgccctcccaccatcgccatcgtcgccgttgcgtaccggtaatccgcactccctctccgtgctatggccgccgctattctccatctatgtatattctaatctactccatcctaggtttcgtttagcgtcgtcgtcgtcatcctcgcagggttaccgtccccgctgttccaaacccttgccgttgccgttgttttcctcggtgagaaatcttttccaacccttctttatttagatggtgtcttgatcgtttagcgttaaccctaaccgcatgaccgagtgtttgtcgcgttgttgtgtcaccgcggtaaaccctagcaccgctgccggccaaggcgccgccgctgctgtgtgtcgtgccgtgtaccgccgcccgctgccgccgcgccgctgccgctactgccactgcagccgagccgccctgctgcgccaccgccgtgcgccgttgctgctgccctagccgcgcagccgctgccgccgctgccgggtgccgtagctgagcatcgccgccgctgtcccgtgtcgccatcgctgttcagctgctgcccatagctcggtagttgagttgcttagccgctttagtacatgcgagtctctaccggcctattgtttgccataccgggtcattgccgcaaaccatgcttagttgccgactttgctgcagccgttcgctaagttgctttaggatcattcgcacgtagtattgccaaagctttagtccgttcggtcgttctgagtcgttctttagtttagagtcgttctgagctgccggttccgttcgccggtttggttgacggtcccgtgtcacgatgtgttggctggttgagtcactaatttgtgaggcttgcttactggtgatatatttccattgatctatttctctatgggcattaatatgtaataattgattaaggtttttcggttgttagtaattacacagctcatattgtaaaattcatatctaaataatctgagctccgttttaacccattcaagttgcagtgaattcattaaaatgtatagaatccattaaaattgatttcttttactatttcagtagccttattgcttgtatttcttgtataatttgtttgtcgtatagattccggtagttccggtgatccagcttattttgaagtggttgctgaggttccatctgttcaagagcaaggcaagtcatacatacaacattgaacatgttgaacctattttataaaatcccctgctttttattaaattgcattattttagaatgtcatgtgggatggatgcctatcgtcctcagcttgttgatatcttatgctattgataacttgggatataattgattagatgtttgttgtagaaatgcttagccatgcttagatcaattagttcacaatgtgattcattataatttagtccttaattatatgatgatgtacccccatggttattgtttaattaaactaaaatatgctttaatagtgggttgtggatgcgtggatttggaagtcatgcccatgacaattaaggaccgattctcgggaatccttggaagatataatcgtacttaccacatgccagcgtgggctccaggcttaatctagagtataatttaacctagctgacataccatggtaagggtagaggcgatggtgcagttcggacctggcttttggtcttcattgtttctggatttacctaggaataaaaggggactggccgacttggcataaggagggcgtgaaacctgaggtgggtatgttcggttagggagggttatatgacaggttttgtcacgattttcccatttgcagtatcgcggtggtacttcggggcatggtaacatgtgtggaatcgtgccatgtgggtaaagttgatgttgatggtcattatcgatcagtttcggcctccgatattactataacaaaggacaactagctatgcttgcaatgcatatttgttttaaaattaactatttccacttgcactaggattctaacatcttgtagagaatacaacacgaaacggagaagaattgacagcaaaatggacgatcaatcaatcggacgctgtcgagaatcagacttatggatagatgggctagaacacaaaattgacacgactcacaaagggccaaaattcacaaactctgaagaaagaagaggtcaaagaggaggcctgccagaaactgggccggttgggctagcctagggttcgaccgacccagtgccagctctgttggattcagggttttgagggaacagtggacattcactcccaatgatggttggagggcgtttccgacctttccaaccgtcataaccgtcattcccagcctataaaaggccctcacctcattcctttcatcacacactcaagcaagaagctccaagctttctctcaagtttagtttagtattctattgctagtggaataggaatagaatagtttctttagtcctcggagtcctcgggagaattcgggtatggctatagtagctcttccttcttttgtaagacttatacaattattagaatattcttctaaatatatttacggtactttacttcactctgattttttgagtaccgactttctgatatattattcgagatataattgtctagctagcttacctaggagatgcactggtgtgggtataatgttcacttatatgattgttctatgtcatgacgatgattttagagtagtatttggtagcatacgtgaggtgcttaggctattgaatatcattattaggtgttatatgccgcgagacagtagaggtgggtcgctgatggtcacagctcagtacgggtattcctctacgttagtatataatcctaagttactttcctggggaggatactcctccgtatttagccccggttggatggccatgatgggttgtcgcaagaaactcggcaaccaggggtggtctctcgaaataccatgagggaattgtaaagggggtattggctatataattatatagtagataatattatctaaagttgtatgtattttagaagaataggaatagattcttttcttattcttttcctcttagcctagacttagtatttatgagagaatgagttattttgtttcgtgtcactctacccttgaattaaattaaccactgcttagactttgattatgacaagtaacatataaatattagcatatttctctttattataatcttcccacgggattaaacaaataagatacccttggaatacttctgagtgaaatgctacaatggtatatccgtgcgcttgcggatgtgatttataaccataatataccatgaatatttctgcgccattgctgggaattatatttctagtaatgtcgttaagaaaccaacagttataaacctctgatcagagttaaaactattcaaatagccgtgcccgcggtttttgggcggttaaccagctcaacgtgattagtctcactataataatttgacttattgaactggtgttgttcaggtggtttggttgggcctgttgcaacgtggtttagcgttggacagtgatattttaatattacttaattatatctactgttttacttattcaaattatgatttataaatgctgcttttattgcaaatatcctatggcctatcctttgcgaatatcttacatcataccttcccgttggtatgacttgttgagtacggtggttggtactcagtcttgctttatttttccccaccctagaagcagagattgattcagatggtgagttctataaggattgagcttgtttcggacattgaggatgcctgtggttctatggaggatgcttcgcttttggtcgtgaagattaagtccagtttagttgtttattttcgctgcgtttgtaagaattatttattatttttgtaagacgtggatctgtttatcaaattgtcgtttgcgtactccggctagtcttggacagagattttaatacacattctgcttgaaattttggtagcgaatttctgggcatgacaattaatcatccaagggggtgtctttcgcatgtgccatgaggggtgctaggccaaccctgggcctcccgttggattcgccaccgcatccacttatgtttaccatacatccacatgtgctatttatggggtggccttatccaattaagttatgtaatgtctagccttcctattgacctgtaaaggtagtagggttgtctagaggagctacttatttactcgctgagagtagtttaggtctctaagtttgtccaatacaatggtacaatgcctcatggggaaacatatgcttttgccgccactgcgttaggtttaaggcgtgggcctgccacctaatggctctaggttattcctagggtgaattcacatttgtcgtgctggtgcaaggctaggcattaggtctagtttaatgtaaaggctacattttaacctctagaccacattcaacgtgtagagtgtggttatgctgacgggtaccgaataaactagagcaattcacatcatgtggataaagctgtataaactcggcagaatctaaaactaatcgactaaccgcgctcacagtcagtgagtgacatagtgatgtgctgtgggtatagttttgtgttttataaatgcttttggaacttgatgatttgaaatgatgttgagtaacgtatatgatattgttgccttactaccggttgggtactaaggaatgatgctatatgacgttgccttactaccagttgggtagtaaggaatgacacttatttatttactagtaatcgtgcacgtgcaatgcacgttatgatcgttatttgattgaaccgtctatgtacatttatgtgtagaatgtttaaaacatttgatatctaattgtgcacagcagtgcttactattttctggaaaaaaaaagataatagtgatttgaagttctttttctatactaaccattaacccaaccgaagaacagcagggcaagatatatactatctttgaccaacgacaataaaagaacaatgggagacagatgacaaatatcactaccccaaacctttatgccccaaaatttgatcatatcggtcacgtcagttgccaggtgaagaaatatacattcaaagtttctattgcatgtaccaatttacaacaataagtaaataccatttgattggaacttgagcccaattaatcaactttgtataagtagttttgcaacttcatagtgttacaaataagcaagtgctaagcgtctaacaataaagaaacaaaaacccttaaatgatcatttcttaattcacacgatcctcgttttcaaacatttttcatgaacatgaaaaaaaaacaagaacaatactatatgggcaatcaaagctaaatatcaagaagtgttcatagttctcacaagctccatttattcttgaaggagtgtatccctgccattctgtcccaaaggaggcttaccttgctccaaaacagattcggcttaccaacttgtagttttcaccgaatcaccgtgttcaatgccgattacttcaaataatagaggttattcttcttaatctctggtcatggacgacaacttgcctctcgatcactgtcattgttggtggacactaccaattgaacaaaagactcccaatatcacttctgtcaatagtatagatccaaccatgtcagtgcacgaaccaacttcaaataccagaaatatattgaatatttccctaattagtttgcttcagcacctcaaaaccttccttcataatccacagttatgagccttcatgttggctatactggggatggaaattaaatttaagtcatgtacattagaagctacgaaaattattttgatcaacaaattacgattcctaaggatgacggtaactaaacttcttcaagataaggtggcaaatggagagatgattataaaatttatattcttgaagaaagctatatataacttaaaccaggtcataaaaaattctttattagcaaatatatactattctactccataatatattagatgtttcctactttggcatttcaatatagtttctttcagattgctgcatttatagctaaggaagacacaatgcaatgcaaatactaagagtgcacaaagtgagctggagacgtaaaatatcatctggtaagaaaacagagtatttggtaacttaatagtttcacattattccagtgataaaataaaggcattgtgtaaaaaccataaactaaagcatttaacaaagttaacaggaaaaaaatgttttccccaaacaagaaagtatcaatttggtatttagatccaaagcatgatcagatccttcgcatcaattcttcactttgtttgctaaactaatatgcatgaatcaatcttccctttgtttgttaaactaatataaatgcatcaccttacagactattattccttcaagcctcattactcatcattcctttctgttgactcttctcagtgcatatacacatgtagaaaaataaattgaccgagccaaggatcaatagcatgaatccaacaaattcatgccacagagctgtatatacagtttgccagtgttatgatgatccatatattcagatggaaactgagaactgaactaaattgaaaaattatgaacttgcctgtgaacaaattgtacaggcataatttaattcatttggaaacataattgcagcaaaaagaaaaatataatgacctctactttatgctcacttgctctacaaggggtaattgtttaaccagacaggaaaagcagaaattgggtgagacattttcttgaagttagcaacaccatatctttttatactcaatttaaatactttcataattccttctgaacagtaaaaaaaaagaaaggcaatactttgttgtacctgaagcctttggagtatgtattgtgatctcgaggttggtggacaccccaaagccatcacctctgaagctactaacagagccatctccagtatgtatatatctgtatctccaagttccatttccctgtaactcattggctgtgggcaattccttgcgtactaacagatacaagtgaggaaaaaaaattccaattcaaccagagaatagaaaacagccactctacaacgtggacaagtgcacaacaacaaattgaccgctcatttcagttgctggcacatcgtaataattgtgcacacccgagcgcaaggaaagcaaagcggtttctgtggttcttatcctcccaagacagtctcccaaagttccaatcatcaacatccaacttgtcataagtcataacagtagtagttgtagaatgcgagggaagcatttcagtgcatgtcatgcattgggtaatttcatcgaccatcttgtgtgcataaagaaaagatttaacacctgattagcatcagaaatatatgcagagagattgcattagtaaaaaaaaaacagctttcaacaatctcctcataggtaaaaaaagaacagaaatctgtcaccatgcctgttgtttccgcaagattgccagcatctctggtcggctaaaaattaccaccgacatctcacgttcttagctggagagctgcattacaatagcccatggttagcattaccaatatagcataaatctcatagcagtcgaccacaaacaaatcaaagaaatttaatgactcacatgagttggccggtggtttgttgacggagagcaggtgttgacaggaggagctgcgacgacgaagattgagtgtgtggccaactggccatggagattgagggtgcattggtggcgcagatgagaagatggctggttcagttggagaagtgctccatagcgctagccacgcacggtatggagaagaggggacattgatctgtcattcacggaggagaaggggatcgagatggagttaccggtgcacggaaggggatcatcaggggatgaaatgcgtggtctcgtgtcgcgagagccgagaggaaaccgtcggccggagcttgggcgtgaatctaggggggtcgcgcggtgtccggcaaggaggtgccaatcgcggtgactcgcgacctgcggcaaggaggtgggaggaatagcggcgtccgtatcgtgccggcaccggtggtagcaccggagtcgttggtggaaggccggaggcgtagcggcgctggtccgggtctgcctggtggggtttggctgtttgcgatttgggatggcggcgctggtccggcggtgcggcggcgctggcccgtcgcgaggaaggaggatgcgtgcggagggaggagaagcgaggaggcggcggggaatcgcggggcggagtcagcgcggcggggatttgcgcgacgggtcatcgcgtgggtgcggaatcggtgcaatcggcgaggaggacaacggatggataagattagagtcgatcgtcgatggacgaatgagatgagaggggatgatttcacccgtaggattgctaggcacaactcctcctttttatattagcatagatgttaacaccatgctgtgatttatatgctttacatattgcaaatgtttactttaaatacgttgcaaaatatttgtgaatcaaaattggctttatgcgaaaattgagacaacatatagcctctctttgaattatagccttcatatatgtaggtttgattgtgcgctagctttgccagtacattaatgtactgactcatactttgttcatatatctttgtttagacttcactgcaagtagataagtgctcggtaccgtttgccagtttaggatggccctatctagtggtctacccctagtctgttgcttgtgggttaatttgggtagacatgcttccgatggacattaacatttggccggttggccctatgtatgtagctaagttatttgtctatatttgtatataagtaatgtctttatgtaattgataacttggcttagatgaaagtgcaaagatagcaattttctggggttagctgagcataagtaagaattttgggtaattgagatattatagaggtttagcaatttgagtcaagtgtcttgggatgtgtaatacatttggttgcctgtttatgtggtatgatgagcacgtttcaggctatagttggcatgctaaagactcaacaatgtctcccttgcccaatgttcggcattcgcagactttataccgaatggtgttaatttgtgatcatatgtaaatattaagaattcagtggctttttatccatgcatggattccactaatccaaaatcatgtgatggtcacaaatggcaccggacgatgtaaattcgacaatgctcgatatatctttagtcggataagctgtttatatggatatatgtctatatggatatatggtacccataatctccataatatgcaactttaattataatgttttgtaataattgattttcttctctgttttttttttcgttctgtgtagatgcttggcaaatcaagcataacccgccacaattttacacatgcggtgggatttttttttccgtctatctgacctttatggttcagtggctggtaatagcggctcaattttggagcaatatttttgtttttgacaaacatcgcaggagactatactttagatttatttttagcagcctctgcccttcagatagttctgctctttgaactatcgtatatgtagcaaagttcacatatttaccatctcataaatcatattcacaaagctactaaatcagattcacaagtctttggacaacccttcatacagaatgacacatttataattgatgcaagttccagtatattgaatatacaacttattttttcttgcacttatcggaggtttatacactaagtgactttttgaggtacatatttgtatatattgctttcacactgaacaataatcttctgatattaatattttggttccaaatggagcaagcgcatatgccatttacagagcattagatagagcatgcaactgcacatgtgtggcgacgaattttccaaatatgacagcaaaggcaggaaagccgtacagaagtgtatgaatttgcataagcaaagcagccggagtgctgaaccaagcgagtttgatgccctttgtgccgcaagtttgcagtttgatgcaccttttgattagtgcatttcctatgttttatactttatttatatgttgcatgcacatatcataagttgaaattgcacaaagttagtgcaagtttcacgtaattatagtgcaaatctgaatattttttcggttcggattatattatatgcaagacaacgacaacattaacttctgtaacagtttcatcgaatttgcccagtaagaacattaacccacggcccaacaaagattcacatctttgattctagatcggatgacacagatcgactgatggattgcaatttttttagcgactgacaattattctgtcccttaatatatgtatactccttgtgaaaaacaaaaccaatcaacatacatcgaatgatataacacaacgacagttcaaacccactatttattcgcacggtaataacctttcacaagaataaaagttggtgagagtaatgacatatgggcccactaatcctagatgtccttaaaaaaagataagagttggtagtggggtggtagcagaatcatcaccactactcctttttataaggagtatagatactcgtgaaaaaccaatctaccaacatacaacaatgatgcaacaccatgacaaaagttcataccctctatttatttgatgccacacacacggaaataacttttcgttaattatattcaactcgtaaatctttatgcaatattgtaagcggatgggagaagccttggtaccgggtgaaccaccaatggctctgccctttgcagcaggagggtaaacgcctcatccatattgagcttgtctggcgtctggtccgctggtagctgccagtcgaatgcatgcaccagcgtggccgctgtcatggtgaccatccgcaggccccaactgaggccggcgcatatccttcgccctgcaccgaatggtataagtccgaaatcatttcccttgacatccacatcagtgtgcgtcccaccggggaggaaccgagagggcttgtactctagtgggtcaggccatatggctgggtcacgggcgatcccccacacattgaccagcaactctgcacccttggggatacggtagcctgcgatctcacactcctcagatgccatgcgtggcagcgagagcggtgttgatggatgtagacggaatgtctccttgatgatagcatggaagaaggtgagatgtgatagatccgactctgagaggagcctatcacgacccacaacaacatctagctcctcttgggcgtgcttgaggatatctgggtgtcgaatcagctctgccattgtccactcaactatggttgatgttgtgtctgtgcccgccacgaatagattctgcatagtcagcagaaagacatatgacatcataggatgggtctatataaaaataactaaaatttaatatatgaaaaatggtatataataatatatttataatataaacacattcatgtggcaatgttttcaatatttttataaacatattattaaaaatgataatgtaacatgtattagtagtacttcaaagaggggcggacgggttcctgccttcccggtatggactggcagcatacccaaaatttgcaaaataattttaaaaagcagtatgcagcaataggcctaaatgatcggttggtgcctggtcacaataaataaataaatgccgaaatagagtgcaaggccccgctgcattgtctggactccaccagcacacgaatctatcgggcgtgcacgtgcgtgtatagggttttctctgtatctcatctctcgtcttgtggcacatgcgaagcggcgagcgctgcacaacgggcagtgagatggagtccagcgtagtggtgcagcccacgacacgcaggcacgctatggccgacggtagttgtcaccgccaaccagtcaagtagcaccaacatttactatataactgatctttttattgtggtatccaaaataaaaaatatcttggttggattaagaactggtataagattctttagtaccgattctaaaagtctaactccctagaaacagttttactcatggttaatgttactaatcggtactaaaaatacttctttagtaccggttggtatcaccaaccaaaaataatgctggaggatctttattctctgttggtaatactaacttggactaatgatatttttactaaagatgtctttacgattagattaaaaagaaagcatatttatctaagtcagatgtgtgtactaggtgggatggtaacgcacgtgaggattggggtgagagatcgtaagtttgagtcccacatcccacatatagttttttgacttggtatgcatctttagtacttgttatttcaaccggtactaaagatcgagatctttagtctcgatttgctggttacggctattataaccattatcctaaccagtatagggggtaatcaggcaagttagtaggctcgtagcacagctaattttctagcttttacaattttactttgtttggatgatgcatatttgtgaaatgtgaaatcaataagttacaatgaatcattaatgatggtgcgtgcaagcatttctaagcttaaaaaagtgtttcattaacattgtttcatttctttgtttgtgttatgtaagatatgatctacactactatcactgtttaaaatgaatggtgcttttaggactggaatgttctgtgttagaatgtaagaggcataaattctgatgatgggtggttggctattaggaataagatagaggaaagcggatgtgcatttttttttgtttacatgaaactaagagaagtaattttgatcattccttcattaggaagttcacccctaagcgttttgacaaatttgcttttttccccttctaggggtgcatttgggggtattttggtttgctgaaatagttatgtcttctctgttatgaatatcacaattgaaagttttgttgtccagctcacttttacttctaatgattctagtttatcttggacaatggttactatttatgagccctgtactggtgttgaaaggtctaatttttttggcttggctttatagtctccaaattcctgttggtgatttttggctgttgcttggtgattttaacttctatcgttcagttctaaatagaaataagccaggagcggatatgaatgatatttttctttttaatgaggtcatcagtaatttgggtttagtggaagtccctattaagggcatggcctttacctggagtaacatgcaaaatcaccctcaacttgagcaattggactggtttttcacttctactagttggtcttcctcttttcctaatactttattcaagcctttagctaggtcaacttctgatcataccgcctgtattgtgcagttgttattcctagatcaaatgtgttcaggtttgagaatttataggttgagcatgaaaggttttttgatttagtccaatctatttgggctaatcatggcagttttttggatgctgctagaaatatttcatctaaactcaaagctttaagaaaggggcttataaaatggagtaggaatctatgtaagcttcagaaactcatcacaaaatgtaatgttgtgatctttttttttttgatatcattgaggaatatagagatctcactgtgttggaatggaatttcagagtttttgtcagatctaagttgcttacatacttagaaatataagcaaacatactggaagaaaaggtgtactattagatgggctaaatttggaggggaaaacacaaattttttccatgcaatggcaactgaatcatacaggaagaattctatagctattttggttgatgtggatgggtcaaccctctctgatcatgaggctaaagcccatactgcttggaatgcttttaagatgaggatgggaatttcttgttttgaatgtatgccttttgatctcccttctttaatcccttcacaagacggtttggaaatcctggatgcccccttttctaagaatgaggttgataagcttattaagaatctccctattgatagagctcctgattcggatggttttaatggcctttttattaagaaatgctggcccattatatgtcaagattattataaattatgcgctgattttcattgaggctctctagacttgaatcctttgaatcactctttcatcactttggtgcctaaaaaattgtgtcctgagactataaatcactataggcctatttctcttatggggatttctctgaagattttgacgaagttgttggctggcagattgcagatggtaatcctatcagtaatacatccaaatcaatatagttttataaaagggagaactattcaggattgccttgcttggaattttgagtttcttcatcaatgtcaccactcaagaagggaaatcgttcttttaaagttggactttgagaaagcctttgatactattgaacatgaagctattttgttggtgatgaaagctatggggtttttagaaaatggttaaactggattcagaagatcttttcttctgcttctcttcagttcttctgaatggagttcctagaaagaattttcattgtaggcggggggggg

SEQ ID NO: 4929 - DNA, 3165 bp, Oryza sativa
catttttacatgcgaccaaaagtgaattttacatacggccaatgaaaatcggacttttgcacgcgagcaacgcatcttatgttgtcacctataccggccgcatgcgaaaataaattcggcaaaaaaaaagataaaaataaaaaaccccaaaccctagcccgccgcctgctgttgtcgtctccatcaaagcgctggatctgccacccccaccgcccgctcgtcaccaacatcgcattctccatcccaaccgcccgtcatcgtcgccggcactagaaccacgctgggatgggccaccccgccgtcggatccacgcgggacggcgccacctgaggccgccgagctgcccagccgctgcccactgccgcccgctcccactcggaggagaggagaggagagagagagacatcagtagacggagggggagagagaggatgcgaggtggaaaaaaattgaagtggtgagggaaagagagaggaggggaaaaaactatgaagaagagcaggatactttcacatgcggactaagtaagaggcctgcatgtgaaaatatacttatttttgcatgtggccccttaagagactcgacagtaaaaataaatttttgcatgcggatctcttaagtagctacatgcaaaaatgaaggtcgattttgaagttcccgtacagtaaaattattttttaagtagagatcttactatattgtgatttgcaagtttgtgacttcactaaacagaggacaacaacaaaaataagacttaagagggcacataatttttctacaatctgcaacctgctccaacaagtaatatgacaaatttttcaccaatgttcttttcccaatcacaattctccaccatttaattttttcacccaccttcactttttgtccaatcataaattttccctatttaattttatccaatttcttaataatcgtgtccctataaaaaattcctcaaacagagggagtagtgcagtagtgacgtttggagtgacgcagtttgtattgcgtcatcggccagtgcagcagtgacgtgtggtagccaaacgggttgaaggtttttctttcctccctcttttcaatcatggagtcgttagcgcaggcgcagatcctagctgcggcagccaatggagacctcttgtgatgatatgatgagcacgtacgtaccggatgtcgccgccgccgccacggtggtcggcaccacgcttctcgccttttcttccgcagggcgcggcaccggccggacgctgccgagggcggccacggaccgcttccacaggatggttgtgattattgagcctgtgtgttgttcccgaacaaaattttttcaacctgtcacatctaatgtttagacacgtgtatggagtattaaatatagataaaaaaaactacacatattacgtgtaaattgtgagactcatcttttaagcctaattgtaccatgatttaacaatgtggtgctacagtagatatgtgttaatgacggattaattaggcataataaattcgtctcgcaatttataggcggaatctgtaatttgttttgttattagtctatgtttaacacttcaaatgtgtgtccgtatatccgatatgacacgccaaaactttacaccccctggatctaaacaacctctacatatgagtgtaagcgtgtagttagggttgacgaaacagatgacaatcctttttcagaaaaaaaaactgttcaaatgtaaccaagttatgtcaaaatttaaatattcagtttgatttttttctaacttaaccagtttaaaatgtgctctattgtttttttcttttttgaaatgtaaatttaccgagtggattgtgatcttagaacctccagatttcacaaaactggatggtttctaccagttttgtaaaccctgattgcaacattttgtttcatgtagtaggagtatgcatgtagcacagtgcacagatgattgatggtgcagccgaaaagcgacaggcacaagtgaagtgaatattttctccataatttttttgtatcccatgttattattgatgatggctggtgatgaacaaggctagtcaggccatgtcctcgtgccgctctttctgaaggtctattgccgacgaaaataagtacctactgaagttggagtagaatctgtcgtagtggcattctgaacaagtgttattcgtgcctgttgttgctgcatgttggcctgagattttactcttccaccagcaccagcatgtccgtaatacatcggcgaggttctggagatgagatgccgccctggttgcaactcggcggtgatctgccgacggaattcagaaaggcgtttcctgaccacgtttgcaactcgtgaaaggtgcttcctttcgaatgctttttgttactacctccgtcccaaaataagtgtagccatagatattcgtgtttagcattttgaccatccgtcttatttgtaaaatttataaaaaatattaaaaaaattagtcacacataaagtactattcatgttttatcatctaataacaataaaaatactaatcataatattttttcaaatagaacgaacggtcaaacgttgaacatgaacagtgctaaaactgcacttattttaagacggagggagtacttgttttctttcccctgtcattagtcattacaactgacagatttcctccttttgggatcgtgtgtgaggatttggaacaactgaacaacatgctgatcagatcagcaaggatcaccaattcaccactgtgtcactgcgtgactgtcgcgtgagacgagcaaataaatatagttctcttttgaaaccgaaaaggaaaaatagctcttgtggagttgtgggtaaccgtctccattgaccatgtttttaccgtgcccaaagccaatttctgctgctcctagctagcatcctagcacgacatgtttgcctgtagaaatccagtgacatgtttcacccaattgagggcggattaaggttccaaacttactatacttcgtaacacatgcgttgtcatgttttgtggtggtgccatggtacaagaattaaatttgaaaatatactattcattcaattttttctcagaaatatttcggatgtaaaattttttacataaatataccatcggtctcgcacaaacgttacgcgaaagtgacgtgacaatgacgtcgcggac

SEQ ID NO: 4930 - DNA, 7914 bp, Oryza sativa
taatatggcgcaaggatcatccacatgctcgtttcatagactttttttgatagacggcgtctatctagcaaatccggtctacaccaaacaccaagacgggaaaagactaaaaaatattcttagctctattatacctttgccttgcgccatccaacttggggtcaatgcttgagccaagatcaacacttgtgaccatccgattgaacaatgtttatgccaaggtttttaccatcctttgtcaagactttattctcatcacaagcttgacttcattcttgccaacatgacgatgtcattggcttggttaccattaatccatggtgtcattcattagcctcatcgtagtgggacctattccttttcacatctaaaaggagaacattagtctcaacaaatcgattatcatccttcacttgatgaccaaccggttgcatataaaagatatggatatgtttgttgagaattcattaacatcacaagtgtcatatactcgtatgcaagctcaagtgcaaagatccgatataaataataggtgaacaacatggatctaaaacatgcacaataaatgtataagatttgctccccctaaatatatgcatacaaataaatatacaagagatgcaagtgtatgcataattagagaatgaccaatgggggtttatcctatacacatagagaaggcatatgtagtaatgatgtagaccaacataaaacatataccttcatgatctctatgttctcaatgtaaatgagactaaataagataaggctcgagtaaacattagtctcacacttatatatcaataacatggaaatcatatatatgaacctatcaaaaagtaggagataagaagtggtacatatcgttttatctccatgcatttcatccttgtcatgattaaggtccatcacaatagaatgcatgtcttccacatctcattatcgggaaataacctagtagacaacttatgcaaaagagaggttaatcccataaacattggtttatcatctatcacgaaagtaacaattacacaaattgtttaatccaagatctttcaatcttttctctcttgggtgatggataataacccgatataaacaatatagagagatgggatgaaagatgatttcaaatcaagatagaaatcttataataaataaaatatagaataagctccccctcaagatgtgcatacatatggatataaaggaacacatatgcacataatcaatcaagattaatgagggagctcacactatattttggatccacaagagagaccaagttagaatatgtgaagtttaatacatacatctcatcatttttattttcatatccaaatgagactagtcaaagaaaggctcataaaaacgttagtctcatataattagatttatcattaatcaccaatactaaattaaggtacttgaacttacacctgtccatattcgtagtagtacgatgtgtcatatccacccaagagtaattaagtatatttgtgccaaggtcgcgtccagtccgcagtcgttctaaaagaattagatattgtagtacttaatggaaggctgctaacggaactctagtggtgatagtatttcggacagagctattgtacgatgctattttataaaaacatgtatttatcaatggtatttctaaaatttggatatttgttaatgatatttcttggattttctcttaatttaaattttttataggaatcttgtaaagttacctaaattctaaactcaacgtataaagatgtcacattattgtccactaataattattatatcttaaacactatacaagcatactatattatcaataatttattaaatattagagctatgaaatgcaaatatgttaaattatcatctcacataattcatatatttaaacatatctctccatcattttttataatatcctatatatcctcacttggttaatgttatttctctcttttcttattaaaccgtagcacatcaattgtttctagcctttagatgattaatctatggtctaaattatcttccttatttttttttctctcattaagccatgtcatctcttttttttaaaccctcagatgattaatctatagcccaaattacatctctccttttcttctctcataaagcctgaaagccatatcaccttattatcattctatatactatttaaattatcataaaccatattaatttatgtaagcttatgtcgtctagttattttacacattatttatacttattgctatgatactaaactctcgcagcatcgcgtggggtttcatcatatttttcctataggataatccttcgaatttcctatatatttcaaacatattaaagagaccctataagtcgatttccatggggcttttggagggatacttatcagtgggagttttccttaacacgcctttcggatggaagaaattggttgtaggaaaaaatcaagggaaagtttccttccatgctgatttcacatgaaaaccacaggaaaaattccatccaccccaagctatttttttttcatttgctttgtataagaccgtggaaatcacgcaatcacatagttggtaatccattatcagagcaaaaaccatctcttaagaaaaacaaatcagcacaagaccagagaaacacccatggtcctatggtcggtgggagtttttaacaaggattcagaatttagaggagtggggctattaatattttgtttggttgggagatactccctccattcccccccaaaaaaaaagaggtccaattctaggtatgaatatgaatattagattcatctctagaattggattttttttttatagagggagtagaattggatctttttttttgacagagggagtatgagagtttcttttttgtgaaatatagataaaaaaaattgagggagaaactctctccttttcaatgcgcgggtagagtggtaatgcaacggaataactctatactttgcctaaataaattttagccaacccttttcatttaaagatccaaattcgaactaaacttcttatcagttactaccatctataccaacaaattagaccttaaaaaattaaatttccatattaatcattaattttctcgtctaaactttcaatcattttctctcgagttatctatcatcatcagctactacagctcacaggctgagctggtcacaagctcgagtttgtgttagccggccgccttgcccacgggctgctccactgttcacgccgccggagttcgccacagcccatcgccacgctgccgcttccccgagcgctggagctcatgtagggatgtaagtgggacgggtaagcggattttttagtccgcttatctcacttctagttaatttttttcttatatactactatgtaaaaaataaacaaacaaacggatttttatacgggtagcaggatatccctaacctcatgccgtccggttcgtgttggatttgggggagatgaaggtggtactattagtttgagtggatagcaacgatggggaagaaatcaattactgtgcatttcctttgagactttttcctgtgctctgattgttcttatcctttatattcctctagtttgtatttatttgtttttcattggattttctttcatattcttactttttcctatcttatgttccgaatgagccctcagttgtttaggagaaaagacattaaagaaaaggaagataactctggaatcaatacattttggaggattggcacaagattcctatggaatttttttcctttgaatcctatgaaacgaatacacgaatagtgtttattccagaggaattaagaattttggtgcatatcctccaaacctaaacgtgcatcagatcaaagcaatcgaatggtgaaataaattgccacaagtgtcatcgctgtgaatcaaagcatttccaacaaccatactcgtcaaaccatgcagagatatgattaaatcgcccccatatcctcctgagaagtttatttgactaataactactactagcatgttaactctccagaatcagtgtaatgatagagagtagcaagagctcatgacaaaccacatgtctgcaaacatatttagaccagttcagcacagctgcaagatgcaaatgcttggttcatgaagcaagtaaacatgtttacagcaagaaattgtatagcatctttttttttctgaatcatctactgccaaatgctctttcagaagatcattcaaacaaatggcatacatgggttaaaaaaaaaagaacagatgcttaattaataccttgtgaggcataatataaccctttctggcatgccttgacaaactcctgtatccacagaatcactcccatcctatattttacaagtcactggtatttatagaccttaaggtgcttacaaccatgatgcacattatgtaatttgcagtccaaccatcactcttttggtattctctaggttacaagaccagataaattagcagaacttggtcctgttttggtgagattaatcagaatatgaaaatgccaaggccaaatcagacatgttcttgtaccatgtaatatcatggtggcatgtctttacaatgcactcagcacttgctcacttccttcttttaagatcttcataacagagcttcatgagaatgcacacacttataatacaaatttaaaaagcattatattgtctaagcccatactaaactataaaactaaaagatagccactctctgtctctctgaatccactgtatagttgaatataacaactcaaacttcacgaattcatttacattccaatatatatctaacaactgtacgaaaaagttttcttaaagatgaaaaatgacagaagtaacaagcatggatttacatatcaaaactggatttgctagttgataattttccaagattgattccaagaggagaatattatttattttctttcatcctgaaatttccaacattacaggaaccaaaattaccttagtgcaataaaaaactgttctggaacaaaaagaaccacagcacattgtacctcacgccctcacggcatatgcttggcgtagaatcccaacgtcaagcatatgcctcttgctcatcaaagcgtatggcgtttgctcttgatggtaaggccagcaaaaatacagatgaactcatgagctaccgctttgtttaaacactaaatcatttcacacttctaatccttaatgcatcaatatgtaggtacaatgaaagctataaactcataataaaccaaaacttaatccaagtaaacatcaagaagaattaaccaatccagaacaataatccataataagagccgaaagcaaaccatcccaagcatcttaattatcatactctcgttcctgaacatctgaaatgtcaatggtctgcaaccgctcttcctccggaaccaaacaccaatttggcgactgcactgccctgagccacttaaagtcatcaacattcgcccaattaccggtctcctcctcgagccccgcatccctcaaatcctccccaatcccttcatacttgagagcatgcggcgcgaacctcacgccgcagcaatcctcaatgatcggcctgctcctcaccctcaggtagaaatccgtcgctgtcgcctcgtggatcctgatctggtgcgccgccatcacgaatgcgcagcgctcgacgtcctctatgagcaccgagccgaacacggcgcccacgaacacgcggcaatccttcagcttgtgaacgtgcagcgcccggcatttgcccttgaggtaaacctgacaggagacgagatcagcgagggtgaaatccccatccttctcgtcggagaccctcagatccttcaccaatgtggcgtccctccggccccggaacccgagtcctggcaggatcgcctcgacgctggggtttggctggtctggaggcggcggcaaggtgggaggaggatcttgcggtgggttcttgggggctttgctcttgttcctgaaggagaaggacttcttggggcggagatcggaggcggcgagcctgtgggcggcgcggaggtcggaggcggcggcgagggcggagcggagctcgtagggtgggagggagtgggaggcctcggcgacgaggcggtcgaggtcgtcgatggccgcggcggcggcggaaagcgagggctgcgcgtcgtcgggggaggagcggcaggcggagagggcggactcggcggcgagcttggcggcggcgaagcgggagaggaaggccgcgacgggggagtcctgggacggggcgggggcggcagcgcgcttggagaggcgctccagcatggccaggtgcttgcggtggccggcggcggcggcggaggtggagggtttggtgtggtcgggctccggctccatctcggcggcggcggcggcggcggtggatggcatcgggggagagcaaacagaagtggtttcgctactgagaaaatggtctgacttaatttagtagcaggtttaataaatttcgttgaattccaaattggaactttgacgaatttcgtgaaatttgagcggtttagagggagaattttcagaatataccacccaatacgcactgcttccagaatttatcacccaattcacattactttcggaatatacatcactagagtgtgaattttcttcgttctgtaccactccgtcccctggcgtcagtcgtgtcgtcgtcctccgtcctcccggcgccaccgtcgtcagtccgccgccgctcgcgcccgcatcagctgcgccgtcgcttatccattgccgctggcgtcagccccaccatcgcccgtccgtcgctgcccgcgttagccgcgccgtcgaccattcgtcgccaccatcggcgcacgcggtgaagggccggaggagaggggagcagcgggggagggcggagggcgtcgagctctggcggctcgaggctgcggtgccggaggttggactggcgatggctcggggcgccatggcggcagccggagcggcgacggctgagctcggggacgacacgagcgagctcgccagatgcgtgcgggcaaacggcgcgtgggggaggaggagctcgccggcgtgggggaggatgagcttgctagcggccagattgaaagcagtgcatattgggtggtatattatgaaaattctcgttcagaggagctacaaaatcccgaatattaggggacgaaattgtggaccctacctcggactcgtgtagtctgtttagcggggcacccgaaattttggctgtaaattaataacgtgaataaatcaaaattaaactataataccatcatttggaattatcgacgggttatatccgcagacggtatttgtatagtataagaatggttgaaaccagggtataagcagaggtaaccgagatgggagacatagatttttatataagtttggtttccttaactgacaggtaataaccctactcattttggccaaaatcggtgtcttttatatatcggtatcacacgagtagatgtttgaaatgacctaatctggactttgttgacttggcgtcatagaggtctcacacctagtcgacagctagtgtactcttattcctcgaacatgaactcggtgagattgaaggtagttatagatccctcatgtctagctatgtggctgctacattgggtttgtctagataggtatttgcctctgttggcgtgtcccctcttttttttaggaggtcttgtatttatagtgaagattatcttcctctcccagtagaactcggagaaatataacaagatacgaactaagaaaactttatctttcccgattaggactctaacaccttatattccgagaagataatttccttttttatccgtgtatactattaggtatgttattttcatataccgtgaacccacatatatagaggaggtatgctttat

SEQ ID NO: 4931 - DNA, 1302 bp, Oryza sativa
ttgacgatgctgtgcaagtattcgacatgatgccagcgcaggacgccatagcatggacagcactcatctctgggcatgagcagaatggggaggaggagatcgctctcgagctttttgaaaggatgacaggtgagggggtagtgccaaccccctttgccctcgtgtcatgtctgggtgcgtgcgccaaggttggtcttgtcgcccgagggaaggaagtgcatggcttcatcttgcgcaggagcatcggttcagaccctttcaacgttttcatccacaatgcccttattgacatgtattccaagtgtggcgacatggtagcggccatggcggtgtttgacaggatgcttgagagggacatcatctcttggaactccatggtgacagggttctcgcacaatggccagggaaagcagtcacttgcagtgtttgagaggatgcttaaagatgaagtacaaccaacctatgtcacttttctcgctgtcctcacagcttgcagccatgctggtctagtctctgatggccgccggattcttgaatcaatgcaggaccatggtgttgaaccaagagctgaacactacgccgctttcattgatgctcttggtcggaatcgccagctggaagaagcaagtgagttcatcaaaggcttgtcctccaagatcggtctgggtacaactgggtcatggggggccctccttggtgcatgtcatgttcatggcaatattgagatcgcggaagaagttgccgaggccctgttccagttggagcctgagaacagtggtcggtatgtcatgttgtcaaacatatactcagcagcaggacagtgggacgatgcccgccaggtcagggctctcatgaaggggaaaggattgaggaaggaccaagcttatagttggatagaggtgcagagagaaaaacacatgttcgtcgccgatgacacatctcaccatgaggcgaatgaaatatatgagatgctggacaagctttttcatcacgtgctcggggtaatgttgaggacaagcatggcaattttgttttgtgctgaaagatacatcctctggaatgaaacaattgctttagcattgcaagaacaaggccattggtctcaggcatgagggatgaagcccactgatttgccttcagcatccttggtatggcagattggtggtgtgtttcaaggatgctgcaaaggagcgtcagagtccaaaatgtggttattgtgtttctttgagattgcaatcacaaataaactcgtacgattttgattcgtttggaacttggcatcctgaaggatcaatttttcac

SEQ ID NO: 4932 - DNA, 10035 bp, Oryza sativa
tcttagatgggctttaaaaatggcccactatgttgtgataaacatgacacggattacgtgagttttaaatgtggcccacaacgttaaacttgggacacgattacactgcacagtgcacgagcgactacttcatcccacgtgacatataaatcctcctttaccatatagaaatagcaataaacacttatatcgatcggtcattaattagtgtatctttctttgaaacctcttttgatgtcttatatctttcaaaccatatattatttttaagatctttttcactgttgtactctgctcaaaatatatgacaaaacaagttcaatgttgaatatattctaaagtaatttatttaaattgcaaaagtaacttaactatgcaatagaagtaactctttatagcactagaagtaattacactgtgagtgtgagtgagttgaaataagaaactatgtggagtaaatccacaaacaaagttagagaagattttcaagtaaatacatatattctttatctaaactaatctctattttatttttctaaaaataaaatcttgcgtcatatagaaagtaactcttcacgatattaaaagtaattacactactggagagaagtaaattttaaagaaatagaagtaactcttcataatattagaagtaaatacactcctagaggaaagtaactatagaaaaataaaatagaaataacttcaaagtattagaagtaagtacacagcttgagaaaattaacttttcatggcgttagaagtaactacacactaactacacttctagagtagctacgaaataaaaataatttgaatatattcaatattagactcattttgccacattttttaagtagagcataatggttcaaacgtatgttaaaaataatataccgtcatagaaatataggtaatcaaagattctatggtaagaaaatatactagtgttgttagcctctgtagcatgtacgtaaattgatatgacaactagcagatcatctggtcctatttttctggttagtggtctcgtttctctatcttggtcaggacaatatccatgtgttcgtatctcagccatcatcaacgaattggtcaagataactactttcaatgctttataggtagttacttctattgcgaagctaagttacttctacgatttaagtaaattactttaaatgtttgaatatatttagtattggactcattttatcatctattttgagtagaggatgatggttcaaacgaaagtgaaaaataatgtggtttaaaatgcataagccatcaaaggtattgttaaaaaaagaattggctagtgtaaccaatctttagttttgatggatggtggtgcatagatttctcgctttgatgccattgcagtggaagcaagcatgtcgctccgatagcaccaagacacggatggatggttgtcggacgagtcgcgcgataatacaaaactgagagcgttttcgatttagatttcccataaacttataccattaactagaattttttttaaaaaaatgtgggagctttcgggtccaattagcataggtttagatagatgttttctcaaatccaacattcttctatggtcccgtatccacaaactaacctcaagttcaacttagttctgaacctcttagtactagctttcaataaaagataaattttctaacataatatttggaatgacatgttttagcctaaggccgcccgcatgtaatacttactacttcggtacggtaagggtgtgctatatatgtttgtcctagacatttttttccctgaacgcgcgaaaacttgcatgtcaatatattagcaagagagaaaatattgtacaacggcgatattccgaagtggtcacgagggagggttttacacgaggagaagggagagtaaggctaaggtaagctaggtaaaaacaggtcccgaacaataaaaatagctggaaaatgaaaaaaaaaagaaacggggactaaagtaacatattaacgcttacctgctagtttttgtaagttcctcttgaatttagcccgtttctcttcctgcttgaactgccccggaaaaatagacagaatccttcctggaagattggaagtagacagaatcaggcgtcctggccattagtccattacctccatacgagagtctccatgaccagttgagagaggctctctgtccaaccaatgctctgttactttcatctgtaaagatgaaagggaatttcattgctggagactgctccatcttccatggaatccctcaattcagtgccacccattcgtcactgctgatccactccttctctatttccttgctgtgaagcagtccgctgatctgtttttgcactgcatacgcttcgctgaagctggaactcgatcaacctgctacctctaggactaggagtactccgaccatggccactccgactaacagcgatcacctccggtttgccgagcaaactgtaagcctctctgtaacctttccagtgcgtcgatctcccactccagcaactgccatatatatctccgatttctcctagctttcctgtagcactgcatcctgagctccagagtccataaacgcttgctcatttcctctctttccatacgcctgcagcttgatcaccggtgccattgcatgaacacacgctctctctctctctctctcaagagtttgcccaggtgtttgtgtgtagaaattctacagaagacccggtgctcaaaggttgtgcatacactgatatagacgtctatatggtgtgcaaaccattttataggaaacaaggtagcacacgttcatgcgaacgccgttttttcatcttgactttccgcgatcggtcacggcggcaagatacaggcaaaagccaaaatggaatgtgccaaccgatcgacaaataattcaacaagcagaatttccgcgaagcaacacaaaatgcgggacatgcaagcaaagcgtaccttgatgcatcttccgggaagtttcgttgtagcttgctcgagagaaaaaaatctcccgtaattctttgcgaaattagctctgttgattttcgcagaagcttcgccaggggaaatttctgtccagctgattcccatgggaggtgttggtgtcggccggcggcaagaaatcgttgcttacttctccgtaaaaaaaaagaaaaaaaaagatgtgaccctttatagtttgtccagattactatggctgtgtttagatccaaacttctaactttttccatcacatcaacctgtcgtacacacacaacttttcagtcacatcatatcaatttcaacccaaacttccaactttggaagaaactaaatacagcctatattaggagagatcatattcctttataggttgttttttggacggagagagtacgtttgatggtgacgtatttacattttaagggttcattcagattgttgctaaagtaaaccttatcaaaatttaacaatagcaaaattttggcaaattaataatattgtcaaaattttagtaagattggcttaataatatagccaaaattccatacacatttataatatttagtaactaaatataaccacgtaattattaattttactaaataatgttatggttgaaaatatcatcaatcgaaacagctcctaaaaacctctgtatacagtatactggaccgatatgcaatggatttatgggggcagatcgccacagcccaccggcctagtgagcttcggcgaccgtgcctaaccaaaactcatgtcctttctaaaggactttggcgttgttaggccttgttcagatcccacagaaaaaaatttacaccccgtcacatcgaacgttttaacatctgtataaagtattaaatatatactaaaaataactaattacacaaattgcgattaatttgtgagacgaatcttttgagtctaattgctccatgatttgacagtgtggtgctacagtaaacatttgttaataatggattaattagacttaataaattcatctcacggtttactgacagattctgtaattagtttttttattagtacccgaatatcccatacgacaacctatataccccagatccaaacaccgcccttaattcgtcgacccaagccaaaccaacacggtcccgatcaaacccaaacttgggccttctagcaccacaaaaggaataagtccagtttacctccctcaactcatggccgtgtatgaatagtatccctcaaccacaaaaccggatataacctatcccccaactctgaaaaccgttgcaaatcaactccccaagcagttttggaggcggttttgtcctacatggcaattgacttgcttacgtggcagttgacttgctgagtcatcaagcaggacccacacgtcagcagtcttcaactcatctcttctccctcaccatgattcccttcaagaaacgggaaaggaaaaaaatcaagaagcggaggcgaggcgatataatcgagcagcaagatcaacggcaagacaagtagcacatggtggttgccgaattcagagaagacgccggcaatcacgtgaaacaagaaaggggaacgaacagaacaaatcagagaccacgaaatcgtcgaagaacacgagcaaacagcaaacaagctagcggagttcttctaacgtgcgcgcgacgcggagcgggtgtccgccatgcacagctgcgggcaatgccgccgtcgtccccgtgccggagcctctccgtcctcatgctgcagtacaacccgacgctcggcgacatccccagtggcttccttcttggacggccggcgagctcctgccccgtgcgcggccggccgacgagatcctcctcgcgcgaggacggccggcgagatcctccccgcgcgcggacggccggcgagctccttcccgcgcgaggactgccggcgagatcctccacacgcgcggacggccggcgacttggaggggctgcctcgtcctcacgacctcctctcagatgatgccccggcgccctcccgcctcctctgcgtgctcgagccgagccgctcccccgcgcgcggcgcggccagccgacgagctcgtcccccgtgcgccgtcgtcgccgccctgctgatagaaggtcagaaggtgagaggaggaagatatgaaagagaaaggggaacagatgagggagaagatgagatgaggtggagactgctgacatgtaggtcccatttgatgactcagcaagtcaactgccacgtaagcaagtcaattgccatgtaggataaaaccacctccaaaaccgtccggggagttgatttgtaacggttttcggagttgggggatgggttatacccggttttgcggttgagggatgctattcatacacggccatgagttgagggaggaaaaatggacttattccaccacaaaatgaccttacgatttgtgcgttaaacgtcgccggccgaggatagcctgctatcacggcctcacgggccgacagcgcggccgcacgtagggcccaaaagtgacggcggtgacgcctctgtacgtgcatgggccgatgggcgacgtcgcagtcaatctatctgcccgtatttcaagccccagtcgctgttgtcgtggcctagtcggcgtagtgactggcggctgctgcctgcttgactgcttctgcatccgtagaggccatagcgggagtcagattggaacagcagcaccgtgtcacgactcacgagccatgtgtgctgtgtgtgtgagaatgacatatggtacactgatatctgatcaggttcaaaatttcagtacgaaatttcggtcatatcggaaccctcccccctccccatatattattattcactgaaatttttaaattttgaaaatttcgtctatcgataccctccgatagaaatgtccaaaccaaaagatttaatcctgtagctgatgggtgatatgagtattccacatttccattattccctaggatctgatgttagctgaggtcgatcttttttctgcgcgctggctgttatctctttcctttctcgtcaaatatactgattaaaatttaagaactctgtactggcggatgctctaattttctagcactactacttgtagtggaacgtacgtactactctattagttcagtcaggctccttgtgtggacattgagagtttttttttttactaaagagagtttttttttaatcgactaattccaccttaaagatataaacaaataacctactcgtccattatggcaaatatgaccgtgacgtggatgcgactattctacgagtgcggagaactaccccttcggaagtgataagcatgcatgccacagaaacagaatggtcggcttccagaaggaaaaaagtggagagcagatttggcacatttgcgctttccgacgcctttgctgcgcgactcgttcttcctccgtgagttccaagcaaggcctcaggcagtggcggagctataaattttaccctgtgggatcgaatagcattggtttatattttagtgagatcatttttataaaattcaatggatttacatgtaaaatgaatttacatgtaaaatatagattaataagtgccactgccatcaacatacctccgccaccggccgcactgacctgtatatgcagggttgctcatgcacaaagtcaagggaacctcttaatactagccttcaatagaagataaattttctatcataatatttgacctagacatttttttttccttcaacgcgcgaaaccttgcatgtcaatatataccttgaacgcgtcaaaccttaaatgttactccgtattagagcaaggataatagtagagctcacttcctactattagcccatcttaaagccaacatatataatagattagctataaggttggctacaattttcttctcctctctctatctctcacctgtgcatttaatgtatttacatataagtttgtgttaagctagttcttgcatgagagccaacatccttgatattttgttatctctcttcacataagtttatagtagacttatagctcactgttatacttgctcttagcaagagagaacccaccgcacgtctccgtcatagctaccaccggccggtgtagcccgctttatccagtcctctcctgggcccaatctggtttggaatctatcgattatcggatccggcaacatcaccgatcacatggttccacctccgcacgcgacggcccgacccctccgagacggctgcgcctgtccgtgtcccgcctacgaattgccgccacgccgatcctttgcgccacagagtaatacagagggaggtgggaaggaacacacaagtgtgcttgatatcgaattccgcagccgcgatggccggtgttgttccgatgatcatcgttctggcgatgggcggcggcgcgctgggcgggcccgaggcgctccgcctcttgctcaccttcgccggccggagccccctcgtcgacatcggcatcgtcgtcttcgtcatcgccgcgctcgccgcgccggcgctcggcaccatgcttcttgcgtgcttctaccgcacgccgcgcggcgcaagaggtgcggcggcggcggccgctgacctcttagccaagatgacgctggcggtgtccatggcggtagcgctcctcgtctccgcgtccctgctcgtcctgccgctgttccagtccgggaacgtcgtcgtcggtcttctcgcgctcgccgttcccgccttcgtcgtaggcgccagcgccgcgcgcgtccgcggcgtcgcgcatctccgcagggcgcgcaatgcctccggcgcggtgacggacgcggggcgcgccgccgtgacgaccctgacggtgtccctcgccgccgtatgcatcctcctcggctcttgcgtcgcggtcggcggcctcgacgcgcaccacctcttcacctccttcgccttgaagaacccaatcatccacgcgcccaccggcgtcgccaccgccgccgtcgtcggcaccacgcttctcgccctcttcttccgcaaggcgcaaaatgcggcggccgcggccgcggccgctgccccactaccggccacggagcgcgccgccaagattatctcggacggtgccaatcccggcggcggctgcacgtgaaggttcccgcgccgcgagcccgcgacgcggccaccgtgtactacctggagtctggaatcaccgtactgtcatcgcagtcgtgcagtgcagagtgtagtcctgtaatgctaatactcatgctcagctcgtgcagatggggaacgtgactgcgtgagctattgtgatgttttaattgttgattcgttctgtattcaggtgagataattaacagtgaagtttcagaaactcatactcaccttttttttatttcatccgcttggctcacatttttttctttcctctgtcttccaagtggtcgacattacgacagttgttcgtgcgttattccctacctgaacatcttgtttagtatttatagtatgaaaatgcacgagttctttcttgtgttcactagttctcctgtttcttttgctagataggcatatacctgtattttgtatgttctccatgtggacttttggggatttgggagcagagcaccgaccggttttgttaagtactcccagtaacagactggcagttgtaaaatattgagcgtgtcatggcggccttgggggtggggggggatgtggatcctctgacataacgtcaggtgactttgtgtcacttacatgtgggtctatctcactataggcccacatgtcagtgacacaaaatcagggtaaggtatgttagagaatcttgttccgtcgggtgtcatatattgtgagagttgttgctagttggtacaatgcgattgttgtagagtgattgcagcacgaaaccacaaaaacagccactttgattgtcaagctgagtcaaattccatgatttgggaaatcgtgaaatgcgtcaatccaaacaaaagaaaagttgtgatggcaatattatgttgcagacggacagccaaaatgcgcaaactaagtgaattccactccgtgtgaccctttttgttatgggatcacgaagattgttgatgatgaaccaccacgtaataagtgcacgaagtgtttccagtgcaaagacgtctacggttttccagtgcacgaagtgtttgcccggttagaacgtccttaatctttctcaaaaaccgttgacgtgtatggatatatacgttcaggctaattcagctcatgaacaactaatgggccgtagctcggtgttaccctgaaaggaataagttcacttcatgaccctcaaaagtgatcgaaatctaaaccatgaccctaaactacaaaaccggatatctcgacccccaaactcctaaaaccggtgcaatttgactccctggacggttttgggaggcggttttgctgacgtggcgcctacgtggcaatattgaccgagttgttgttacacgtggcgttgacgtggcacctacgtggcggtagaaataaaaaatatgcgtgggacccgtttgtcattcacacacataaaaaatgtggggcccactgacatgtgggccccacatgtcatcctccttccttcttcctcctccctctctcccttctctctctctcccttgttcaccctcggccggcggcggggcatgggctgcggtgtggtggcggccggtgggagctgaagcgccggcggcagcaggagctagctggagcgggttctggagcgccgccggcgtggtggacggaggtggcgcaaggagctcgtcccctgggtcaacggcaacggacctcggcgcgacgaagaggcggtcgccccccttcgacggtggcggcggtcccccgagtggaggagtcgacgatggcgaggctagcgcttggcgagatggggtcggcgtcgtggaggaagtcgaccggcgggggttgcccttggcatcgtcgatggccgaagacggaggcgaaggtcgaaggcggcggtccacgcggtcgaagccggcggcgcagccgtgccggggtggaagagggaggcagccacttggggccgttgcgagacgagcaggacggcgg

SEQ ID NO: 4933 - DNA, 4995 bp, Oryza sativa
  unsure (1)..(4995): unsure at all n locations
acattatagagtgctccatttgatctgtttatcattttctggcctcagtgcccatgacatgtattttggtgttacttaatccattgctttttccctgcatttgtttgctgtcttttttttttctgttattgggtttcattcgctaagcaaccccccaaaatcattaggctatttaccacgtgactacacatgctttcaaatgaatgcagagtcaatttttggtgcactagttcttgactcttggtttggcatatgaaacttctaaagcagacacttgcatcatgttactttatttagcaaacaattggttctgttactacttctgagtttcagtcatctgaatattggttgattactcaatcactgtgcagtaatacctatacattaaaaacacaaatactccagcagtatgtagattattttcgtgcactgaattctctggcatagtaggcaaagggaagagcaatagtcacttgtgttagtcatactgtttttaagtccttgtttaggtgttttagcatccgctcccctcctctcttttgctctattaacagaaagaaaggggaaaaagttccaggtctgaaattttcagtacatctctgtactatcccaactctcttatgcctttggacagagcattttcattactatggaacatggtggatatattttctccttcttgatcttgctaataatgttatgggttaggtatttccttttgaatggtaaaggtgaaaaaattgaggagcagactggcactatcaggacaaattgtgtcgattgcttagatcgcaccaatgtaactcaggtatatactgtcaagtatagtttttgttgcacgtcaaatttaattgtagatattgtgaacacttatggttactggataatttacctaccatgttgcactgtantacctaattcttgatagtttctcttccttcttttgagatctgtgtggaagacaatgtttttttaaataagtggcattgctctttttttagactattacaaacctagatgtgctgccagatagatctacaacctgagttaacttgtcattttgcagtgggttgtctcattggatttatctaaatcaaatccaaactgttggacttaatatatattgatgtacccttaaggactggcttgagttactttgatttgctggttgatgtattctagaacagaacctattgactgatgtagtaagatcacatgcctcaaagggaaaagccacttcagttactcctaagtatctaattgcagtcaagtagactaggttaacttcaaagtataatacttaatacttatccatcgtttatttatgtcttatttccccctcttccgtggagttttcactttaccagaattctgattatcaatatgatgactaaacagagcatgattggaggaaagatactagaaaaccaacttcagcgaataggggttctcggtgttaatgatacgataagcaaccatccagcttttgatgcaaaatacaaagtttgtgagttgttcatgttcactaaccctggttcttcttgtttgtattcctcatgcttgtttgtatctcctatgcttcttcttgatgcaaaatactcttgttcagtatgggccaaccatggagattcaataagcactcagtactctggaactccggcattgaagggcgattttgttcggtaattcctaaatagaaaaactgccttttcttcatttccaaagtgcagcacatttactggaacagtgttactggaagttcatggtgaacagtattactggaagttccttctttgttatcaagagaaagaactacttccagcttacatcagaaaaggaaaatcatagtgattgttatcaccttgagtctgttcacatctgagccacttatgttttgtgtggaacttggaagttttaagagtttcaatgggctatcatgaagttgatgtccttttactattcttgctgaaatgtctccatacttgtgggcaaccaaataccctatgggttgtaactgatttccagcatgctaataaccatcagtgaaaaaaggcctaagatagttccagatcccatgacgggctaacattactaagtagtatacatgctcttttggggcactcataagtttgtgctgctaaatttatgctcgtttttctttcatattctgatattgacaaataaaatgcggcagcataatttattacttgtttgtttgttcccatatttaacaattgtttttgttttattaggtatgggaagagaagtacccagggaattctgaatgatctgtggaattcacttgctagatactacttgaataactttgcagatggcactaaacaggtaaatgactgactttgcatgaaaatcaataaatcagaatgaccaaaacaatgaaccccattcaccgctaatatgccagcttattttcttgtgaatttctcacttaatcgtgatagaccattagtcatgcaaacatcctcaagcaatagtaagcattgcttttggatattggtagtgcattggaatgttttacgtggtcactcatttgccatttcaccagccctagaaaaatttaaaccaagctagagcattgccttattatttttctgttgttttttataggatgccatggatctacttcaaggacattacattatatctgttagccgcgacatggcaggtccaagcaaagcaggacttctagagaattatgcggtgggtacatttttgctgtagtgtataattgctcttttatactgacacatgaattgctactgggaaagccttctttgttaccctgtcaaacacttacgactaggcacatgtgcgtaggaacttactctatggtctgtatgtatgagaaactgttggatcagttatggactgtattttgtatctttctccaatgggataaagctcttaattgcacaattcttattttgcagtccttccgccttgcttttgcattggttatgggagctcttatgttcatgatgatgtcactaagacaaggtaagatttctgtgactgttgaagcagacacagtggagtatatttaacaattgttttcttaacagatatttttcttaggtttatttgcaccgtgtcaggcagcatttcctctgctctctgtgcatattacattacacaaagaactctctcttacaattcttggttcctttaggttcacccatctgcaaaataattttgctatatattgttgccagttttttagtatgcaaccttttcttcgctctgatgtcatgcccagtgcgatttgcaaggcatagttgtgcacgaaagatgggagactttgtccaggtcctgactcctgacaaggagtgacattgctggtaatcaagaagtaacagaaaaaaagcaagtacaaagagagatgcacttaggcagttaggaatggaggaggacaagtgacaaggatatacatatttcttccttaatttattgatggtcactgatccttgtttaggatcacacttccaagcccaaacatggatacctaacacaagtcccatttctggtcgtaactcacctaatatatcccactttcctatatctcaaaaactcaaactcagtaaacaagatagctagtcataaaattcaaatccaagttacttggatttctgctgatatgatgctatgctacgcttgtaaaactgaaaaaaagtaaagttgcataggctaatactgctgggtgctgactattttttcttcttttgcatgttgcaaaacatgagaggtaaggtggtttagaacgttggggcttatttacattggttttgatagcatgactgaaatttgaaccgctcttataattgaggatggcattggacatgtatcacagttgagtaaaataaatttgtttcaagttataaccatccgaatacatatgtactttctcaaagaagattttggagtcacattctatttttactatataatgggaatatatgtgcagctaattaactgcttcaatatctctgcagccaggaatgatgttcgccatttagtgttgtcacttctatgggctggtctttgcattggcatcacacattttgtcagagccaatggtcgggtgttcaccaacagacctcgtttttatcagtcgcgccattgaagcaaaacaaccactttacacggacactgagctgcctcataggttatcatttttcatcagacagtcagcaccttgtttcatatgaagatatattggtcgcattttttgctgggaatttgaccctcccctatattgtaatgagttttattttccatttttgtaacaagtttttttttccttttccttctcattgttttgatttccagccatcttttggggcatcacgttcacgattctgtttgacttagcagtatataattcaatacacctcctgtacactgtttcatcgacaacaactatatttgacatatttttcttgcaaggattaattatgttcaaattccagaatggattactgatcagtaaaaaatatgttggcacagtttttcaagatccagagattttgtggtatctgcacctgtgcccccctttttacataattcgctatgtatccagagctatcagtcagttccatttcaagcttatgtctggaatacttgtaaatacttcaagcttatgttccatcgttatctcatttgtgccttagctgtagatatctcatttgtaactgaggcatgctaatctgacttgaaactcaattccaacgaccatttgtgcactgcacaaccttcaatcaatgagccatttatttttttcattgccttgtgcctaacagctgaagcattgcatccttttcccttctttgtgacactaggcattgcaagattgtgtcagtactcacttagtaacttcattcttgcatgtgactaggtaggtatgtatatgttgtttttgcaccttttgcacacaaattttgacaatttgaccctttgcaaaaactatttttacaaatg

SEQ ID NO: 4934 - DNA, 7068 bp, Oryza sativa
tcgtttgacgagacttctaaaaattataaaaaataaaacccaacaagacaataaactctaaaaacaacaaggcccaatttttaaaggtttggaacttctgaaaagtaaaaaaaaaccaatgataatcatgttcgatttttaaatctcaatgataataaagaagggaggcagcgggcgagccatagataagtacaatggcagagccactaacggtttggtgggacttctagaaagtaaaaaatgaactcgaacgataattatgtttgatttttaaaatcccaatgacaataaaaaaaattggacgggccgtagaggcgtataatggtaacgtttgacgggacttctagaaattataaaaagaaacccaacatgacaataaactctagaaactataagattcaatttttaaaggatccaaggagaatgaatagaaatagtgatagatcgagcaagcaaataaagaaggagatgacagaagtaaggggaagcaactggtgtgacttttaaaatctatataattagaaacacgaggatgataaggtttggtcttttaaaatcttaagacaacgagatagctatttaataaattttaagtaaagttatagtaaaaagtatatgattttgtttgggtgctagccgcgcaattgcgcgggccacccagctagttaggtacatgacatagtgatcactaaattaaagatgaaattaagggagggtatttttttcctttatcaaaattccaacgtttttcatatttttacctcaatttttttttaaaaaattcaatgggttttaggtatataaacaaatccattgaaaaaaaattagatggatagatttgtggagctacggatatccagtttaaaaaaatcatggatccaaaactattagaatctaatgggcagtcgtgactcagttgctggatacatatggatatatacatggcactaatatttgggggtatagtagactgaaccctacatattaatggttttatcggaagaatgtaattaattataaacagtagaagatattccataaatatttatggtatagcagaatactttatttttttataatccctaaaaaatggattttgatcggaaaaaagtacttcgcataaatatgaactgttttgattttgcgaagtgtctttcataaacttttaggaatcagtagcaaaaggttttttttttcgtgttagaatatatttttattagcattggaacatggccaaattgcattctataggacgcttgttccttttgaaagggagcgaacacaaatacactaatcgaacataacagaaggttaggagtagaaagatattgttcagttctgatttctcggatgatcgagaaaaagtagagtggacagctgtgatgcttgagagatgataaaacccagttaatcgtgaactatatacgtatgttcatctcgaggactgcaattttgctgccatggacctgcagattgtttggaaacttggagaagctgtggtgccatcactgaattaacgtgagtagtagctgatacatctcttgtacagatgggagcaccatgccggtcaactggtgccacatcattatacgatgatttcgattttaccgacagcggagaaaaaagaggagaggatggagggtggccgtgcccatagtaagatggaagggatcggagtttgtttttatgtgttagagataacatcttatcattaaaaataatgggtccaccaatttaaatgacaatcgaaggttagatttatttttcttcttcttataatttttagtattttttctaatttattaaaatgtcacatgacaatctaggagcgtttgtaggaatcccacgtggtggcatgagagcgtttataggaaatttaatggacttttagtatataaagatagatatttttttcaaattacacagcgctcccatggaaagtcgaacccaggacctcaggtgctactgaagctcttataaccaattacaggctctttcgcatattgagtattagtatgagtatgagtattaagtatattaatactcaatatttaaagtgttgcatctattgtttaaggttatcttttttacatattgaggatgctcttatgtatgtttaggccgaattcggtatatatctaattaatcataaccatatctttactgttcattttgaagaggtttttttatatataaatgtaagtcatgtctgaacacaggaatcagcaattattcgatgtaaatcacacaaggggtgtgtttagttcacgttaaaattggaattggaatgatgtgatggaaaagtgttgggaagtctatgtgtgtagaaaaattttgatgtgatgaaaaagttaaaagttcgaagaaaaagtttagaactaaacgaggccgccaagatgctaactagttcgatgaattggatcgcctatgaaaccctagcaaccgtgacacagcaaataaagatacgagaaggatatggatgcatggatgttggatggtggacacccactgggcagtgggcactggcatcttgacacgcaggtgggtgatcatgtgtcagcgaaaaattccattggaaagttgagacaattttgaattctatgtaagggtgtgtttaggtcgcgaaaaaaaaaaattgagtggtaaatcggtagtttgaccggatgttggaaagaggttttcggacatgaataaaaaaactaatttcataactcgtctataaaccgtgagatgaatttattaattaggtctgtaaacagtttacatatgtgagttaatgtagcacttattactaatcatagactaattaggctcaaaagattcgtctcacgattttcatgcaaattgtgtaattattttttatctatatttaatgcttctatgtatgtatctaaaaatttgatgtgatgtttttgaaaaaaaaaaactaaataaggcctaaatcaagatttcaatgtcacacagtgtgcagtcagtactcagctggagcacgtactggtgcctggtggaccgattaggaaaagaaaaggacgaaaaaaaggtttagcactgtgaccgtgaggagcatcagcaatggtatctcagacccgtatccctgctcacggcgtcggcgtcccgtttctgagccgtctcccagcgtgggtgcgcgtttgctcgcagagggacgtgcccctcgctcacttttcgctgagacacggcacgagggcgcgtgttggctaggcgtgtgtcccgtggacactgctccctcccccaaatttccccttccacccctcgccgcagcgcctggacacccctctcccatatttccccttccacttccgctccctcccatggacatcgaggcttcgcctagagaagcttctagaagctccggtggggaagccacctcgagcgacacgcggcggcgggcagagctggagaggtggggcatggcggcggcgtagaccccgcgacggagacgacagccatgacccggcgacgacctcgcgatggagacgacggcgatgaccctgcgacggcggcgacggcgcccccgaccagatctggccaccgctccccgtgcgccgctcgctgcgggaaggttggcgacggcggcggcgggaaggttcgcgacgatgtgatgggcggcgctggcgacggcgcgacgggcgccgacggcgcccccgaccagacctgtccaccgccccccgtgcgctgctcgctgcgggaaggttggcgacgacggcggtggggcggccacggcagaggatgaacgcgcgggcggagaagacgaacacgcagaggaggatggggactggggagaaatggggaaatagggaatggctagtggtgatgggtgggctgagtaaatgagagagagaagaggctaggggtagggagggaaataatacctgtggctatatggggtgaagcaacccgttgtgggctgaagtagtcttatcctgttgcctaagattgtgaagaacctagctacaagtatcctccattgcaagatgggtgccctatggagtggcttcggttagtgagggcacccatagagtgtctttgattgctgatgccctaaggccatgtacaacgcatgtcttcggctcgtagccctagcgacgtcgttcggttgctgtcacttttcaataagcagagagacacggcgtatctgtgagcagagaagacgtgtctccctgcgctcctcgactcctccccgatccacaacccatggctccgtgttgagcgatgccgtggccacgcctccttcttgtggtcccggctcccgcagggtatttttccctttcactctcggcggcgcggtgaggagaggctggaggcgatggactcaacaacgcgttggggcggagtcagtggagcggaggggcggagttggtggcaaggtagggaggggtaggaggcgtgacccaccagatctggcggcgacgaacagaaggtgagagaggtaggggtgggcagaataagaccgaaccgagaaaaccaatgccgagaaattaggtctcaactagtgaaagatcaaaatttattcgctcaattcgatcagtggcatccatcaccgcctctgcctccatcaccgcggccatccaaaactacaacgcaccagggctatcttctacaatggcaagctatctcggcgaaggcactgcgttgcaaagaatgcaaatgcatcagaccaagaatgcatatgaatcgacggaacaacatatatatgcatgatcaaaagtgattgcacgatttatatatctgtgtgaacggcaagacgattcattttttacaagggaaaaatggcatggcatggtgacatctacggagaaatcgttgaaaaataagcaccaaatacaaatttaatggcttaagaatcgacgcccgaagtttcgtcgaagctgccttcgttgaaaattggacgccgacacctgcactggcgaagtttcgcggaaagctctggtggtggtggaattttctgtggaggctggccggcgacgacacaaacgaagttcagggaggaggggaacgaactggacgtgaggagcgataactaggaaatcggagctctgcctgagtgcctgtgacctatagcaaacttcaaacatatcatacatggtgatttctcgttacaaggagttgtatggtcttgttgttgtaacggaagtgcgtttactccttttcatttttgtggcaaagcatgatcatctttaggccgaattgtatactggattttaattatgcatgtccacacctttactgttcgttcgttttaatgagtgaacctaagcccggtttgaacatttataataatcggcaaaaggtcgatacgaatgactttactgtgtgcaaaaagtcgatgaattcgttcggttgtggatgccttgcaaaagtgagagagtggaggtatgatccaaggggatggtcggatggatgcatgaaaggtttccttctttatttcgctgtgatctcgcgtcgagaaattccattaatccattgtgaagttcagaccttgaatttgcacgtacaggtcgacaggtaacaggttagataggaaaataaaagaaggaagaacaggtttaacactgtgaaggtgaatctgacgaattaattagcatcttctatgcaaccgctggatttgcccctcgcgttgagaaagccaaaagactttctcttgaatatctttttctggtcgtaaaaaaaaaactcgaaaaaggctcaagttgcggttggtggaaaagtctatcacgaggtcggaatcacaagtaatatctgcatcaaaagtagaaagaacaatagtacaaagctgcatctgtgtttttagtacaagtactaggaaatcaattaaatattccgctgttcgtgctctttccagttttctaatcgcgtcatcatgctcatcatcgaataagattctcctataatccttcggttccaaaatatatcaataacttcttcaccaatatttctttttaaaataattatgatccttcaccattcaatttttatatctacctttacttctcaactaatcacaatcttacaccatttaattctacatattttctttattatctaaattttttttacctctttctttaataaccgtgtctaactttaaaactcattatattctgggacgaatgaatcatatcattattttttttctataaaatgcacgaaagctgacacatctccgcccaaatctctcgttttccgttcgcttcaccagtcacagctctatcatggcttcgcgcgtgccaccgatcgtcatctcggccttctcgatcttgcttggggccctccagtcgctcgaatccttcctcgccgcgtcgagcgcgacctcgccgtcgctggatcgtggcgcccaactcgccgcaggtgctctcttctttaccattctgatctctgtcgagctcacttgtctccttctgttcgcatatgtcggcaagctcggcgccgctggtggagcggggcacggtggcttcttcgccgtcgccaccgcaacgctcgccgccgccgccgtgacagctctcctcgccgagccatccttcctttcttttccgctcgcgcaggcggaatcgagtaggtgagggggaagtgagatctatctgatcgctcctcctccggtcgtcgccgtcaggcgttgatcgaggcagttgggcgtgcttgtatctttcgtttgtgcaggtctataaagctattggattttgatggaaattggaaatactagcaattctactcgattattatatacggccactgttacatgcatcttaatttcatttccttttcttcccggtttcaatcggcaataagctgcagacctgcagtatcaaatccgagacgatatgatggagcttgttatttttctgttcacggaaaattattgctttttctggatcttttgtgaaaactttgttttctttatcggaattgctagaggactgtcgacagttttttttgagtgaaaactgtcaaattttttagccgtcgattctgctttaagatttgtactgagatattttgctattagatctaaaccctcttttcacaagctagtcccatcattgcatgtttatg

SEQ ID NO: 4935 - DNA, 8502 bp, Oryza sativa
acatgcaataatatataactatagttacaatgtaattatagtgtaactacactataactatattgttatctctatataaattacatataaagttgcatatattattttaatacatatatataagttattattagtatagtatagatctagtgaaattatatactatagttagatttgaaagttttctcctcaaacattggacagttttttagctagtccctttctttattgtttgaaaaagttagattttgtttctttatgtccttgtcgggttccgccagcatctggaatagagctaccaatacacatggaagtagatttttcttgtcactttcccctttttgtttttaaaagctataaactcgtactcctacttctttcgtggagtactacaataatccatactactccctccgtttcaaaatgtttgacaccgttgactttttagcatatgtttgaccgttcgtcttattcaaaaaacttttatgagatatgtaaaattatatgcctacataaaaatatatttaacaatgaatcaaatgatagaaaaagaattaataattacttaaattttttgaataagacgaacggtcaaacatgtgataaaaagtcaacggcgtcagacatttcgaaacggagggagtacaaatatttttagcccacacttttcaaccttgcggcgattttatgtggtgggcgcatgtgtggcctatatagtgggcctgatcggtacggcagcagctccaacacaaaatctgttatagatactgtagatttttactttttcttctaacgtttgaccactcgtcttatttaaaaaatttatgcaaatataaaaaataaaagttgtgctaaaagtactgtgaataataaagtaaatcacaaataaaataaataataattctaatttttttaataagacgaatgatgcaagtaaaatatcaaaatacttatattatgggatggagggactaccgatcaagtccagtcaagttagttgaagagaattggactttccagtagatagtgcgagaacaaattggactttccaacgttaacttattttatataaccatagcacacaaaaaacttttactagccagccagtattacgagggtcaggtacacaatttttttttactgtggaactgtgctatgaattactccctccatcctaaaatattataatttaggatgggatgagacttattttaagattataaatcttaaaaataatcgttactgtacatatgcggcaatgattccaccactacttccaaattaagatagcatcgcaggaggatcttagattttgttgcgaaggtaacaatggatggaagcattgaacaattgaactaaactttagtccctctcacaaaagaataagtcactaccctaaggacttatgtttttaagagaggggctaaagtttagcaactagagactaaactttagtccctctcataaaagtgtccttaccctaagaacttatgtttttgagagctcgcaaacacccccttaaaaagtctcatttctcagggcagtctttgcatggggcattgattgacctgaacaagtgtggtctgattggagtgggctggtagaaaagcagttgaaaagttgggcacattggacctaccgcccagtaccgacctgtccgagcctcggagacacgaagtggatgtgctgctgcgtgacgacgaccgggcgaccatgacgccgcacgcctccgcaccgagccactcgttgatggcgctgtatgccaaattcctcggcgttagcggtcaagcgagctgggctggggtgagcgtggttggttggtacaaatcgcgtttgaagtttccgaagctgcagacagattactcaaagtagagacgcagcgaaaattgaagctgattcctggaataaaccaaacggcatatttacatatgagaagtaaggtgttaataaaacttttatatacgtgttcttagcaacctaaaagcaaaaactgaaaaataaatttcgataaaaaaaccccaaaattagcttcaaatttaatgttgaaaatgtaaattttggctaattagtataaacataagcgaaaagatgaagccattaatttctccattactacctggctagctagctgtgctgtctgagagaatgtaatagtgtcgtgaactagctagagagagtatgcagggtgtgtttagttcctgatattggggagaagtttggaaaaaattgatagtttggaaaaaaaagttaggagtttatgtgtgtaggaaagttttagatgtgatgtgatgtgatggaaagttaggagttgggaagaagtttgatgtgaagtaaacataccgtagtaacgagctattaagtgaaagcctttaattttcacgttcggcgcagacagccagccagccaagccacaggaatctacggcgctcgcgcccgcaacactcgcacggcacgttttatctagcgcgcacgcaccggcagtccatcgatcggctctagcgacagtacgattattcagcgtattcagcgtattctgttcactgctggccgctgctcgcgtcgcgcacacgcagccggcagctcgatcggtggatcacttaggcccggtttagttttcaatttttattttctaaaaaagtcacatcaaatatttaaacacatgcatagagcattaaatatagataaaaataagaactaattgcacagttagaaaaaaaaatcacgatacaaatcttttgaatttaattagtccatgattagtcataagtgctacagtaacccatacgtattaatggcacattaattaggcttaaaagattcgtctcacggtttccagatgagttataaaattactccattcgtctcaatatatagcaacatgagacaacgaatctggactgtcacatgagacaacgaatctggactatccagatttgttgttctaggatgggcctcatcctattgtagggtgttatatattgagacggagggagtagttttttcattcgtgtcacaaactctttccgacatccgaccaaacgtccaacgtccaatgtgacacatgaaattttcttttcacgaagtaaacatggccttattcacgttccgacgtacgtacgcgcggcacggtgtggatgtgccacaacgcgttaaagacctcacaacgcggaggcccgatcgaattagccgaacgctacggaaatttcttcgtactaatgcgcggcctgtagagtttggagtgtcttgaggcgcacaaactggttaattcagcttgtacatacaatcgtcgtaattaaaacaacgctgataaaatttcaataggattatgtgggtcgactcgtttgaagaaattaatgatctttgctaaagggatatccataatattcaaatgtttatgaaaaattttaactatatagattaatatgtaatatattactccataaacatagaagatcaaattaaacttttaggacccctttgaatcgcatgaataagaaaacataggaataggaaaaacgcaagattttgataggaatgtaactgtaaaacagaggactgtaaaacataggaatggtcgtttgattggatcacaggaaaaacacaggaattagatgaaagataaagactcaaaagaaagttttcaagagattttatctcatgttagaattcctccaaaacttgcatggcattaggtaattcataggaatttcataggattccataagatccattcctttgattcaaagggctatatatgaaaaattctaatagaaataaaatcctctaaaattcctataaatttcatttgaatcaaagggggccttacatgttgcaacgaaaaatgtttgactataaatatacgtgaactagcaatactttaatttgtttttttgcaacttgtacatggtgaattttaatttgcatatttgtgaagtgatatatcgcatattaatctatcttctatttttttttaaaaaaaatcataactatttcgataatatacaaacaacgagtgagtatcccatcgagagtttaaaatttgcacccactgtaaagagagaaaatacctggtacattcttgccaaacaattttacaaactacggtactagctgatgttgagttaatgacattttacatattcagaaaacaaaatgcgtgcatgtagccgcgaagtttctttcatcttgcccagaaaccctccacaccattgacttgtgagtctgaagaaaaattgttcgtgtagcaacactatctcatcttttgatgggcgaaaagattagaaatcaaaacggaatggtactgtttaccgcgaacggctagctagtaaacgtactgactgtcatgtgaccgattaaacctcgatgccgtcgtttgccgcggtttaatagtgcttagcctatattatccccctttactcgctcgatcctccaccccctcttctccacccggtggacgtgaggggagaggtgagaggccatcgccatgagatcgacctctaattctctgtatgatcgcgtgttatcttttctaattttctcctctttcctcgcagataattctgcggagctcgccatgttggccatcctggtctctgtcgccttcgcccagatcctcgcgatcctgtccaacagtttcgcggtgggcgacgccgccgcggggtacgagtacgacggcgcggccgaccaccccgtcctgcgcatggctgtctccaccctgaccgtcgccgtcccggcgacgttctacgtcggcgtcatggagctctacgcccgcgtcacgccggtggcgccgccgcttcggcggctcctcgccgttcttgcgccggggatggcgtggatcacactctttcttggtatgccgccactcgtcgttctgctcctcggttgaagctgccgatcgaggcgcgtgacatggaggaggcaaagcaaggagagagagatcaacaccaaccactccttcgtcaacacgctctgcggttcggtgaaaattcttatcttatggctgcaccatttgcaactatgcaagaacacaataattctcgctcaacctatgttgagtctgggtgaattagcactgcatctacaagaacgggtcggctggctgccgttgcttgctattccatccatcccagtgtaacttagtacggctgtaacatattctaccactacgaatctagataggtagctatctagattcgtagttctaaaatatatcatattcgtgctaggttgcacttatattggtatggagagagttgcgtgtagtgctgcagagtctactggcaagccatagaacaaggttcctgagtcagttcaagtgtactactactgtactttcattgctagagtgagtccatcggtgtccaagctcagacatgcagacaagagtttatcctggcatcctgctgcctgctgtgtactaaggatttacagatagtatatgctcatacagcaatagaagcatagaactacagtacgtaaagtcattaaacagtgtgtaagtcattactattataccatcaataaaatcttatgccccaaatttactcttgtgattttattacccttgttttggaaatgttcaggcatgaagccgttgtggctttctatcgaaagctggatcgcttatcttttgtctaaaaatgttcacacatgagcagcaacagggcatttctaaatgtctaacatgccaatcattttcaagtgtgcaagtcattactgttgtgtataatccttgtttgggtgttctggatgttcggacataaatagcaaaaaattgctactattcagtacagtgtatagcgaatcagcggtcaaacgatctggtaactcaaatgaaagtgaacttttttctaaagtaggaaaactagttgcctaatatattaataaataaggaactgtaaatgtaaataaaaactttgatcaatcatcggataagctctgccatgattacaaagtcacacgcggataaacccgtttttaaaactgctatcgtattcataacctctagaaaaattactcattctttggaatctttgaaataggctaccctaccccaagtaaaaacaaataaagaaagagaacacaaaacacacatacacatcggcaaacgcgttaaggacaagcgcgttatgaatggtgttcttttgttttttgagaacgcgttatgaatggtcagtctaccacatgtccacattacttctccaagtttgcttcttgaacgatttctctctcttctaagatgtcatatattagtaggttcttgacattgtgggttgatttatgtacggattaatttatatcagggataagatataaagtacagaaaaataaaatattacagggccttcaggctccaacatatagagaacaattccggaaattttacatcaataaatacatccctcttatgtcagaaatgcaagaaaagaaggataatctcggcggaaaagactggctcatgatattgaaaggataaatctcagcatgacttagataattacggtcaaagatacataggacgtgttcacatggattttattgggaaatcaagatttagaaatagaaatgggactcaagcttgaagcatgatggtatacccagttttaaagcatatgttatttccaattgcgtgatttatttaacacggactatccacaacctacggtcatgataatatgatctaccaaatcaatgattagatatttctgattaactgtcgaatctagatggattaatcataacttttcaggattaataattctaaaatttgtatttagtaaatatcgacttgtatttgatttgaagtctcaatataataatagtatttttatttttaatagctagcgtggtggtccgcgcagattgtgtggctagcatcattacaaaattttcttacacaatagtagtgaacgtactttcacactttattgtgaaagataaatactaaaaatgacaattaattttgaattatggtaaacttgatcaaactcatacttataatattttgactaacatagtaatttctatgtctataaagtaaatatgatgtatcctttagtattgtcttaataatacaatagatcaatggatcgatataaaaattttacaatatatttgtttatcttatttcctcatatttatctttagactcatagtgacatcttctcactatctccgatgacattcatccacctactaataaaggcatggtagtttattacatatttgtgatagttcataaccaatttcaaataacaaaatgcccctcgttattaaaaccttttttattagccggcttctaatatttgtaatacattttggattacaattacttgccttcactattaagttactgattccaaaattcaaaatcaatgagtacggggttgtactccgtttgtatctcaattatcgtcttttcaaggttcaatacttctaaaatttagtaattaagcactcattatgttggagtttaaatttagtattttttaatctaataatttgaaatttggatttgataggatcagtgacttagtactccctccattctataatataaggcacaacaactttttataaatgttccataatactccctccattccaaattgatctacatatagttttttttatactattcctaaatgatctacatatttatgttcatttattaggtctattcgttatttgtgcattggagtaaatgggcattgatgtatgcatccatgcacacatgtatttataacccatatgcaatatcttgatttgctattggctaggaaatagtggggatggtgcatacattgagtttgttgctagaataaatatagtatgagagagttattagcttttcttggtcttggtatacctatgaaatatgtagatcaatttagaacggagggagcataaggcatacatacaaacatgcaattaactatgacatcttcttcattaaattattacttttttaaatcctccactctcatgttatctaatcctattgaatgcatgcattatatttattaggatgatccaaactacaagaggataataattatttcttggtctttgggttaagagtggttgtgtcttatattttagaatggaggaagtactcagtttccagtcttggcttttcgattaaagttaaaaagtttaaagagtccatgggattcacattgggatttttttttatcacgtagtactagtatattagatactgtattaggtggtgtttggatgcagggacttaactttagtctctttatttagacactaatttagagtattaaatatagactacttataaaactaattacataaatgaaagctaatttgcgagacaaattttttaagcccaattaatccataattagagaatgtttactgtagcatcacataggctaatcatggattaattaagctcaatagatttgtctcgcgaattagtccaaaattatggatgggttttattaatagtctatgtttaatatttataattag

SEQ ID NO: 4936 - DNA, 18668 bp, Oryza sativa
ccacatcccttaagttagaactctgaataataagatcggataacataacacagggataggccctgagagcctgaccttttcaacgatcttattcgagagcgatcttctcggctctgatggaagcacggtgatagcgaccatacgagtatacgactcatcacgacgcgaactgaagctatgtgggaaataatgctaaggaatagcacgtcgtttgattcggctgttcagttgcaggtggtacgccgtgtacgcgggcgtcgctctcagtgtggcaagcggcaagcggcaacgaaacatgtacgacgcgtcgtcccatctcgccgtgtaacgttagtctgtcatcaccatgaacagtgtagtaccagagcagtgaccagtgtctgtatggacttacctttctactgttctgaacattgctgatttgctgtgcactaccgtcgacgttactacagtaacgaactaaccaaccgaagtgctctgcggatcttttcgattggcatttgaccctccacgttccattccattaggaaatggcgaactttccgtcctcgtccacgatgacgtcagcagacagcgtcacagcgcctcggacgccgcaggttctgaccaaactagcatctgtccccgtcccaatatttcttgtccgaatttcccctatcagtgatcgatccaatccgctgcttatatgaccatccacttccttcccctctgttctacacatagcgaagaggagagaaggcgagctagagagagagcaccgggagaagaaagggatttcttgttcttgctgccagcgagagctcgtctttttggtgttcttgagagatttgttcttgttgatcgccatggcaggtgatcttgcgatggccactgttctctccctgggctgcgccatggtgggcgccccggaggcgctccgcctcttgctggacctcgccgggcagagcagccccatcgccggcgtcgtcgtcatcgtcggcgtcatctgcgccgtcacggccgccaccgtgctcggggctatgctcctggtccgcttcatccgcgtcgcgggcaatgcccctgacccaaccacggagcgcttcgcgcgggtgactctgacggtggccgtcgccgtcgcgctcctcgtcgctgcctgcctcctcgccgtccccaccgttccctccgccacgttcgcccgcgcttgatacgaggctgttcttcacttccctgtgggtgtttgtcagtgtgtgtgtgattgctcagctctcgtctctcgacaagtttacagcttttactccatcacctgtgtggttttctactgtttatctcgcagctatgtgatgttaattggcgaaagcgattgatcttctgagatcagagctgaattttgaatgtgtcgaaccaattcgaacagagcttgtgatacaccatagtacatcctaggatgatttccttttctgacgaatccgaaaaaaggcgccccgtattcgtgtttggtttgttcaatgttatctctgttggatctctctttggttccgtacgcttcagcatttggatatactttgatagtgacgtatcaacaggtaaccaccgtgcgtccatgccgatcgagggagaggaacaaatgtacacaaaaaaaagaagagttgttgggcaagccatctctgtgtctcgtgtcttctcacgcttatgcaaaagctctaacgcctgtgtttttggctttctgcgagatgatatacagacacatatgttttggacaggttctagcctagagagcttccccctctttcccgttccaggagcacgatggaggcgtttgcactgcgaggtctcgacacgttgggttgtgccacgtcccaaaggcacaaacaattttaccaacgttttattgcagaggactaacggcagattgctatggatagatcatcaagggcgagcaacaaacagttggccatgagaagtttcagttgataattgataaaaaaaattgacaattactaaactaccctgtatgttattttctatctctaaagtaccctttaacaaatcaacggttgatgtgtaataacaggatgcctcccgagcactgtaaaaggtaaaagctctcatcacgggtcaatgacgacagctgcgaaagaaaaagggcagaagtcgtggccatacaccgagagagaaaatgtgattggacggtcggtcgctgtcgccgtgtcaccgtctcaacatgaaatcgaacaaaaaaagagtgcaatgtgcaatgtttgtgtgtgcaaaaaaaaggggagcacaagttgatgcattcgtgaatcgtgacagttgaggcagcaagccagcaacgcggacatgtttgtgtgtacacgaggaagtctcacgtactgtccgagagtgcacaaggctaccccagcgtcatcccttacatcacacaatttacggagaagaatttcaaaagtcgggtcgagagaaatcgccgacggtacacgtcaaggtctcctcgacttggtggctttccatgtcaatggacaaccgcactccctgacggccacctgctaggaccacgatcaggagctgggttaatttgcagcaaaaaatgcagatgtggtgtgttcaattgccgttgttgctcgcgctcagatacctgcaaactggcaaaatggccggcatggatactctattactcctgtccggatgtagggtctgcctgcccatcagatcccggttttatcaggttggaggggaacgtcgcatttgctcgtcgtcaccacacccatcgtgcgcgtgcacatgtgggatgtgcaggtcagaggcatcagtttcctagtcgacggctcacggctccaaaagcaattggctgccttcaaaaatatagattcccacctgatcatggaagatcttccttttccctacgggctccatcgctatgcttcggcttatccaccgaacttgtccttttgatttcagatttttcagcggaagcatttctaccgctgggcaggttatgattaaacgatcttctatgaattggtagttcgtagccctcctcgtgtatttctttttgtgtgtgtgtgtgtgttcgtactgggggtcacaggatcagcctctaccaacatattggcagctattacctggcccacgtaattcggctgaaaatctcacagcctagtcaacaaatcgatggggttcagctgagaagccacaaccttgtcgttatttttctccgtgtcttatcctcaagtagttaacctcttggcactgggcatattgatttggttgttgttattaggggagacaaagtaggggaggagttagctggtgttccccagcatgctacctttctttactttctgtcgtttttttgtttcttagtctgtaatgaactcgtattctttttagtaaaagcttggcgtaatgcctttcgtccaaagtaagggaggagtaagaaaacaaacgacagaatacgcattatacgacggattcagcttgttgctacgatcaactttactctcaccattatcttatagctgaacatatctccatgccaaaattttgccaacaaagtattcgaaagcatagggattaagccaagatgatggcaaaaccacatggatagggagatctaacacagtgacacggacaggcacatcaaatcagtcaaagatcggattagtccttaatggcctccacactccaatccacctttttctttcgctgccgagatgacccgtcgcgccgtgccgacttggctggaacgaggcgtcaccacctaaccatgcccaaaccaggtgccgaatcgcctatattacccggagcaaatgctacacctagcaacacacaccagtgcacaacctcttcctcctctgttcttctctacttcttgcctgatctactggtaacagtgaacagggtgagcaaggcagagagagagagagaggagaggcttttcagaggactctgctttctcttttggtattcttgcgaatttttgttttgatcttttccgtgcgtgctcttcttgatcgccatggcttctgatgttgcgatggcgattgttctctccctcggctgcgccgtggtgggcggccccgaggtgctccgcgtcctgctcggcctctccggccggagcctcgtcgacgacgtcgccatttgcgtcttcgtcttgggcgccgtcaccgcgccagtcctcgggaacatgcttctcgcgcgctacgtccgcgtcgttcgaggcgccgccgccgcggcggctgcgcctcatgctcccgccgtggatcccttcgcgcgggtgactgttgcggtggcgctcgccgtcgccctcgtcgtcgccgcctgcctcatcctcgtcgtcccctcctccgcccactccgccagccgcgaccccggctccggcgctgcctgacgcgccacgcgaccctgttcgtcctgcggaacatgtccctgtggagtggtgaacttggtgtctggtgaacatgtccctgtggtgaactttagcggttaatcaagctctccttgcacacgcacctcatgcagaggaagtagctgtagatgttgggttttttttttcactcaatgttgtaatgttcgtgtcaatctgcagccgagagatatactactaccatgtagtacaactttttctctcaagataaaacattatactaccttttttcgccaggcaaacaaatcaccgggcaaaactctctataataatggtatttaccaatacgaacggctgcactccgaaacatatgcacatagagtgtgttgcccggtgaaacgctggaataagcaaatgaaagcttgtactaatccaaacaaaaaaaatgtttgccatcgtcgacaagccacagggatagggtgatgaaaacattcggctagtcgcctcgctctgtcagccacgtgaccacgtcggacgagcactgactaatcgcagacgaagaacacaacgacgatggtcgtgcccgtgtggcggatttgcagcgcgtgtgcgtcgcgaactgtggtaactgaaagggacagtgtttcgaccgtcgtttcacaccgccttcatgtcatcctccgattgtacgaacggctgcactccactccagtgcttcagcaacaacacaaatggttggctggtactgtcggtgctaccaaaattttaatactagcatatctgggcaacaaaccaaactatctatctattatatactaaaagtctattaaacttcctataaacgctcctaagccgacatgtgacggtctaataaattagggaaatccaagaaattctgagaaaaaaacaaaacaccaaaccgttaattttcacataacatagtggacccattatttttcaccattagatctatttaaaaagaattcctaaagcccaatccattaattatcacctcccaccatacccaccacctcctgggttgtccccttatgtgtacgtacgtgacctcctctcccctcatatacgtagatacgtctctccctctcctatccttcctttcatcttccaattttctgcctaacaaaatttaatatgtaaacaaaatcaaacgttagataactaatgattgtaatttttataatatattttatttatctatattgggcatgtttggatatataagaatatataatttgaaaaaaaaactcctatcttttacatggcaaataatgagcaattaaatattattaaaatataataacatatatgtgatctcttatctctctgcttgctcactttctcctcgctattttgtaggagtagcaagcaaatcattatatacacaataaaaagtaaatttcacaaagctacatatttaaggtgaagtttcaaaatctaaagatttaatcgatcaaatagacaaatacccattgtgtaataaagatccattaaacatcatgtagatcaatctataataagctccattaaacatcctctacagtgctactaacctaccacatggcacatctgataaattaaaaataaatctattatatagtaaaagcccattaaacttcctacaaatacttctaagtcgacacatgcatgacactttatataccggtatcgcgttgggatagtatcccaacgggatcgctccctgtccacttccctcagacgcgagagtgtaggccaccgtgggagcagcacagatgcggctaacgccggtggcgcggccgcggccggcgccgacgacctccggcgtggaggacgcggccgccggcgacgagctccggcatggaggacgcggccgccggcgagctccggcgtggggcatggtcgcatggacggcggaggatctgcgtggtgacagagacgacgccggcgacgagctccggcgtggggcgtggacggcggaggatcctgcgtggtgatggcggcggcgccggagacgagctccagcgtggaggacgcagctgccagctgaggcgtggacgacggacgtgactgccggtgacgagctcccgacggaggacgcggtcgtcggcgatgagttccgatgtggaccatggacgggggaggatgcggctgccggcgacgaggttcgggttcagtgtggagcgtggacgggggaggacgcggccgccggcgacgatgcctcgacacctcgacgcctagctcctggtatctagtaggtatcatatgaatatgatacctcacaagtatcaccccgatacgtcgtagaaatcgcacgatacctgataggtatcacatgatacctcacgagtatcacctgatacgtgataggaatcgtctgatacctgatacatggtagaatcgcatgatacctgataggtatcacccgatactagctacttatcaggtgatacctgtaaggtatcatacgattcttaccacatagaagatgatagttgcgtagttgcgaggtatcaagtgatactcgagtaggatcataaatctgggaggtagcatgatcctccttagtatcatgtccagtttcaccaggtttcataggtgatactttgggaggatcatgtgatacctgagaggtatcatgatccttatctgtatcttgtctggtatcatcaggtttcacaaatgatatcttagaaggatcacatgatactcatcaaagtatcattatgtgtggtacctatgcagtaccacatgaccctacttaggtatcatgtctagtaacaagatcctatgggttttaaagatgatactttagtaggatcgtgtgatacttgcgtttctaccacatatcagatgatacttgcgaggtatcaaatgatacctatcaggtatcatgcgattcttaccacgtggtgggtgatgcttgtgatgtttcaggtcctgatatctaaccggtatcaggtgatacctaccaggtatcatgtgattctactatatatcaggtgatacttgagaggaatcagataatacctatcaagtatcatgcgattcttacaacatagaagatgatacttatcaggtatcatgcgattcttaccacgtagaatatgatacctatcatgtatcatacgactcttaccacgtagaagatgattctaccacactccacagccagccatgaccaagttaacaagttctttgcacaccatcttgtctctttgctcccccaaagtagcagatggataggatgaaggcccggactcgcagcgggatcgacggccggcgacgaaggagccgaccggagagggcccgcgacggagttggggcgccggtggagggcgcaccggccggccacgcagatggagccgagggtgggcgttaacggcggcgccgtggatggcaggcagcggtgctggagctctcggcggcaatccggcgaccacatcatcgacagccacgtcaccggtgacggagttggggcgctggcggagggcgcaccagccggccacgcggatggagcaccaggcggcaaatccggcgaccacgtcaccggcggccgcgtctccggtggccgcgtccttctctccccaagcgggacttcttccctgcgccggagtcaccgacggccacctcctcctcacagattaggcgctcagcgtcgttcctatttggatgggaaaggtggacgaagggtatcccgtcgatacccttcccgacagtataccggtatatagcatttccgttttacaaatgctactaggccaccacgtggcattatgagaaaaaaatggaccatctattttcattgaaataggtagacacaatattttaaccattaaattattaatttaaatatcagttcttatctcaagaaaacaaatcatgtacgtagccatgccctccttccaatatattccaacgtatatacgattcggaaggaaaataaaaggtacccacttatgtaccaactacctcccccttctcagctaaaaaaaaaaagaaaaaccagaaaaactccctccccatggtgcatatacgtgcttgagccgtgagcagatggtgcatggtcgttggaattaatcttggctggtcggccggtctggttgttttataattaatcttggctgtgattgtttctttcaatcatacggtcatacagatgtaaattttttgtatttatcttttttatcatacttatgtatatctttatttttatggataaattgtacatatgtattttctctcgtacataaacaggagattaggagtgacccctctgaccccgtctctcccctaagctaacatctatatatatatgaaaaataataacaagatagtttataatgaacccggggttgcctcaccctcattggccactttatggaaatagattttgtaatggttttgctcctagagatctatttaatagagttttaaccggccacaagctaatattgaatcagtttaactataaaattttttttttgaagtcctacttatatttttctctttttttttcatttctatgtttctctttatatatacaagtaaagtataaagttatgttttggtttgatacatatcaagagacgaaggtcaataacaaatccataaagtcatttcattcatgtctttgtggtagcttcatgggtttctccacatcttgtatatacaagcagctcaaaatatgtggtattccatatcatgataaaagttatttcttcctattaaatttatattttaagactcatattgcctatatttttctttaaaaaaataccataagggtcccacatatttcagaaaaaccatgtccactatttgcatatttcttcaatacatgcatacaacaaatttattaattcatatgcaagcatatagcaaattgcgtgcatgtgaaccaattaaattaagcacttgatggtaaaaataaaacattcatcggcgatataaatttcttgaagtttcttaagaaaaaaaagatataatgcacaatgaattaaaaaatagtatatcttactttcacaatttgttatatctgtttaaaaaaaactaatacacatgcccgcgcgaatgcgcgggctacctttcctagtttcagaaacgatcgtgcggtatttcttttcctaattctcgtgattaaccactttgatctacaatcatgtcctcctcaatcctcataactgtccgcgtatatagaaactttaaaagttagtccgagcggtcgtcgctcagttcacaatcacacatggtctggagtctggacccatcctaaaaaattccacccaacccgacggaagataaagataatcggactttcacgctcgcgacccccaccaaagaataggcagcgaagaacgaaaaggaccgcgccgcgccgccctgactattgacctggtccgccgcaagaatataacgcagatggtgcaccaataataatcacaaaaccggtcagttggatttatctgccgatgtgtttctcggtatgagttggaagaagtcgggtggaacggattttcagagacgagtcgacgcacgccaccagaacgggcggcaccatttagcgagccactcgaaatatcgaatactcgatcggtcgaaaatgccgtcagacttgcatatttcgtgtgtgcaaacaaacgtaccactcctggcgctaagtacattcttcctgcaagttcagctttgccggagagtagagtactctggtagtacccgtagtccaagcgcagctttgccaagtttcaacgggaaaaggagaggctgtcgatcgtcctgccggatcgatccacaccacgtcaccatcctacctcgaccgaactcaacttggctcggatccactgaaagccacctgttgcgtacgggtaggtcgttgtgtttcgctttacatgtcagtcttgtggtgcctagctgggactgatgcaatgcaatccatctgaaatctgcaacgcagttcaactggtgcccgtgccaaagtgccattcttggcctccatcttttgtcttccgttctgcaatatggcaccgagctaagcgatcagccaatcatttcgatcgagatctaagtcgaactacaggaatccaagtacaagtagagtagtaaacagagttttaagtctctctttgtacacacgatcatatgaaaattgttcgattgtttgggttgataaatacagggaaagcgctggaaaaggagatatgctgactgaaccacactcacactctgcccctacatcgggtgaaaaaaaaatcaccttgatcgagtaaacacctataaaacgtgtcgctggttcggcgagaatcgcacattagagactagagaggcgacaggaagagcaaaggagatgggcaagcgagcctcatgaaccgaccaatcctttgccgaagcgctgaaaggcgacagcgagaccgttttgttgcgaggtttgtgtgcaaagcgagagatcacaggagaaagggacaccgatggaaaatactagtaggatgactagatgagtacagtacatgttgggtgcaaagtgaaacatgcatatcctctcatgtaccaaaccatatgattagtggctcctagtcgtgctctcttcacatacgtcaaagtccgaaagtgagcaaggctatatgtagcaggacgttgtcatatatagcgacgtacgtgcgcgtcaacaaggtggacgtgaacgagattggtcacgattaccagcatcgctcgctatcgacgcctcagaacgtaacgaacatggtcacatggacatgatcacaaggactattctgcagcagtgcacgcccgaattacggttgattttcttctttcatcttgtcagtagtgcatgccctgcccaaagactcgcaagtcgcaacttcgcatggaataggggcaaaggatcagcatttgttgtgcggttctgtcgagtggccatgtcgtgccagtcgccacttgtggagacggtcatacaagtgatagcaaaactttttcggtttactgctttacttctggagtgttgctatacgttcgactccctcgtccgattcccatccaatccaactttatctgccaatcgttacgcttcacgcagaccaacttctctccatgtggctagggcaattagcagctaagtgctggtcagacgtgagttgtacgtagcgattttcttacttttgtccgttctgtggcgcctagcttggactgaaacatgcagcacaatcaatcgctcttcaattcgtgccatccatccttggacttcgttgtcatccgctccgtgatcggcaacgagttacgcgattatttcggttgatccttcgaacctatcgaactacatgaatccaggagaaacagagccttatgtatctctctcactctgtgtacatcgagaacccaaatcagcaatccatttctacatcttcaacttttggtaggggtctgccaaatatatacttgcaaacctacgaggctagcgtattatgtggatacttgcaatccatttttttttacttgcaatcgcgtagctccagctccagtaccgaatcttcacatcttctatactgggaccacagggtggaaaagatgtgctagtatgcatcagcacggccgctcggcaaatcagcaatgccccctgggcccctgctgctgccaagaatatgccgttaatcaacacctataaattaagccggtcgaggggttcagccacggcgagaagagcagagccgcgaaggagatcgatcggcagcttagcctgagtaagcacggaaggtgagagtgttctcagctgttgagccccatcccccatggccgcaattcttcggaataccatcgttgtcgccatgggcgccggggctctgggcggaccggacgcgctgaggctcttgctcgggttcgccgggcggagccccctcgtcgacatcctcgtcgtcgtcttcgtcatcgccgcggtcaccgcgcccgccctcggcaccattcttctcgcgcgtttcttccgcaagccgcgcgctggggccggcggaacgggtgcggcggtcgatgacccgttcgccaagatgacgctggcggtgtccctggccgtggccgtcctcgtctccgccaccctgatcctcctgccgctgttccagtccgggggcctcggcgcgctcgccttcgccggagccgcgctcgtcgtgggcgcctgcgccgcgcgcgcgcgcggcgtgcttcttgcgaatgcccacggcggcgcccccgccaccgagcgcttcgccaaggcgaccctgatggtgtccctcgccgccgtcttctccctcctcgtcctttgcatcgcggtcggcatcctcgacgcgcctgcgcagcgcctccttgccttcgccttcaagaacccacccgccaccgtggccgtctgcgtcgccacagccaccatcatcggcgccacagttgtcaccttgttcttccgcaaggcgaaaaatgcggatgccgccgccgccgccgccccaacggcgatggccatggcgctcttccacaaccacaagatgatcttggtgatggttacgcccttcgtcgtcatcttcttcctttgttcataggtggtgcggtgccggtgcagcgtgctgggcaccggtggttgaaaaaaaacgtaatccctcgtatgagtacggtggtgtatgtacatatgctatatgttatctttcgtgtaatcgggaagagaaatgtctttttggttcgtgtttgcctcgtcccatttgctatatttatgtgatttagaaatacgagttttcgttgccttattcgggttgaacttgaatatcatcatctcgttgaagtgagtaatcgacgtgaagtattaacagaactagtttagtgaattgctactgcagtctccagccgtgttttagaaaggcccgcacagataacggaaaatatttcgtagtactttgctatcatcgggtacatcaactagtggggtgggaccatgggagtactttgctatcatcttttttctgctttgctctttccctttccaacattcgcctgtgatggaaacgccacgagccttttgtcttggcactcgttattatccaatgttctttgatataaatacgagttaccacatttgagggatctgggagtgtggatcgcacagctttgattgtggtttgccgtccatcagcatttcagcaactgtcatctcctcgggctcgttatcgtacgaggcgcagcctagcgaaagttgtggtgattgttaggaagtggcagccaccagagtctcgcccggagcaacacggccggttcgattgccatatgatttttgcaacttgtttcctggatggaggatggtttctgccaaaagcgaagtgaagtgaaattttctcaacgaaagttttgtcctttcttatcacgatgcctggtgtgaacaaggctagccagcccatgtgcccatgccgttttctctgaacgccaattatcctttctaaaatactatacttaacttaggttgtgtttaattcatgttaaaattgaaagtttggttgaaattgtaacgatgtgacggaaaaattaaaagtttgtgtgtgtaggaaagttttgatgcgatgaaaaagttggaagtttgaagaaaaactttgaaactaaacacggccttaagaaaaaaaaagaatatgtagtgacataatgaacctgcagttagtttcttgggtttgttggaaccatgccaccttaattttgcaaaatttgagatatgccacccgtatctcaatgacatgtaggacccacatgagtcaatgatatgtgggttagggtgacatatcacaaattttgaaaatttgtgtggcatggtttaaattttccatagtttcttttggtgctttatgttggcctcggattgtactagagtttggagatcagagtctttgtcccactatagtttctttttttgagatcagaaggatcgccggccaattgtgacgcgctgcaaccatgcattactcgtattttctccttcatgtgtgcactgggaaacgtattttctccttcgtatttgagcgccacgtctcacacggaaagggattttttttctccttgcactgttgcacacacgccatcaaggcatacacaacacaaccgggcacggcgaaaagcccaacaggccgaaggtcgaagggcagaggccacgcgagcgaaaggaacccgtgtggcatatacggaaaatatgccgttcaaacagttgaatactcgtgccttgccgccgttcacaccagagtagtatctagctgccataagacggcaataatcctcctgatctctacatgaaaaaagtgtgtccgacggatgttgtggcaagcaaataaagttatgggcaattgcctatagccgtctggtccagtttgaacgtggcggaaatgtggcgaaattgtagagtaagcgcccctggcgagtgatgtggttcatttagctgcatgtggaagtacattatagtcgattgatagcgcaaagttgtgtgcgctactcagtggagagaaagggaacagaaaatgaccgtgtgacatcatttccttctagggaaactgtttgacttggctcttgtatattcatgtgaggaattcatgtgatcatgtcctcagttgttgtccacgagcagcatccgttgttcttcctcgaagcagatctaccatcccacactggttctcaaaaaaaaaaaaaaaaactcacccacactcgctatccaatccaatccaactgtccgcatccatatgatagcgaaacgctgccgaaagctaaaacccgcaacggcgaatcctcctcacggagaaaaggggtcaagacgtactgctcctatgagctttttcgccctcttcttccgcatgtcatctcctaagattatcctgttctatcttggagtaacggaacttcaaatggactctgttttttttattaaaaaaatacaaagaccaaagtatatgaagttggaacaggtccattcttaaatggtactcttttttatttagtatacttattttttgctatatcatggttaccgagtggtattattacgcatccaatatttctctgtgtaaatattaggatccagaatttgaaggttaaatgtgtaatagtgagcttggaagcaaaactattctagtccaatgtccaattgtggtaatctgagtcatcctataggttttctaatatacattttttttctgcgattgccatctactacttctggtaaacgtttcaggcgaaaggacatcacacatgaacgctaatatacgtagatgtttatttggaaaggttcaaaacgacaccataaatgaacagatggagtacatctgccgtcattgtgtagactgtagtactcccacgtcccataaaaaaccaacctaatagtgaatgtgatatatcttattactacgaatctagacatatctttatgcagattcattgtcctataatatatcatatctagtattagatttattgtttagacaaaggtagtacggccatgtttagttcccacacaaaaattttataccctgtcacaacgaacgtttgaacacgtgtatgaaatattaaatataagctaaaaaaactaattacatagattgcgactaatttgctagactaatcttttaagcttaattgcttcatgatttgacaatgtggtgctacagtaaacatttgctaatggtggattaactaggcttaataaatccgtctcgctgtttactggcggattctgtaattatgtttttattagtgcctgaacacctcatacaacacactatataatacccgatgttacacatcaaaacttaacacccctaatctaaataccaccctacgtctactaatgaaattgaatacggcattctttaggacacctatagtgttggtgggattagggccctgtttagtttcatgggctaattattagccacccaccttttagccctgaattagcccctaaggatccaaacatgtgggttaatttggggctaaagtgaattagcccccctcaaaacattagcctctccaaagagtgctaatgggactaattttctgtggggaccataaaaaaaacagtcctatcttcctccccccctctctctcctctctctccatcttttagccctaaactagctcatggatccaaagatattgtcccagactaatgtttagcctaccaattcaagactaaatattagctcttaaaattagcccgggactaatcttccaaacaagacctatttcgattgactcgagcgaacaaaatctcaaatcaatcgctacagtgtagaaattgatttgtgggaattcgcgtaaaaaaaatctcagggcttgtttggtttagggtcataccaaaacatcggtagtgccaaaacctaggtatgttttggcactattaataatttggtagggtagaatactaggtaatgtgtttggattaataccacttggaagccaaattttatattatggtaaagaaagttctagaattgtaccaaattaaccatgggcattactattcatttggcttcaaaccaaaccatcatatttactattcaaactaccaaaaaattggcatgtcatattttggcatcaatccaaagtggcccttagtctgggtggttctaacgggcgatcgatcgccaaggctatcggggagcgatcgattcccctccccctccctccctccacctggtttccttttttggcaccgtattactttcctattttagtaaatttatacacctcaaagtttatacaccttaagtttacacatctaaagtttagagaccaaaagtttataagtcaaaagtttatatatccgattcaaatttgaatttgaattcaaatatcttttttatatatagtgtcgacgtttgatgtctcaactatggtatttggacagtatggagatcgttggtactagagtatatgcgagattgaggtaaaagagatggagacagggatttttatacaggttcgggcccctgaattgtcaggtaataaccctacatcctgttggccgaagcaggtattgctcttattcaccataatcacaccagtacaatatttggggtagcctatctaactgttgttgacatggcggtctgaaggtctgactcgtagtcgacaacaaggtagtcttcctcttcgagtttgtgcccggcgagattagagacgacgctagatccctacggccgacctctgtaggtaccggacagggtcgatccaggcatatctctgatgtcgatatccggcggcttatcttggtgtatgttggcttgtatattgatcttgtgtcttgatctattattccgtgtatgttgattgtgtcctctcctcctagggggtcttgtatttatacccataggtgtcctcttgtccaagtaaaactagggaaaccaatatggatacaatccgagttgtccttgtcgtttccatgtagaattatggttgtctttccttatccggaactcctcctatattcacaggttgtttccgcataggatatggcatgtggtgggtcctgtagagatttaatcaactcctattagatatgtgttatacataaccctgatagtttcagttttaactaaacttctaattttaacgttaactaaacacacccgaagcagtaggagtattttctcgcgtaggagtaaaagtccatatgcatgtaaaaatttagaggtggggtggtggcagcgacatcctttttgccaggtggtggcatgcggtttcggcaggattgggcagcgacgccaatccaatctgctttccgccgtgacgcgacgtgcggcggatcaaacaggagggagacgagacgagatggtcctgtgaatctgtgatactactccggctactgctgcgccacaaagccctgtgatgagttgacttatccctgtgcgtgcgtggtctatctgcgatagctcggcgatgggagtatgtgcaagtaccaatgcgccgcgccggagtgggactggaccggaccgtggcggatggaggattgggcgagcgagagatgggcgtgcgacagtacgagtccggccggcgtcgtgatgaccattaccttttctattggattatactcctctcgtacgcgtccgtccctcccggtcgctccaacgcatgcagtattccaactatccaaattatttatgctgctgaaatgttcgcagtctaaggccgagtttagttgtaaaactttttttcaaacttttaactttttcatcacatcaaatcaaaactttcctagacacaaactttcaacttttccgtcacatcgttacaatttcaatcaaacttctaattttaacgtgaactaaacacaccctaaggacctgaatagtatgaatgaaaaaaa

SEQ ID NO: 4937 - DNA, 32362 bp, Oryza sativa
catccgccgtggcacggcattcagcgccagctgacgtggcgttgaggtgtctaagttcagcgccaaatgatttggcgttgagcaaaagagtcagatttgaaataagttttggcgacggttcatttgtaaaaatagtttttgcaaagggtcagattgttaaaatttgtgccttttgcaggtatcagctgtgccgacttcttcagaatctgccctgcggcctccacttgatgtctgctgccttgggtggcaagtacccttctcctgttctaccggttagttttccttggccttgacacaatgcctgtattccactgtcatgccactctcccctcctgtcctgcactgcacggtggtctggttgtggttgctggtttggctggtgactttagtttctgataactctgaactctgaagtagaagcaaagacagacaggacaaggacaagatatgcctacttcagttcgccattgctgtcctctcacatcgtcgcattctttccttcccatcacctcagcctcctcctcgccggcatcggcattgtcctcttgatcttgtcgatcgatggagatcgcggcggcggcgagccgtgccgtggtggacacctcccggccgttccagtcggtcagggaggccgtcgaggtgttcggcgaaaggtgcctcagctccaccagccgggcgagcagcgagtccgccggcggcggcggcgggaggccgtcgccgccggcggtgctgggctgcctgaggaagctggaggcggagctggccgaggcgaagggcgagctggagcggctgcggcagaggcagtcgcacatggagacggccgtgtccagcgtcgccgcgcagctcagcaccggcctcgccatcctctcggccggcgccgcccgcggcaagggcaaggagctcgccgtcgtcgacatcgacgtcgacctcggcggcggcggcggcagggtccgcagcgaccggtgggacgagagccgcgccgaggagtggatggcggcgagcctggagtacctgcccagcctgtcggaggcgctggccatcaagatggtcgacgacgatcgccacctcggagagaggaggcaggggaatgcgaggaagaagaacaccaagaacgccatgaacagcaagaagaagcagcagcagaagaagaatggcgtctcatttgttggaagaatcttctcatcaaggaaagataaatccaggtgatgaatgcgattatcatccatatatgctactgtgctttgtccatatatatatattagtttcctcactttgtgtgtcttgttttgaatagttcataagctgcatgctgcagtagctgcaaagagtgcgaggacttctttgggaaagcaggaattttgcattaattagttcaaatgctatgaaatttctctagaagtttgtatgttacaaatgagccctaaatgtccctgttggaatgcaggaattctgtagaaatttttcgaaacggaaacacggattaaacagtttatactgtgttcagtttcccaacaaaatttcttcggaaatcccgcgttccaatcggaattgtgagttttgactctttcatctaattggagtgagctttgtgactctttggtgtgttctttctatgagcaaagctcatgtttggtttctgaacaagttggttggcaggaggtatgccaatttttaaagaaatattatggtttttgtcagcccaggcaaccaaatttgtgggagtatcacagctactgatgaaatgccaaacaaattaagctaaaatatcacagataattcatacataacatagcttagtttgcaatgccaagcagaataataaactgactgatttttttcccatggtgatacctatgacagtccatagttactcatactgtcatacatgaccaacctcactgtgaataatatcactgattattttaagaaatgaaaaggcaacacactaattaaagactgggcagcatatgtcataagatggtagaggataaatgctgccccaaggttattatatgtatatatgatgctaattctaaggttaactaatagaggatatcaagtggaagaagagcactggatcgtatatgttgctgaatcagacgcgcatcctcttcacatctccttggggcacatgagtctctgttccattgccagcagggatgccttttccagcctaagaacaggaaattgcagaatgatatatccatcagtctgaatgttgttgattgcaaagaattaatgttcagtccattggtgtggcggtggagtcgtgaggtatatgactccatccaacagggttcaaatcgtggtgtcaagaaatacggttgcgtgcatggtgcagaggccggaagttatacttcctttatccaacaagaatgttcagcccaatgtgagagtgttttttttttaatttatttttcttctttttgaaagcaaaacatgaactcaccttctcatccggcacgatggcatatcgctctgatggcgagacccaaactttagctgaaaaacaggattatatgatgtaagttctctgaatgaatgactgaagaattgcatgagcagagagacctgccagtagaagctgaaaaaaggcatgatgtgatgcattgcatatatttacctgacattgggacggcttttgatgattccagctgcttgcaagctgatccatccgagctcaaggcatcgatcatcttgggtatgttccttcaccaacagaaatattttcttgattcagttaccgcgcattaaacctggattttttttttttgcaaatgcgcaaatccttcgggtgcgagaaattacctatcaactatttcaccatggccaagctgtccactggtgccccttccccatgagaaaacatttttggcttctgtcagggcaagagtgtgcctccatccacaagcaacttgaacaactttctgcagttgagtggcatatgatacaaatgagactgaaactgaaaatgcgaaacttataacgtcaactgagaggaatccttcttcagatggagcggtgaaatagccttggtgatgatcacaagcattgcggttatcgttgcggaaagatcataaccattgtgtttagaaccacatgacgcaattaaaagttaacagagcaaaagggtgagaacaagtactccaagacaacaccgtttacctgttcgtttggaaaattgacctgcaccggggagcagtgatcttcattatcgccaacaccgacttgtccaaactacacatgacaaaaaaaaaactaaagattagcataagtgatgataaaatgcaaggataatggtggtaaattggtgctcagaggataaacatgtcagagaacacaagtacagacgattctcatgtagtacaccttactcgagactcaaaattgtcggagtatcgacgtggtttcacaaactcttatttcgccagaggcatgtcgttttcaagatatttatgccaatagaggcatccaaattgaacatacatgttgaattgaactgcatatactaatcaattcactgaaatatgaattactatagagtggtcacatatcattcatactccgaaaatcaagctgacaagtggggtttggtagtggtgtttggtggattggtgaaacacttggtacctaaaagtggaggttgtagtggtagtatggtgccctggaggaacagggaaaacggttgctatctgctgctgtgagatttttctttttccagatcaagacacttggctcttctagttccattgtgtcttaaagaacactgaatgtcattcttcagaaatgttttaagatttagtattcatcaacatataagaacatgttcagagcaagattggtgccttgttcccatcagcaattaatcaaacaaggggagtaggcaattcaccaatcaccttgttccatccccatccatagagtttcccatctgctgcaagtgccattgtatgcctccacccacctgaaatcttcatcacccaaaaaaaaaaagatcaactctacagcttcttcctattgaaaaaaacagtgtcacaaatagaatttcgacagattgctatattacaaaattcatagcaaaaggctatccatttatacttgagatattttttagataatatttatacttgagatatagtagtatccttcaatgcttccaacttgtgtggaaccaggtgatcctcaaaatcaccatgccctagctgaccatacttgctccatccatatgtgtagatgctaccggaggaggacacggtgatggtatggcgccacccgcacgctacaagcaccatcttttgaccctggaaaatcaacgaaaagggtagttttatcatccttgagaatgtaccgcaatgtatcccatcttctagtgtaaacttgatactttcagttgctatgcttcgaggtatcaaaatttttagtgtaaatttttcacacctacttgtactttctttgagtaccgtaaaatttctccatgaaaaaaatgatgatgtagaacataaatgataactgcaataagagtcagagacaaccaagagtaagattactgacattcacagaagaaactttttctgggattaagcggtcatcgcgatcgcctagtcccaagttgccataccgaccccagccccaaccgtagagatcaccatcttctgttacagcagcggtgtgctcggcaccagcagcaatcatttttacacggacaccctgaatccacacagtcttgttgttaattagagcaagtattgttcctaacagcctcaatgtgctgtttctgaattttagaggtgtcattctagatatttgaagaattttgcccatcaatgttgctattgtcacaaagcaaaaatgtttcctttattattattttattctttggtgatctcatgcgcaaatcgtgaagtacattgaaggcttgattgcgaccactcactgctcaacttctgatggtatagcttaattattttgcgtgatttcgaaattgtggcatcagttcatgaatacttcgtggtccatggttggggggctcatggatgttattattggcactcatagcctcggccaagaaaatcgtcaggtggaatacatttgtactccctcggtccctccctttatttttagatataaggcgtattttgactataaaattaagtctgcaagactaaactctgaccattaatttctcgtaatatatttttttaataggaacaaaaccaatattacgtggaagctctttgaaatacaaaatctataggtataactttaaacactaaaaaatatatttgtatgcttaataatgcgctcgtcaaaatcttcaaagtttgtccgtttcgaaatcaaaataagccttatagaagtgaatggagggagtagagtacataaagatatttcccgcggatgctgctatcattttcacttattcttttggtctattttgccttaccctgttccaacaaacagagctagatgaagacgttttgatacctcaaaagcttgaatcttttgtgggagcaaggagtcctcggtgtttccgaggccaagctgaccattttgattgcgtccccagctgaaatcaatcaaccagcacacaagaacactttgattatagggatagattaaatataattagaaacaaaattagcaaatagctcaaaaaataaatggtctaaggaatacaatacagtagaagaaagtttattaagaaaacgtatttttcgagacgcgtactaaataatcgtcggtaataatccaataaagttgctgaaaagaaatagcgatttctacgtaacatcactacctttcctctactccgagaaaccctatcttttctcaaaaggtagttttcctctcttaataaaagactagacatttcgctactcaaaaaaaagaatggtatttgggctcgcctgttcgaggggactccgctcaagggataacatcgctctggtctcacctactgtagagcagtagcgatcctataaagtcttaccaagatcacagaaccctgggtagatgattcaatcctagtttaatttacgcgatgttaattaagtatatcactcaataattagatatcactgataatttttatgataggtttgtcactgccgtcgttgagtccgatatcctcgggtaaacgcttgggcaagtcgtaatacatgaaagagttattttcattttaaactcagcaaggtgtatttgtattaaaggagagggaaacaatgtacaatagtcttaagactaggagattacatcaaacaaaagaaaaagaaagcgggtttgggagggtgtcgtaatacatgaaagagtagaggtacctgtggacatggccggcgacggtgacggcgaggcagtggctgtcgccgcaggcgatctgggtgatccggacgccctggagcgcctggatgggctgcgggttgaacacgtcgctggagttgccgtgacccagcctcccgaagtcgcccctgcaacggcggcggatcgaattctcagttcgcttcacggcggcggcggcgagatgatcgatcgatcaagcgcaagtgcgtaccatccccagctgtagagctgcagctcctcgtcggagtaggcggtggtgtggtcggcgccgcagatgacgacggaggcgacgccccccggcgcgtcgtcgaacgccgccgtcagcaccgtcggcaccggccggtcctccgcgtcgccgtgccccagctgcccgtcctcgccgcgcccccacgagcacaccaccccgccgcctacacgccatgtcaatccgtcaagtcagataattaaccaccgcctaggcgctatctctctctcgcgcggcttactgagcagggcgacggagtggctggcgccggcggagatgaggacgacggaccgctccggcgcctccgggaccgcctcgtcgtcgccggcgacctccacctccatctccatgccggtcgaatgcatggtagtagcagacagaagagaacgagagcagagtgagcaagtgtgtagatacggctggtttaagtagccgtagactagcagcggctgatgggatgggcaacccgccaaaataatggcgccaattattcacactaagctactattttcgttttatattataagtcgtttgacttttttaagttaaagttctttatatttgaacaagttaaaaaatagcaatatttacaatatcaaattagtttaattaatttagcattaaatatgttttgatataatgtttgtttcgtattacaaatattactatgttttactgtaaacttgattaaactttaaactttaagaagtttgactaataagaaaaaatcaaacaacttaaaatatgaaacggagagaatatttctgactagctataccttaattaaaagaacagattttataattcaatacctacaagatctagcgtcagtgacgaacccagagattttatggagtatggacggaacaaaccatggctgctagactttggcatcgtcaatcatcgctgggatgaaatacttttttttattttttttttacttatggcatgacatacttgcaaattgcaattctactatgagttggcgagcttggagcttggacggctgcctagagttgttgcccttatgcatgtttcttcccgtgtatgatgtgtagggggtatttgtatggttagatttattctgcagcagtttaattgttagttttaaattgtactcccataatatatgtataatttgacaatgtctcgtctttttttttcccgaagcccatagctccatcctttggcctttgctatacagcttaatagcaaaggagttgattttgatttttttttttactttattttttatattggttattaatttgctaaaaacacatcaaattctttttgtcaataaaaatactacagcttataattagcagtagacgaaacgatgggactgtcatgtttgaagcgtgtgcgatgaagtggattatttaaatttatctaaacccttaccacacaacatctccccgcgttcaattagcatgcatattttctatgcttgaacatgggtactactgttcactttatgttgatgatgtaacaaatctatttataaattagatgaatatgtttaattcgtccattaattcgagcttgtgttgaaaaaggatatgtcacctattcaatcacgactgcaacaacattcatcagttaccgatggcagaggaggcaaaataagatgggaaagtgactggtgtacaaatcaatcaaactcatttttcgataattacttgaaaaatgctaaaagaaatggaaatggttctaggtaggaggaaggaacgagctccataaattgtagaggatagctagtgcagcggggcccggcgtatgtacgcgcgacggcgacgccgcctgcatcactgcgcctgcatgatcactgcatctgcatcatataagaagagattaatgcttgattgtaacccgtcctagtgattaagatgcttggaactttgtatagttgaaggcacgcgcaacaccaataaatgagaggcgcgttgagaaataccggtggtgcgatggtaatgtagttggttctgtttagttcgcgaaaaaaaaattagtatgacatcagatgattgaccgaatgtcggaaggagtttttgacacgaataaaaaaactaactcgcttggaaaccgcgagacgaacatgttaaggatgtactcgtgactgtgtataaaaccgcgagacgaacatgttaaggatgtactcgtgactgtgtatggtggtgtgcacgtgtacatgtcttttatgtaacagaaaaacaaataaatagggaatctttcacaagaaacatttttcatttgattgcaaataactaatggaatttcaaagggaaaaaaatcagctaaacactcagaaagaatagttatcctttatatcctagaagttctgccaaattcccattaaatttatgcgttctagaaactaataacgctgccccggaagtaaaacagcgactgcaagtacatggtgagccccctgcgtcaaaactttcatgtgtttagaaaatggattagaaagggtgggattgaaaaatggaaatggacgaaaggatatgatgaaatgagaagagaagaatgaatggctaagattgaaacttacccttttaagatggaaaaacatattccaaacctatttttcaaacatgatcttactacattttagtagtagctttcttgatgaacttgtactgctattaatactgccgtccagtcaattaaacaggctgggacagaggatttattattggccacgcatccggcgtgtaaggccaggccagtagtactactcgagtactacagtaccgagtacactcactggtgatgttgcgatctatcgatcggtgatgatcacttgatcgggattcaggagtggttggcagctcgtgtcattctccctagagccaacgccatttcttccacattccagttccaagtcagaatttttttttatgtttgacaaagtttataaaaaaaatatattttcaacacaaaataagcatattatcaaaatatattcaatgttagatttaataaaactaatttgatgttttaggagtagctaaatttttctatgaacttgatcaaacttgatacttcctccgtttgtaaatatttgacaccgttgactttttagcaaatgtttgacctttcgtcttattcaaaaaaatttataaaatacgtaaaactatatatatatatatatatatatatatatatatatatatatatatatatatatatatatatacatagaagtatatttaataatgaatcaaatgataggaaaaaaaataataattacttaaattttttaaaataagacgaacgatcaaacatatttaaaaaaatcaacggcgtcaaatatttagaaacaaagggggtaaaatttgactaggaaaaaagtttatttgtcaaccatggaacagcataattataatgattaaacagtgatcctgatctgtaatctggctacttataccggctcctgcttacaaattcatatgctagtaggagtaccgtttactttaaatgccaatgtactgcactctctatctttgtagtatattcaataatactagtaacatgtgtcaataagtttgagagccgctctacttgctcaacaacttgcccatagatgcattcatttctctccactgtcttcgttttctccgtcggcgacatggcaaggcacattcacatacattttgaagtaaaacaatggactaaccaggcattgcattgaatagaagggaacactgtgaattatacaaaggaaaagagatatgaaaaaggctgtttaggaacttttcacatcccatgtatctttcttgacatgatggagaaagattgaaaccaattagccattttgcctgtaaaacgatttgaatcaaatcaattattcctatcgggattacacatagcgcagagggagccaatgggcaaattaattagtaaaagaaccgcaaaggcaatgacctatttgcagaatatgtttctacctctaataaactgacagtaacatctgctcctattaaatagaattacgggcgcacgcaattctgatacacctctggggctctgataaacaggaactacaatgtataaaccactatttgaggttcaaaaaccaggacttgggtcactccctgcctctaggtcctggatcaccctgctcctgagacgttggaggcagcaggcaactttcaaaatctttgattattgttaggaaatctccgtccttgatgattgtatggaaattttgttctcgccccatttctccaattcctatgtattctcccgtctctatttgcagccctgccacaatgtcccaaactgttgtgttcatgctgagacatctgagtggaaggacaaggactccctcttggatagggcggcaatggtggaaagggctggaaaggcacaccaggtgcgactttccagtttttgcgacatggccctccttcaacttctggggttccaaaatgctcaacaaaagcgattggaatcccgtatgaaatagtcaagttatgttgatacctctccaagtataatcctggagaaacccccgattctaaacaagcttgtccaggccgactttcctgctgagactcaaatccaggaggtgcttcatcatctgcaccatcggctgaacttcccaccacaggaacatcattgtgggagctgttcgttccccaattaccatgcaacttatttcccaccgagccagtccgaaactcactttgtacaggacaaactttctgaattttcaggccacccattttatagtggtcatctggttggtaatcccaacggctcttgcgttttcttctgatggatttccaatccatagtgttggctgaagttggaaaagatccaccagctgttgaaatgacatgaatatcgtgtgcagatatggatgcacgtgaatattctgttggctcatttcttgaaatatttcgaggggcccattggatccatctatcacgaaagttccgagcaatctgttgaacctgttaaaatcattatatgaatcaaacaggtcatatcctcacatcagagaatcactaagcctataaatgcaggtaataacaaacaatattcttattgcaaaacctatattaaagaccaacagatatcaagccagctaagagagaatataaattgtactccctccgtttcaggttataagactttttgactttggtcaaagtcaaactgctttaaatttaaccaagtttgtagaaaaaagtagtaacatttccaatccaagacaaatttattatgaaaatatattcaattattgatttgatgaaactaatttagtattataaatattactatatttgtctataaacttagttcaatttgaaacagtttgactttgccgaaagtcaaaacgtcttataacctgaaacggagggagtatttaactaagttccagcagtttccgggaaggctcaaagaatacagctgttcataagtaaacatgatgatgctaatgcataatccgtttacagcgaagtactcacactaatacatttgctaacttatttacaaacaaaaaaactatatgaattttcaaactatattggaaatttggattggttatccattaacgaaaataaagaaaacttgattttggttccattttttgctctaagcaaaaagacttgtcctatgtccatggataaactaagcatttacaatacagaaacaatcaatatcaaaccatgtatatgcatgacaagttcagaaacatgcactagtattaccaattatgttgtattgctttcttttaaagtgacatttccctcccaaaataattaatttgctgattgcatttgcaaacttgcaatctttctatactatgttcatggcctgaattgtatactatctaaacaaagagtcaatgcacaaacaaatacctaaaaaacaagataaaaatcatacacgttgggattagtatatttattacctgcatatcattatgccttaacaagcccaacatcgactccctgaagctgcaatgcgaatttcagagaataaaaggtaaggaaaaattgtagaattgatgcttcaaaatgaaaacttcaacagcaaaagaagctatatttagagcattaaaatactgtccatagcatgttatttgcacggctaaagcttagtaatacaattaatggtaaacctgcaactgcaattagatatacataaaacaagtgtcttgaattcaaaattgtcacctccaaatatactgttcactcagggcagcattaggaaatattctttaatatgggacttgtaatataataaattgcaatgctacaaacacatttcacaagtggttgcttgatggattacaaaaggccatacagaagatgtactagcaaaatttgaaaatttgaaagcttgaaatatcaaacatacaaaaataacaagcaagaattgcatttatttcctcggaagaccatgttttggcataaaaaatatgttgctacacaaagcaaatatacagaaaactataatgaaacctaagaatgaaaaataccaaatgaataaataacaagtttgaataatcaaacctttctgtcccagcacatcgaggaccaccatttatatgttcagatgtcagaatgcccttggaagctagaaactcaagtacctgaagaaagattactcataaggaaaaaatagggtcccataatgatataattctgtgatagaaatattattctcttttttgttatacagaaaataagaacagtggtgcaggcattgcactcattacaaattaaaagcatgtccatccctatctgttaagaaggtactagaggacgggtatgtagttagcacctgtgctatgggccatgggtttaggtgttacagcaaaaatgcttcgcccatgctaaacgtggtaagtggctcatgctaaatctctccctcgtacatttcacaaatgtttaatgataaaatctccaaaatattataacgttagcaccaaaaaataggtggcatataataattaatggtaccaaaggtctagggaaaaaaaacacccctacaattccaaatgcaatacgttttagcctactcaactctttcctaaatgtaagttgctttggaatttctatgcatttttacatcttttctttcttgtttgcccttgccaaataaatgccaccatctcacaaaatacattatcatcttttccagtgcagcataaatgaaggacaatagtcattttgagtttttttttcttgatttttgtgcacaagtcataaaagaatcagagggagtagataacaaggatcttgtgggggttgatatgtccactgtagcacctagatcagttgttaagggatgtacttgctctaatgtgatatattaattggaaactaatgtaataagacataacataaaaaagaaatgcaaaccttcacaagctttcttattataggtatcctatggaaatcgcttttattctgctttaatatattgtgaagcatttgcagtcctgtcagaaaatagtacaaatagtttattagtcagtaattctagatgattgtatttcacgtaaaaagctgcagaatgcaagaaaatgtaccattcttattgatgatatccaacaggacagaattggatcttgttttcagaagtgcatcaagaattaacgaaagatcccttacactgaaagatataacagaagcatatttagactgggcaaatgtaacttgctggatgttattaggtaatcaaaccttttagacgtgcccccagcattgtcaccttccgctgcagtcacaaggagaagcttcaagtatccatttgttgcgtccttttggaaaaaaaaattatcagtagttagaataatatccaatgacagaaaaggtagaatggagagatatttggactgcttgacgcccaattgatgcaacacagaacacatgcaaatattgcctagcctttcaagttcaaaccacaccgtgtaccaaaaaggatgaccaagaaacaatttaaacctaaagaagtctaataaaggtagaagttcaatcaatcgaaagtcgttcatacactatgttcttgagattgatactaataaatgtgagaaatactaatccatatttcatacactgtcttttagcatttgcgctcaagaaatgtggaataccactatataagtttccctaatccccaacgcggtgcaaactccgtaagagaatgcctcataaaaaaactgggttgatttttagccatttagcatatgacaacatatcctaattaagagttgatgccaaaaaatcagtaaaatatattcagtcctagtctataattgaagtatatatataatgcaaaggacaagaggatacatacttttcgtttgctaatacctccatttacatcaagcaagctgttcaatcttccttcaactgtgcatgtcaggtagcgatcattaacagtcatatgtaaccctagacagaaagagagatacacttggaagaacagtattacctcccaaaatgtgctcactgtcaataggagctgatgatggattcagaatcaaatgatgttttacattggttttcttattagcgtggaaacctggtacccagtggctccccaaatcggaactaggcggaattccatttgttgtgcttggaacctttggtccatccagtgtgcatggagccctttgcaaaatttctgatgaccgagtaccatattctggaaactgccgcgacgtactctcaactgtccgggacacatggacaggtgtgcggacgacatcttcatcatcctgtgggctcaatgcttctaaggaattttctggctcacttgtgtcaaataaggttcctgaagtttgttgctcagattctaactctggtgggttcacagatgggcaatcatttgaatcttctgttttagtggaagcttcatggtcgacaatatctagatgtgtgccatgagaggacaaaccatttgcaccaagtacttcctcagcatcctcctgaacagccataggttcgaaagtccctgcttcagcatcatcttgagtaatcatatcagcacctgatatgtcaccaccgatgtaaccccggcatttgccagtaccgcaaaagcatttttgaggagcagcaccagatacacgaacatagttgtaatcaaacgtcaattcttcaccctgtgaggaaataaatatccattaagtgcagcacatataatacagatataggttatactgaaggatacgtttcatttgcacaaattatctctacaataagaaaggtggtggtggtagtcagtgtatcagataaccacttgaattggggtcttttgcatgtggctaggctattttatatgacttttttttgcaaattaatatgtttttcccaaaaaaatatacaacattttaagttggtatttaaatttagctagtataaagcaaactctcagtttctcaggacctgcatcatgttcattgatgatttcaagtttctagccttaccttcttgatgttcctcatagcaaatattccaatgcagacttcaccattgaccatccactgctcacaaggaaaaagtaatttaatggactcaaaataagaatataactaattacacaattttatgcaccaatcattatttatttatttatttgtaaatataacatatgacttgtattggacattatcaggatattttaagtaacaaaggcaagggatctggtcagctattcaaatataaagatcaaataaaacggttttaccttctctgtacggcaattaggactgcagctatgattgatgaaccggcccaagtttcctttagtacaagcatctatcacctagaagagttcaaagcaaaatgccaaaagtggtattaactattaactgatttaattttaagtgttagcatcatgaaggttgacataagaaaaacagataccacactgggttgtttgtatcatctattgatattataggaaatgatataaatgaactaatctgataatttctaatcgaaggcatatctaagaagtggcagggattgagaaagacgtgaagttagaaatgagggagtacatctatgcaatatgactggttaagaataaataaagacatacctcaccaccattaagtgccatgaaatagaaatgcttctggcctttagaggcataatacctttggcgggattcataagccgttatatcaaggacctgaaacaacaatgaagtaagcaaatcaacaaactcattagacatgaggtcattcataatagtagaagagaaattgagttagagagcagattgcataaatacacagaatttctgtaccagagggttgtacagttttggataaaaatggaatttgtatatactagtatatttttaatacataagtcggaaacacgacgaagtaatatcagagttacagttgtttaaaaatatatctatataaaatagatgcatggaatgaaggatgctactaatggaatcattatctcttcattctttttgcttttttaccaatatccatgtgaaaagaatgagataagtatcctggctatgtcagaacaaggtattcattacaacgaatgtgaaaccaacataatcaacatttaaacagagcatgtttccctgcaaaaaaaaaaaaagaaaacagagcatgttggcaacacatgcatgcatgcacaaatggctcagtgcaatcaacagatacaaggtattatttagtgacatgccaacataaaacattgctcccatgggcaagttgcactaacagaaatataacgccaccacaaacccggaataaacagaggaggggggacgataggcagcatgaagcactacctctccaacatattcaatgaggaatcgtccttcagatacatcttccttcaattgcaatccatagccctttttaccagtatggaacttaccaagttttgcataggtgcgcctttggaactgttccaagaactttataagttcaaacccagcatagtaaggaaacaagaacaaggatatgaaagaatctaacctgctgattggaacagtgctccccacatggacatgtacgtttggtgcattcaatgttgagtatcctgttcaagcaaccatctctacaacccattcggtcatcgtgaggcggcttacaattgcataccatgctcttgcattattgaataaaaaaaatagaaatatcaggtttgtctgctggaatttcaacccccaaaagaaccaagaacaaagaaataataagttgtctacaacagttcaagacagtttagcctgtactccatccaggcacataaacatgttctttcggacatgttgtcaaactttcaaaaaattgaatatcgataaatttttaaataattagattggaggcatgaaaaaatataatcatgtgtgtagatttgtctcgaaaattacttaaaaatatatcacaatagaaattagtggtcaaaattgtattttgaagactggatatgtccaaaatgattttcagggctgtagggagtactgatagaaaataaaaaggagataatataaattcaagaggttgagggagcagaaacataaataatatgagagagagagagagagagagagagagaggccatggggagcattttacttgtcctgaacaacagtttccaccttccactaatcatgctgtagcagaagggagaaatggaaatgtgcgcaagtgaaactgactgtgaatttttgctgtaactgaaaacttgtgaaccatggccatccttgatttggagtggctatgatacaactgtctgcctttacataggcacttcagtaacagttttttccagcttatcctacacgcggcatgggaagtgaaactatgaggtaagtggagaaactaaagctctgtttggtattgcggtgccttatgataatctcgttttcagaaagaacttttgaattttggtgttgagcaaactgcctttattttgatcttggtattgcggtgccttatgataatctcgttttcagatagagcttttgaattttggtgttgagcaaactgcctttattttgatccatgtggcaaacgataatattataatgtaaaatatgaaaattgggaaaacatgacagatggataacatattttatctaactgtgattcgatttgtagaataagctacaataattataagttcatttccacgggaacttaaaaaacaagtgcgcgcagcacagcaaccacaaactgagcctaacaatgtgtagcatgctcaccccccataagatttattgcaataccatgttctgagtacaatacacataaactacaaaactctatatgaatcttaactgctccttgcacataaaaagcaatatggtcggaaaaaaataatgctaggtaaatttaacaaacagaaaacaaaagaatgtcaattaagaaataaaaagtgagtagatcaacccatacctcatcaatggattgtgtcctgcggttacgatgtagaaacaagtttgacctgagaagtgcaaagtttggttctccagaagctgcaacacagcaatatgaaaaagtttgtcacaaatcagatatgatagagagcaacaaaagaaaattttgcattttctgaccagaatgtatagagtcaaaaattcaaacctttcgagtttgatccatcgccattagcttcatcagcagaagcatctgaaagcccaagctctgcattgatctcatcatctgtcttctcttgtggtatagagcaattggcaaatgtcttatcttcgttttccttacaagtcctttgtataaacaagaaaggaaaatgagttgtaatttattaaccattcaacagataaagaaaaaattcaaaatgagtaggcaaacacatctgaaatgacatctacatcaaaaagatcaataatattaaaccaaatggaagaattaaaatatatattttcaatgtagcggagccacatgttggtaataaggttaatctttgccctctcaaacttcacaaacacaggtcatttttcacttttcagtctccaatgcaatattgcccatgtttttcattacaatatagtacatggaaactgtctgttatgaaagtattatgcaagacaaatcccatgacatcacctctcaagtcaaacgatatgcttctacatatatacattaatagtctacatgaatcccgtggaaagtatgagcataaatgaaaaaggcccatgaaatacgaatattttaaggaatggaatgcaatagatatctgtagttacactgtagaattgaacagcctctgtttgcacaggaaatactaatatgaaatattgaacatgggcacatctaacatgcaagaagcacctttcttcctctgggtaactggctggctgctagccaactgccaaaatgatagagcacaaacaaatgcaaaatgtaagatttactctacagattatctaaatatagtgtcagaagtctttcttcctttagaaagaaatatgttttccattttaccaaacttttctatttcacataggtgattgtggactagcatagcaaaacaaaaggaaatccaaacaaaaaggatttcaaatgagttattttccagtggaacaatgcagtaatagatttcagcgtatgattactcaattaggttagaggactggtgcaaccaagaaaattgatcaaatagggatggcaggatggaaatcaataccatctgagattttcttttgagattttatctgccagttcagttggtatgcagcgccatttttcgcaatcatcacaacaaacccaagcaggtgctggtggtacagatgcaccatcagttttgcaagcaacaactgcaggtaattcaacagatacggcagaagagttcttgaatacaagttcagcagcaggaataagatcacctgtataaataagatagttagcaccaacagaagctacttgataaatgatagtaaaggaggatcaaatgatagaagtcaaagatgaaaatatatactctgtttattcatgcgaggttctgacaggtcagttaactgagccggcaaaccgtaggtgttatcagctatatttttcttcttgcttctgcccttcccatgtggatcccgcaccttacccttctttcctccatgactatcctttttcttgcgccttagtgatttcacattgtcaaatgcactcccttcgtcatcattgtcaattccaaaaggacgcatattgtcatatccatgcataccaacatcatgtatggcagaagttacgaccttagaacaagaaccaaactttggaggtctcgtatgaagcagcaactcagatggatcaagtgaaggtgaatcattagaaaaggacacgagttttgaagcttcactagatgaaattttggtggaacttctatttttgtttatgttttttcccttctttccatctttctttcggcattcctgctttcccacatttctacctttcctcatcgtattggacttcgctaaagtttgctttccttcaccaatatcattgtacatcatggcatgtgatggaatgacatcttcctctcccatgtcgttctccctcacagttttgacctgctgctccaaatccatcaatgatgaagcatgatgattttcacagtgagaagtagataaagcagatgcacgaagaccacctccaatcaatccaccaggacaagatgggttttcatgcactataacatcaagggttgcagaagtgttgctttcacatgtaacagaagctatatccaaaacagagtctggtgaaaacccaactatattatttagagaacgttcagaagttgaagtaccacactctccatggatgtacccagggcatgtttcttgagtaacattctccaagccaaactgttgtgtgtcagtcaggctagatgttaattttagagtatgattaccttcaacacactgtgcagctttgtgagcaccattcggagaattgaacaatgcatcagaagaaacattagtatcaatcctcactgaacaggtcggttggccattcaattcacctgctaaatatccaatatcagaaagtgatgtgtttttatattttgaacatcttgaagttcgaattttccgaatagatagctgttttttctcgctagatcctctatttgatatttcttttcccaaacaagtttgatgagaacgagaagttgaaggaccacagttctgattgaaaccatccattagcttttgtaggctgccccaagcagaagagttcaatggcctattgatgccacttcttccctttgtggttttgtttgggaacttaatcatggtgcttttaagtaatgagcttacactgtcaaccttcttagatttgcgtgtactattacctgatttgtttatctggtcacacttctcaaaattagaatttcttgaagaggcagctcttactggattcctccgcctgaagaaaatcaccggcacttccttttggttatgagaaccattaccattctcaacaaaatcaacagagcaagctttgtcatcagtggaagtacacgtattgagctcttgtaccaaacagtctgaagattccagtccaagaccagcagaatcttgatggcctaggcagaaggcgggtgtttccctgccactataacaaggttcattttcacaaggtaggttatgggacgaactagtcagatctctctctgggggggattcagagatcacatgcttttcacgactttgttggagtggaaactctatttcagcacagggatcacaagatcttctagtgcctgtattttctacttcacaaacagatgcagttgaaccctttggaacatccatccagaagtgttgattctcatctccagaagcctcagtctgaggcctgctgtcaaatgaaagcataacttctccgagcaaatcatgagccaatttctccacaccaattctattttcagatatctcaccaactaaaccatcctctttgtataaaagaacatcaatggggctattatagttagagggaatcgatgcctcatccactggacaggagaccactacatcactttttggatgaaaatcatcctttaccagctcatggttagcaccagtcatcgatctcagaccgtcaccaccacgtggtaatatgtcggtgccatacttccctgaatccgacaaagctacgatgctgtggcatggttccacttgacctgtctgtaagccctcttcacatgtcttagcctccaatgtggaactctgattctcatctgcatgagactcctttaaagacctactctcacaggaaagtacacctcctcgctgtgaaccatgcgacactttctccatgattgctctatgctcagatgttttaccaatctgaccagcattgccatcaaaagtaaaatcaacagagctcacagaaattgaaggaactgaatcctcatggatagaactagagaactctcctctagtatttgtcaacaattcatccttttccagctgatggttaggatctgtcttcgaacatatgacattcatgccatatgatggctgctggacaccaaattctgtcaaatatggaaagcccttgttatcacattgtggttccttggaacacatctgtaaatcatctagacttttctctacatctaccccacctcgcaaaacaattccatcacacgccaaatcaccctgcccgcattgactcccctgtgtcaccttgttccccatgactgctatgtgtcgagcatccttggactggcatccttcactaagaggggcatataaaacattgcaccacaaatcaccattggccatatgagacatccccatatcattgagagtttcacacgcacaacctgccttgcgtaaagaatcatcaataccaccagaaaaagaagggattgaatcatcctccaccgacctagagacttcagcttcaatttttggtatcaaatcaacttgtttcagctcattattaccctttatcgtaaatcccaccccatcaaccacttgtggccatcgctcactgtcattatgcaaatccgacaaaccctcgctatcacaatgtggtttcgtgcaaaccatctgtaaatcttctgtgtttgtctttacgtccgttgcgccacccaaatcatctttactgtccgccaaatcaccatgctcacaaatgctcccctctgtcgctttgtccagcaagtaacgcatatggctgttatcactggagaaaacttcgctgaagggagcaaataatgtcttattcgataccccgccattgggcgcatgacacgtctgcaaattgctgggttcagcagattccacatgataactgccatgcttctctcccgccatgttcatagacccctcctgcatactagactccttctcaccaccaatctgaccccttccttcaaaaggggtagaaacattcacagcagattccaccaattctgcagcggagccacctccattatctcggactccatcttcctctgtgggcaggcgcctctcctgaccaccgcagaccttcccaccatcaccgagctcaccgccaatctcaggaacagcgagcaaagccaggccaccgccgccaacagcaccctcctctcctcccaaccgcccaaccgcagcatgatcctcccgcccacgcgcttccccgtcaggctcctccatcgaagcagcgtgtcagcggggagccgcacggatcgagaccatccaatgcacgcccccccacctcccctccccccgggtcctagccgcttctccccacctccgatcacacccaaaaaaaaaccctagaattcgcgagcccctgcaacctccaccgcaaacgaacgcccaatcagaattccgcccaaaccctaccgagaccaaaaataaaaaacaacgagagagagagaacaccaacctcaaacgaagccacactacggcggcggcggcgaatgcctgcggaccccggcgcccggcgaggaggggcccgccgcccgtccgtacgcgcgccgcggcggcggggggcgaggaggcggcgagtcgggtcgtcgtagtccccgcgtcgttgcggggaggaggcggcggagaagaaggcggatagggaggaagagagagagaaggggggaagaggaggaggaggagtataatatgaggaagcgaaagaaaaaaataaataaataaagcggaaaaaatagaaaaaaaagagggtggaggtgtgttgtgcttgtgcgtctctgtgggtcggtttttgttcttctttgcggtgcgcgtgtttttttccgtgcggccgttgggatgtggagttgtagggaacaggcgaattttgtgggtgttttgttgttagattttcttttttttttactgcagcatgtgtgtttcaagtacagtaatagttttgttgggagtaaaagggtggcacatggtggtgattggtgaatatatttgcttcgtttgcttctttttaagatgtactttattatatatttggtttcgtaaaaattactgttgtgtatattttaactatctatacttgcgcagcacggcaatttgtttgtttatctggtcgtttcaaatattactaaacttcaaatgtttaaaattacgaatatatctctataagcatggatatgaaacagcatgccgagtatagtgcgggcacttgctggctttatttcttttttgaaaaataacttattacatctatagctatgtagaaaaaaaactatttgtagcatgcagttaactgtgtatgagataataaattatttccttgcccgataacttacaacataggcaatatcaaagtgtccaaaaaatattagaggcgatagctttatatgcatgaaatagtttccttcatagaagtaccgtcaacatgcacaaccctacatagacacgtgtgtgtatcatttaaacataatatgagaaattatatagtcttaagctcttgtaaggaaacacacaatttcaccaaaacgtgtgcatacgtttattactgagatggtgtgatttagtataaattaaccctagagcacgggtttattcctcactgtgagatctaattggtgtgaaatttaagtaatgcttatggaacacggcaatgtgttttcttatcggatcattttgaacatagggaatatttaagagtctaaaaattgtaaccaccgatacagctccataagcataaattagaaacaagaggctggtacatgacgcaacacatatgcttaccttaaaaaaaattacacctatagctacgtaaaatagacaattgtagcatgcatttaaccatgaatggttatgcaagatagcattttatttcctcatatgttaaactataatatagaagttttcaaaatcgttatcgaggctacaactccataaacacgattttgtttcttaataaaagaccaccaacgtgcacaaatgcacgattctgatttaaacgaatcccgagatacactcatgctcttataagaaaacacacaaagttaataaatgtatgtatccattggaacccatagtataatgctatgatttatcaaccctagaaaaaatggaactcctttgatatgaaatatagttggtgtgaaaaagaagttggaaaggagtgcacacccgtggcagttggtggctggtgccaaagactttcaccgccctgtgaggttttgacttcaacccatgactgtaggagtgaactcagctccatggcagaatctttttcacaggggcctaaatgcttaacgtggcgccagaaggaaaaatatccaggatcaacaggaaaaaggggctgaaaaggtcaactaactaatcatagggacgccactatactcgcatcacatcggtcgacgtgcacaaaaaaaaataattgagcaggagatgattatataattccactccaaccacagtactagtgtactactactactcctaactttaacttggggaggccatatcgcaaatatgtggataaccggaggggccaaaccgcaaaagagccagccaagccgcgcaggcatcctgatccgctcgctctgctacgcgcacaagtcacgcagcgcgcgatcccgatgacacgtggggcccacatgtcgagtggggtcggggagtcaggcacggccaagctgcgggggggggaagggaaacgctgggatggcgtaagcctcgtggggcggtccacccggtggtgggggcccacctgacagcctgcgtgaggggcggcccgtgcgggccccacctcggtgcgtgcgtggctgcgtacccccgcttcttgtgatcttttgtccgtcgcgtggcgtggcgtgggcgtgccgtggctgcgtgtgtttcggtgcgtctcgccgtttttttttgtttttttgacgtgggattttgtgttttttttttctcttttcgtttcataaacgaggagcggtggggggtaaaccggtaaatgaaccccaacccaagctgcggagctgggacgctggttctgaaatcattgaattttgtagccttgtagtagtagacaacgtcgcaacgatccaacgacggtgagagctgaggagcccagatcagttatcagatgtatagccaattattggttctaaatcatctgtaatcaattcatataatagttatttataatcatatactttctctgtcccataaaaaataaatctagaatcagatgtgacatattctcgtacaataaatctggacggatgtatatccagattcgtagtactaggatatatgtgtcacatccagtactaggttagttttttatgggacggagggattactacacaattaatacacagtcccatctatcatatacacatgcatcttgtagtccatgctacagctggctataaatctgtagtccgttactcttctctctcatcttttatctccttgaaatgttgcagtgacctgagtagcactcgaaggtcctgagttcaaatctccattggagcaaattttagattgggttatttgagagctaagttccctgttcgataggctaagttcctaattttaaaaaagctgcatatatccacttggatgcaaaggccgggtaaaaaaatacccttctctaaaaaaacttcttgaaatgtgtttatagctgatttatagtctgctattgtacctgctcttagtgaccaaaacaacgatggtttattcgaaggtttgggcttatattttgtctcgaaatttgattgtattattagagacggtcaccgagtcatgagtacaatgagatgtggtacttttttttgaaaaaaaaaaaacagagctatggtggctagtaacaaggattgcgacggaactctctaagggcaagtataatagactacaagacagttattagcttgggtacgtcatgcaggggatagtaattaggagagagaatggagccaattcgaccacatagtcaacggtcatgcacggggcaccgaagctcatgcatcctgcactttggatcatcattggacccatcgaaaatatagcgaatcgaatataaaagttgaactcagattgatagataaaataatagtattttagagtataaatgattattataaatgttgcctgcagtgcttgctatagttgagttgctaatgtttagagcccgcaacgggctgtgttattgcccttgctctaagggttcgaggttggtgtatcatgatcctctctaattttgcatttttattctcacccgtctaaactttcttgcgttttgcatgatgacacgttttccttcaaatgaactaacgtttcttctcttttaagaaaatggattataaccccaatacagtctctatatctaaacctacattgtcaataactaacatttcttgagatagataatgggcaatcatcccactttttttttcatacaataattaacccaaaaaaagaacaaaatcaaccatgaactctgccaacatacacagtagatacaaaaataaaattggtgcaccggagtatattgtgctatatatattatgcatttacattataaccctaatattttgcttggcggtttgttaacccacaaaccatataaccatatttaaaatctaaggcattgtttagcatgtttccagatactcaatccacgttagttttggacttttatccaattaaattggttgcaaatatttcttttaaaatagaaaaaaatacactcatatgttatcaatatgatcatatattaacctagaattaatcatcatttatttttagtcttagcttctaaaccacaaaattaaagtaggaatataaacctataatttaaattgcttcgatcatgtgtcgctgcttataagccctactgctctgtccctcccctccccccccccaaaaaaaaaaaactggatttgaatgtggatacatatatgtccagattcatactcggtaaaaaaaaattaaacctcgggtttgaatctgaacacattgtgtgtccaggttcaacccaaggttttttttttacggaagggggtagaaaataaaactcagcaaaataggttctaatttttcagctcaataaaatccagagacatgggctgtgctctttggacaactttcctaacatcattctcgtttttcgcacacaagcttttcaaactattaaacaatgcttttttttaaaaaaaattccatagaaaaattgttttaaaaatcatatcaatccatttttatgtttttttgctaatacgcaattaatcctatgctaataaggtatcttgttttccgtgtgaaaggaattactccatccattctaaaatataggacacaactactttttaaaggtgtttcataatataatgtgtgcatgcatgcatggtaattaattagcatatcttctcttctaaattattattttttaaatcatacactcacatgatgtttaattctattgggtgcatgtattgtattaattggattgattcaaacaaagagatgataataattgtttcttggttattagattataggtggttatgccttatattttggaatggagggagtagttcccaatacaaggaaacgaacacagcctaagtggagtaggcaagcaagttttttttttatgtccgcttatcatcattcctgttaacttttttttataattttgtagtaatatttactaatcagatttattatccacttacatgagtattcatacggccaaaaaagagcaactgaaaactaagtccttgtttagttcccaaataattttgcccaaaaaggttacatcgaatctttggacacatgtatggagtattaaatatagataaaaaaaactaattgcacagtttgcatggaaatcgcgagacgaatattttgagcctaattagtttatgattagtcataagtactacagtaacccacatgcgctaataatagattaattatgctcaaaagattcatctcgcggttcacaggcgagttatgaaattagttttttcgttcgtgtccgaaaacctcttccgatatctggttaaacatccgatgtaacacctaaaaattttcatttcgtgaactaaacaggcccttagtgcgatgcgcttatctgagacagagggaatattacaattttacgtactccctccgtcccataatatagcaacctagtaccagacgagacacttcatactacaataaatccggacatacttcctgtccagattcattgtaatataaaatgttccatccagttctaggttactataatatgagacacagagggagtacttgcttacagtaacatatcaagagccatactactccacagtttacactcgctgtcatgcgatgaagggggttccacctaagcctgccaatgggtctaaatccaatccaaaaccaatccaacccaacacctgccgaggcagcccaccaaaccaatccacaccattttcccatttataagatccaacccaaaccaacccccaagcacttccaggccaaactaacccaaaccattccagcctaatgggttcaacccattttatatccatgggttcagtccacgtacagtccaatcttcatcaatcgtcaccactcaccatcgggaggaaaggtccaggacgccgccgcgttcgtaaagatcgagcagctcgttcccctttccctccctctcccttcgctttctctcttccttcctagggcttcccctcctcggcggcgcttcaatcgaggaggagttggtcgtccacgacgtggtggtcggtgtcgggctgagcggcagcagcagcggcggcggtgacgggacggcggcggggaggcggcggaggcgcggcttggcctcgtcgtcgtcgtcaacaacggcgacggcggcgtggtggtgtagcggcattgggcagttctagaaggttttagaagggggagggcgctgctacgactacgagctctgatatgaatctgcgtctcttaagtgtgctttctagcttgtgtgtgtgtgtctaagcttgctttgggcttaagctttggttaagcctcacacacacttcgctggttgctgctgctgggtttggctttgtactgatcactatattcagaggccattagtgcaatccactcgtatccatgggttgaatccatggttacaatccattttggacccgaaagaattttaaccacatccaaaccaacccacaccgtttttcaatgaatccaaaccgctccagtccattatgagtattgccccatttgaatccaaccaaagccagtccatttagaaatccaacccattccacccatttacatccagtccattagcaggcttagttccacccccagtcaaaaccaggtgggccagcccagtcaaaaccaggtgggccagccagcgaagtcaccctcattgtagatcgttgacccaagtgtcagtcagtcaattcacccgacgggtgaaagaacacttcctcttttcccccccgggatgtgacgtgcactcctcctcctactagtagtagaagtggtactagcagtaggttctgaaatggtcaaagcgaaggaccgagtaataaaagagaaaagcgaacaggaatcatcccccggttgaccacgccacccacggcgccacgcacggccagcatgaaagccccagtcaggggtcaagtccccaccaacctcacctcattttccattttccattttcctttgtgtttggacggttttttgtttattaagggaaaactactcctaacatgggcatttgtgattctaatattttctgctaaactagtacggagtagtacgcatatgcatttcaatggacctttgattcatgggttcatgggcttatacgactgggaatgggcttcaagtttgacagtggggaattatattttggaataagttcactggaggtccctcaacttaacaacgagattttttgtggtcccttaaccacaaaaccaagaatgtgtacccataaactatacaaaaccgtttaaaagaggtcccaaggcagtataacagcatggtttcgctgacgtggcattctagtcagcaaaaataactaaaataaatatgtggggcccacatgtaagcgataaaatgacgtgggtcccgctttttgtctcttcttctctcgcgcgggaggaggcaggcggagcggcggtgtcggtgagtgagcgaggctgtggcggcaagcggtaggcgagcgacagctccaggcgtgggcgaagcaggggacgcggaggggcgagcggcggtgggcgagcatatgggggagagaaggccggtggcgggagagggggagagaggccaccgacgcgacggtggcgacgggagaggaggcggttggcactatggcgagctccgccggcgcgacggggcgagtggcgacgggggagggggaga

SEQ ID NO: 4938 - DNA, 36799 bp, Oryza sativa
ttgtcactatagttgcagttttctgaaatttgctcaccaaaaaaaatgcaatatgactagcaattttgagcaatattttgggtggatatgaagtaaagaagtagcattgatttacgtgccagtttcactgacagaagggattacctctagctgggtgaggatttcaatagtatggttgaagtcacatccattagcatagtacagctctgcaaggctctctgatgaaaaatcaggaaactgtgaagctaaatacgctagggggtcaagaacatcgtctgttgctgcagcataatcgctagcaaaactgtcagaaaagcctgcagcactttcagaatcataatgaaggccctgatttccattcgtaaaatggagatcccctacaaaattttgctcccaattgcttgaacccatagttggaaacgatgcttgtgaattatcttcataaagtaaactggtaagccccagttccaggctcttgttagcttgagaagataaatcatgctctcttgaaaagcggctagctgttgttccatagaaagggggtgcattcaaggataatccagcaagagacaattcttcaggttcttgttcaattttctcaaaactgaagtctggaataatgtcatcaggaagctgcttacgccaaaactggtgtgcctcatcatccgagttatttgactttgatgactcggacctatctaggatagttttcccagaagccctaagatctgccttacttacatctgagacagcgctactctcaaaagatggtctaatacatgaaggtacaaattctgctgcgttgggattcaatgctgtgactttatttggcaacattgaccttgtatctccattggaaacaactttattgagtgaagtcatttttaatagaaattacatgtgatgttacatgtacaaggggaaatttgcaataagattttatccaagccctgcaaagatatcaacaaggattagcatgaacatggctgagcacttgatgtaccacaatcacgtcaacctttaccaaaagattatatatgaacaaataggtgtaatttaacagaaaatataacttccataatattaataaactagtatttgtcaactcaaaaaaagaaactagtatttttgttaataagcaagacaatatgctaacctacaggtaaggctcactagagctagtaatctttgtcagactcaataaaattgatagtgttgtgggaaatttcatttcaaccctattataaaataccaaaaacaaataaaccaactacaagaacaacagctagttcttgctattagggcaataaatatttagaacaaaacaatttaattacttcatagtatgtccataaattaaagccagcaagccgctgcatcatacaaagattgaagataacacaataggatatataaggctggacaaatggacaaggattcagttatacaagttcttaaaaagtaaaaatctacaagccgtttactttccgttaggattcataaaatattttgtttgtttgttttcactgccagggagaaataccacaatcaatgcgactgatactgataatagaaatttccacattcacagaagacccaaaatcagtagctctgtcaaccaaaaaaagaagagaacttctaatgatttgctcccagtttccacaaaattggcgcgactcttcttagtaactcatatagctgccgtcgcaaaagaagcaagttttctgacacattatctcaatatctcctccataaattcatcaattaaataggctcaatatctcctccttccgtccttcgttctcacataccgacacgctgttctctcacccaaacgtatatagaaaccatcaaatcagtaagaaaggaaccataacaaaagaaacagaagcttattgctgtttttttggaaaggaaagagaagatatcctcaaaagtccacgcaactccatctctaacacagaaaagggaagattgtacaatcaaaagaggcaaaagagcaacggaaagacgagcaaacagtacccccttgcttttcctctccgtccagcacacgcacgctaaacaccccacgccctcctccccgtctccccggccggtggcgagatgcctcaatcaaaaaaaaatcacgccttttccgggttttccctaacccggacaatcaacggaacaaaaaaaaaaatcctaacgccgggcgagatctacacccccagatctacccggaacccggggggagccagcgccagatctggagaggagaaaaggccgggagggtgttaattaattacctttccgccggtcgatgagctgatagtgatatatcgctggcgaccggcccatggggcggcgtcccccccaacgccgacggtagatgagaaacggacgccgccgcccgcagggggattcgggtttcaccgcccaatcgcgcaacgggagtccggccccccgctccgggagaatcgggggcggaatagggttcgccttcttgggaggcggaggcggaggcggaggcgaggagaggggagggaggagggagaggttggtgcggatggggtgggggtggataggtgagggatggtggagtttgacccgtcggggcggggggtgggggtgggggcccaccgtggcgtggaggagaagcgggtgggtggtggtggcggcctcgggatcgggggcgccgctgcgaggctgaggtggcttggcttgggttggttggctggctggttgcgttgttgcgcggcgctgcggggtgcggggggaatatgcgggcgggtgatgcgagcgagcgtgccaggaaatctctcgaactatgggtggctccgtccctgactggctcagttggctcgcctgctccggctttgcttccggcgctggaccacaccagctgatgatgatagcttgggtgcgttcggcgatttttcgcgcacacactctcgcctgtcacatatcccatccttaaaatttttcaccgtgtcacattaaatatttaaatacctacataaaatattaaatatatgctaaaaaataactaattatacatattgcgactaattagcgagacaaatcttttaaacctaattattccataatttgacaatatgatgttacggtaaacatttgttgatgatggattaacgaggcttaataaattcatgtcgcggtttactgacggattctgtaattagttttttatcttatgtaacacgccaaaactttacacccctaatctaaaccctctctaaattattagatgacgtattttttatagaatagttattttaaaagattatattaatccaacttttaaattcctctaaaaaaaactattaaacttatttcaactaatatatcactccgttgtgcttgtagggaggtggagtttctaaagctgtgtttggcagcctgtgttggaaataaatctcctgaacacagaaaacagagtggtccattagcgaatgattaattaagtattagctattttttaaaaaaatggatcaatatgtttttttagcaactttcgtatagaaacttttaaaaaaaacacatcgtttagttgtttgaaaaacgtgtgcacggaacacgagtgagaggaattgggaacaaatgctgccgaatatagcttaagatcatcccaacccaaaaactatattagttttcatacttgtcatgttgtcatggttacagataaggcatacctcctatcctaccacttatagaatatacggatacggcatacattcgtatgtacgatatatttccgtatacattaagaaaattaacaatagatcatggaaattagcctcatgggcaagtgaacaacagagtcctacttggaaaggattaggtttatactatatcgtgcgggggcctataatctctgatttttacttggagactaaggtgattcacggtttaggggatcgaatcataacaccaacacaaccaccatagcctacaatccgaaggacgtgaagcctactcgccaggagatctcgtcgaaaccatctcgatagggatctcgccggtaatctcagaatcattggttctggttctctattgcaatatgtggtctttccatatcaatctcatataaactggattagggctattaccttacgagggacttgaaccagtataattcttgtattcttgtttgcttgatgtcgtaccaacataccccaataccctgttcatccgatctatggatatcccctgtcgacacatgtcgtatatacactatgtatagaaactacttcatccgtcctaaaaaagtgcagctgtgcgtttccgcatccaacgtttgaccgtctttcttatttgaaaaagaattatgattaatatttttgttctcattacacaatagaacatgaatagtactttgagtgtgactaattttatttatttatttcataatttttaaataagacaaacgagcaaactatggacacgaaaaaccacaattgcacttatattgggatggaggtagtatatatctaatagaaatcatctatcttctctatccttttatctacatatcttgttttcattctagtttttatatggggatgatttcttgcatgagaaatgatttatttatctttttatctctcttctcattaactcttttaccacatcagatttttccatatgtgacaatatatttaatgctatggacactgaatgataaggagagttggggatggcctaacctctaccttcgaatgaagcctaagctagcttggttctatttgctacttcggccttgtttagattctaacttttttcttcaaaatttcaactttttcgtcacatcgaactttcctacacacacaaactttcaacttttccgttacatcgttccaattttttcaaacttttaattttaacgtggaactaaagccttcctgttcttttattcttgattaagatatagattttatctcaatttttgttgctaggctttttaatttgttaaacggtgaaagagtgtgtttcgtgtgaaaggcttttcacaatttgaacgggccactagctactacggcatttaaaagaaacagcaaaaaagtattagtactgtttttatgctagttagataatctgatgacttgccccttcgcaattgggagtacggaaaatgtcatcctggagttggagtgtggattgaaaaggtaaacaaacaagaggtcgccagatcaaataaagttgttaaatatggggaagaatattggatgcctacaccaataatttcacctcccttatctgaacttgtccaacaaccaatctatctttatcctttattagacattgtacactcaactattgtgtccctggcctttttttttctcaataattaacctatgtttgtttacatgaataaatgtaaagtttgttacacacaagtgatttgcttacttattacacacaactctattttttctcgcggttgtatatacttgtatgcaacatttggggttaatgctaatcatattaataaggatgttcgctggcaataacaacatatggctatatagcaagccagcaggaaggcagcagccaaccatgaatcacataatcacacttcagatgggttgcaattgaagtttcaaacggctgggcttgatttgtaactccagcccaaaatattgcagctaccggtactgaatggcctcatttacgatcgagttctttgtactcaaacggcaagaagaatgatcgtaagattttcttacggtatcattagttgacccgtctgagaaggcattttttagttggagaatctaattggcgcaacatttgcgactttttttagtacaattataatagtaattgaatttgcacgagattagtcgtgttttgtttacaaaacggcaggagctctgcctaatttaatttaaggaaggggtgaaagatacaaggttcgaacgtacagcaaagggaaaaaaagagaggcaaaaacgactagagattacaagagcagagccactaaagaagctctaaatatcgtcgtagttttcctgaaaagaaatatcgtcatagtaagtagccaacgcgagcaagccaagattatgtgaaaccaggaaaagaaatatgagtctcatcctgattattttgctggaaatcctcctattacgctccagcaagatgttccaccacgccgtcatcaaagtcattgcaatcacttatcttatactccctccatctacttttgatagtcatatttcatcttaacacacagaccaatgataagtgattctacttatcatccatttaaacatgctactagtcattcctcgtaaacaaacgattcattaacatttacatttctcgatgtccatgcaaccaatcttgtgtggaagaatggagagtcatgcattaaatctgagaaaatcattaagatgatagattattggattgaaatatacctatcaaaaatagatttttcagatttggaaatatgactatcaaaagtagatggatggagtaatgaacaacaaattaagttacccacacaatgagttcatttcagaggaattatagcacaagcgaagagagtacataaacatggatttttgaatagctaacattacaaaccccatgtacaaacatggtacaacgaaacttacagctctaatacaatgttttcaactactactaatttacaaggtggccacaattaatatccaattgaacggtgtccaaaacaactggacacagttacaaattgcaatgctacacacacaacttcatgctcgatcacacggagcttaatcatgctcctctctcgagcaatcatcaatcagatcacatattattattattctttgagagccaatctacacatgctcccaagtttattcttaatttattattaattgattcaataataaactcgccattgacgagctcaacatcccaatcattgtggcaagcttcgccgccggccgggaaagcaagcaatgaatcagtcgtcgtctccgccgccggggcatccggaccccgcggcgaccttcctcccctgcggcggcggcggtggcgcggccggggacgccggtggcgagtcgaggcagcggcggagcagcctcgagacggcggcgacgaggtcgtcctccgccgcggcgccccccgcgcgcggcgcggcggagcgcgcgaacgcaacgtgccggtcgagcgcctccgccgtggtgatggtggccttcccggcgccggcgcggcggatctcgtcgcccacggcctccgcgcagaggccgcacacccaccgccccatgtactcctcccgcaccgccgcgatgtaccgcggcgtgcactcctccgtgaagccgcagcactcgcacctggctgcctccacctccatgtcgacgacgacgacgacggctactcctctctccttaccgctccttctcccagacggcgtaggcggggacggtggcggcgctcggcgccgtgtggcgctctccctcctcgctccggacggtggctacggctgcggctgcggcggcgatgacggtgtcggcggcgggtgaggccggtgtcatcgcaggcgacgtctcgctctctcctcttctcttgcaccgccgctaatctttcactgcttcctctccaccgaaacgtgtggtctccatgtggtatttatccgcaaaacggcgtggagcgggtggggcccaccacgaaacggtcggggttcctcccccttagacgcggacacgtggggccatcccttggagggcccacatgtcagtgagtacgagtggtgtatgtggcggtgagagttggagagtggaagagggacggggacgcgaaagggaggcccacgtcagggggctgatgagctggaagggtccccaccctttttaatgtgtggaccttgacagctggcgacggcaccgaggaagagaggaggggagggagtggcggccgccgcgccaccaccacttgactagtcgactactctttctctgagctcctgctaggtggaattggtgcaagttcggataccgtgtcgttgtcgttgggccctctcgtcattttcgtgtgcgctatttatcgtttttttttgtttcaattgataaaaatgatttgtcgcgattgctctttttttttatgtagatgcctacaaccataagattcataatgaaacgcatctcaaccaaacaaggaaaaaggttttgtgcccactctagaaaattgaatgacataggagtatcaaagcaacctacattattatcttgccaccaaacataagctatcgtccggttctataccttaattgttttacaaagttaatctcaactacccataaagatcacaccaaatacaatgaggttattcggtaattttgttatgtagctgttcaggctacacgggatagcgcagccactcggctactcggctacaggtctagactacatcctagccattcatctgttgtagctactgatttatccgctgagctactgttgtctgtcgcaggctcgcagcaggcagcgctgcagtagctaactctttcgaacagatttaatatgaaagttcaatctatatataaagattgaactacatttggactacatatataaaggcaaaaaaaagataaataaaaaaacgagtcccatctctatacattacatgcattaatccttcccgcttaccatagaaacaaagtggcctaggtcatgtgctgcacggtgcttatcattgatgcagaaaacctgtgagcaaatgtacatgaaacatggcacgtactcaccgaaagaacagaaaagaatcgcatatccatgggaaaagaaatggagagcatcctgtgataaagccatgatgcattaagacgacgtacattgataggatcctgtgaagaaagagagagaaaagacgatcgtcacatactggtgttcgagtggtgacccaaaaaaaaaaaaaaacaaccaccagatgatcagtccgtgcatgcagggacgccccggacagtccagccatgtgacacggacagattggtcatgattcatcctactacacgttagtacgtactcatccgtaaaaaaaaaactcaaatttgttatactacatgacatatttctagattcatttttttttactgagggagcaggaataccagtactaaccagggttaatattaccatcggtaaacgcgcggttaccgggcttaccgcggggtacgataatataaataccacggtaacctccttaaattcaaataatttttaaaaataatttgaattttttgataaattttgcacggtttttcacggtaaccgtccttaccgccggggccggggttaccacgccccggcggtttggaaaaccctggtactaaccatgtgattgagcaatgcacgtacattgcgcgtgcgcatatatatatatatatatatatatatatatatatatatatatatatatatatatatatatatatatatatatacagagagagagagagagaacgaacaaacaaaacatacacgaaatatattcaatgatagaccagatcatatacggtaattcaggtgaggtgatatcgtagtttcgtataagcttgtggtgagactctgacgtttgttctcatttttgcaaggaatttcgaggaatggatatataaatggacttacggaaatgaatcccgaggtatactaatcaaaactacgtgattttgtaagagtattatatatatatatatatatatatatgagtttatgagatattactattttaaaactgcttttagctttataaaagttaatttatttatggagtatttatattctcgaataattattacaaatattttattcttgtttttttcctttttaggctacaatagtgagctcttaagaggcaacatgatctgttcttgttatctttttattttctttaaggctatgtgcatcttgatgcagagatcggtcgtaattttactgtttaatgaaatataaccattctctatagaaatttatatatttaaccatcacgtagaaaaggaaccaatacagtcaattcgtacagctatgtgtatactctctctgtcgaaaaaaaacttaacctaggagtagggctgtcaatgagccgagctcgagcgagtttggctatgtaggcttgagcttgacatgaactcaagccgagcctggatattgatcgagcttgggagtgagctcgagttcgagctccagcaaacttcgagcctactcgagcttgacagcttgacttggtgaaactccaaagaacttactcttgtataagagatattaatgcaaattatcagtagtaaaaaataatgggtgctacttgtctttaatgaagcctctgcagcttttctcatgaattcatggctttgaaacgttgcaattaacaaaagctagctgctacatctaataggaatagtagtactattattagcaaccggataattgctttattgagaagcattaatgagatcttgaaacttgagcaggtcatgcacgatgacaaatatacattgacccatcaaaaatatattcatacatgcaatgcatcttacgctaatcaaaccctgtcgagctattcgagctcgagcttgctaggcttgcgagtctcagtctaggcttgagcttggtttgtttagtattcgagccgagctcgaatcaagctcgagcagcttgcgagctccgagcttttttaacagccctacctagaagcgaggggatgtaccatctcctagtacaacaaatctcgataaaggatagtccagatatattgtagtagaaggtgtcaggttgagttttttataggatggagaaagtatgcgtgttcaatggaattaacaataggccatccagagttctctagatgtatggaccaaatgtggggcgtacatccatgtgtactcttgcacgtacttcacaaaatccttaaaaaaatgtttttttgcaaccgcgcggacgcgtcgaatcgactgagcgatcgatccaccgcaccgtaggagcggcgcgtttcgctgtacgtttggaaggtatcgcgtgcaagaggacacagagcgggcggggtcacatactcacatgacgatgacgagatcgatcgacgatccggctgggatccgatcgatcgatcgcctcatcgccggttgacgtatgctaaaagttggtggagatcgaccaagtgatccacctacatcggaacgtacctgtacgttaatttttacctggctaagcaaatgcatgcatgaatgtaccgtgggatagcgtcattgtgtccgtgcacaagcttaggacatgtacagcggtttatattagtggtatctttattgccatgcaattaaatttgatgacatggaagaaaaagaaaggagcatggttgttatgcatgataatgctcagagtcgactcttagcatttattagagcaaattttgttgcatggtgatgaaagaaaggaaagaagagtaagaaaaaaatattttgatacattatgattaaagaccatattgtctctaactattgtagggtgctagtctctagataatatagagctcatatctgactttaactttgtacatgtccttagctatatatattccgattcttactaaggttaaattgattttatgtaaaaagaatccctaaaaagattatgtgaaattctcgccttagaaaagataatatagcaaatgaaccaaaacgtttgtactgtaaatagaaacatatatataccctggttcatgtcggatcaataaaagcataaaaggagtaacaaaacacaagcaacgctaaaaaaactctaaaagataaaacttgtacgatagacgattaaataaaaagcggtccattaatcattaagaatggagtcttaccttcatgaacgaatgataattgtaacccgtatcatattatcgaactttcgatttcaaactcagtaattaagacgtgaaaatgctagtcgtcagtattaagcgataccgatggtatgtttatgatggattttctttctccaatttgaaatactgatggtttatgatagtgggtttcccatagaaaatactccgtatttaggatcatcactctgctttgcccttgctcgaacattcgttatgtctatctgggacactaccgactaccgtgcattccaacttgcaaattaaggaccgtgagaggtcgtaagaaccgagaacgacgtgacgacgataagcaaatgcgatctgccttttcaaaatcgtgatctccgaatcggcccaccatagattatacagtaattaaccgtgacccgtcgtgacatgacctgtgtagtgatcgatcaaacggaaagcaattgctactggtacagtggtactaatcaagtactgatagctacagtatctatacagtagactagcatagtacgccgagtacaggagaccagggtacctcatgcacgactagcctgtccttataagagcaggtacaatagcaggctataaatcagctacaaacagatttgtagctaattatagcacggacttcaagacacagcgtgtgtatgacaagtaggaccaggtattaatagtatagtatgcaactattgtatgaataaattattagattggctatagataaattggagctagtagttagctatactattaaacttgctctaagagcacccgcaatggttatctatatgctctctacaagagatccatgtcatcatattttcctacttggaagagattaaatgaagagagagagtaaaactatctactaacttagagatagtctatagagaaaaacgaggcaatggatgagagacctatagatacccatgtagacatactattgaggtgatttactattaatctaatctattgctgagatgtacatattttatagagagcaccttactttaccattgcgggtgctctaatgcggttgctatcgacttcgttttaactacaggcaggctctgcctgctccccgttgttatctgtatatatcgccacggattaattgcttgatgtctagtacatgatgcggtgcagcattgcgatcgatcacatgcatgactgacggtaggggacaagccaacacacctagtatactccatccacttcataaaaaatcaacttctaagctatgtctatatatatataatcagaaattcatttttatgagacggaggggagggagtagctcggcctgatgttaaatccgttcatactgtgcttttcgttgagtgtaggcacctgatatagagttgaaaaccatatttttagattatcatagattatgcgtggattaccatggctgaaccgtacactttacatcataagaaattaaaataaagtttaaaccatatttttagattatcgtggatagattatgcatggattaccatcattgaaccgtacactttacaacctaagaaattaaaataaagttattctcattataaatatttaggttatattatttgtcatcatttttacctgacttcaaaactttcttttccctcgtttgatgacttgaggttgaaaaagagacaaaagtccacccacctgaagtggtggtgggtggtggcatattcaccacttaccattattattggggcttttaaaaaagtatagatacatagatgtttctaaaattatgatttattcgaaagttccttttccaacatagtatagatacatgtgcccatacaaatgcgcacacactcacctcttatgaatgcatatacgcacattaaaactaagcacatctgaagagtgaagactgagtcggcatatcttatatttacaaagtcaccatatttacctcactggcgatgtcatctaatatttgaactcgggtaatcagccttcacgacaaaaaatctaaccagttgagctacacttgctttgctattcaaaagttttttacatcaacattgtttagatattagctatataatatataactagcagggtggcccgagcagattgcgcggctagtatcattatatttttttctcatataatagcgtatatgttttctcattatattattcaaatatattaaaatgacaatataattttaaattttgcaataattttataaaactactaatgtgtaatattcatattatattttatatacgtgttagttattaattatttttaatatcaaattttagttatttgtaaattatatatattcatatatggactctatactcgtcttttaatatttctttttttaaaattccgaattttctgtaaattgtatttctatatagactctatactcttcttccaatattatttatttttatttctgaatttttattatttctaattgtatttctatgtggactctaaactcatctttcaatattctttaatttttaatttcgaatttcagttacttctaaattgtattcctatatttatattcctatactgaccttaaacttttcttcctatgtttttcttaatttcgaattttagttatttataaattgtatttttatacggactctaaactctacttttaattttattatgtttattccaaattttagtaagttttaaattcctaatggactctatactctacttctaatattccttattttttaattccgaatttatatttttttcttaattatatttctatatggattctatactctacttctaatattccttatttttaatttaaaatttatattattttctaattgtatttctatatggactctatactctacttctaatattccttatttttaattccgaatttcagttatttcctaattgtatttttatatggactctatactctacttctaatattccttatttttaataccgaatttcagttatttcctaattgtatttttatatagactctagtctcctcttctaatattccttattttttaattccgaattttaactatttctaaattgtatttctatatggactctgctttttctttttcctcgattaatgtgagaatttctagaccatgagagcgaacgtggaggctcctttttctattcctttaattatataatagatattttattcgtctctataagcaactgtccatctaagttattatctaaccatccgtttcaaacacataaacccacttggctgagctgattttaaatttctagacttggttttagaattaattaagatatttcttcatcatgtcctttgcccattctttttacaaggtcagtaagaaagaaattaaataaaatctatctctaattatatattctaaaaacttactttaaaagtcaaagcattttgaattatattctgcagcaaagccaagttcagccaaataatgtagctttatcaaccgactagccgtcgcttgataacacacacaaaattttctgtgtggattgagctttagaatactcaaacatagcttttttaaaaaaattcccctgaagttgacactcagacgcttcacactgctatggattctacaattcaaattgctcttgagttcttccaaggtccgcttctttttgtgtggtcagagagctgaaaccaatgggggaattacggtgtgagcttcttagaccttgcatatacttgtcttaatcaaatcatcctcaacgaaataaattaatataacacatgtgtagtgaaacaaatcaagtcgttttagctgcgcgagacagagaaatggtgatttgaccccctttttcaatcccaacataatctcagaaaagttgtgaccggccatgtttattagtttgaggccatgaaagcgccaacgcagtgcgctttcacgatcttaaagatgacaagcgtaggggaattttatggtttttcttgttatactttcaatttttttaggctggaaagaacgtagaccagttcagaatcaactgatcaagatgtaccatgcagttcaacttcaacaccactgtgttactatttcaacatacaccatggccaaccatatgcagttcaacttcaagttcagtcatgctgattgataaatatatgcatggcattttttgtgttactcctctagttgagctttatcatgcataccatataggcagaattatccaaaagagtcgatgttgaacggtcataatctttccaattgatcggtaaaccattcctcaccatatccttgtggggtgcagatgatgactaaacttgaaacgccaccttcacccagcttgttgcaatcccctaccaaatgcttatctgaacttggcattatcttcttgcttagtcaccattttcttttttgcattcacagggcttgcctgccacatgtcattctcagtttgttcctgcaccagcttcaagtgatccatgcgacaaatcaccagtcatcaacgagagggaagcgtagatcgaaacaaaggattcaggtaagccgtcatgtccaagctttagcggctgcgtatccaagcaggaaagtgcagcatttgcacaccagacaagttcaccttccaatatacgcatgctgcacaaaaagaaaaggatgaaagaacaacctgctacattttgattccatcacgagtctttgcaaacatttgcagaaaaaaatagtgctacaacatgaacatattcatcagcaccttagcattatgtcacaagaaatttggaaaagcaacattaaagtgctgggacaatagcctttctccaatctccacgtcctaccatatcactaatagtagtacaacaactggccaataaaggtgctatgttggccgacatagacatcacttaacatttcattttgtgacacgaagtactctttaccatagaaaactaggtccagagtttaatcttgaacagaatagttgccgcatcagctagatgggaggtttctgccggcaggaaccacaggtgaactatttgtattaagtggctgtctcttgcaagcaagcctgacggtggaatcgatcacagaaggctcagccattgcaccattaccataatcaccacaggccagccttttggtaatgggagggaccaaagatatacctagcaggttgattgtctcaagatgacgactggtgaacgggttgttccacatgaaggtgttcatagctggggcaacaaagagtggtttgctgtagtcccatgctctcactatgcatgtcaagaggttgtcacataaaccaccagcaatctgaacaaaactaatccagtgtcacttttttgtaggcagcgaaaacaagttgacattgtcaaacaaatccaggattcaacataaaaaatatatggttcacaccagaaaaagaaaagaaaatcacataccttagctagggtattagctgataatggcgcaatcaccatgatatctgcccattttcgcagttcaatgtgcaaaacttcatcccctatcttcttccaggtagaccattcatcatcatcagtgtaaagaataatattgctaggcagagacgttctatcaataaaatgtaatgaagccttggtggcgacggctctgacttctgcccattccgagaagctacggcaaaggctctcaaattttatagcagcgacgcttccagaggcagcaaggaggacccgaggtttgctaggatgagggaaatccaatcccaaggtttcttgtactgactctgatgtagtcatcacctcagtacttcacctgtaccgctccactacattagaattacatgaattcagaagatctttatgctgctatacgaaaactctattcacaatgaatttctggaatgaaatgaaagtgaaacagaaaggggaaatgccatttcattcacggattccatatctaagctaaagattagttcaaaaacaaaggtaattgcatcatgataaatacattagcaaactggtcactagtttctgttcctaccttgcaagcttggattgatgtagcggtctaactaaaactaaactcagattggaggtggaaataacctcacctagtacaaattaatactccgtagtgtcattgtgctaagatggccagaaactaacgccggccatggttctcagctgagccccccaattcctctaggaaacaaacgctaccattcgaaccaagatggaggaaggtcgcacccctggctccaacgctgctccccggccgcgcaagcgaggatccggcagtggggagaagagaaggctacgttgggggtgggacaacgataggaggccggccgcacacagcgcctctgggtgttcgccggccgtgcgcttgaggaggcggggcgcgggggagcaaggaggaggacgggaagaggcggagactcaccgagagattatgggaaggagcgggggactcaccggcggtgaagatccgggggaggagggggtggccggcgccgtactccggtggagatccggcggcggaggagggtgccgcgacgggggcctcgaagttttggtgtgggaggacttcggttcagaatagcctttggactttggttactagaagatttgggccttgggcccagtaatgtattgggctgtgaggttgcagacttaggaatttttttaatttttaattttttattaaaatatttaaaaaaatagttttctatttgaaaaatttacaaaactagtcgcctttaagcgatgggcgactagttttgcaatattttcaaaacgaaaattattttttaaatattttaataaataaaattaaaaactaaaaaaaatcgcagagttagaggctcatatattaggcccatattacaaaaatcaaacttgtttttaaacaagtttgattttgtaatgtggtctaatgcataaatgtattttgcatagcataaacacagttttgttcagtatccacacttaaaacatttctttagataatgattcagacttaaatatgtcttgttcttcatctctaaaaaaaaagaatctcctgttcttattgcaaacaagagcctaaaaaaaactaaagataaaatcatcctgcataattgcaatttgcaacgatcaaaccatcaacagctaatttgtgacaagatttactacttattactacgtccaaaacgaggaaagtctgtacaaaatacgattcaaacaaagacagaattcacataaaaaagacgccatgatttccatgtgggttaaacatgctatgcacgcacacaaacacagggcacagaggctcactgagctcctatgctcgcaccgacacggccacggtgtgcggcggcggtcaccggcggacggatgtccgcgcgccgtccgtacgtctcggtctcagaacccgacggtggcggcggggccgaacgcggcggcgtgggagtactcgatgccgacgggcgcgcgcagggcgccggcgagcgcggcgccgtcgatgaggtcgcggacggcgttggcgtagcacacccgcagccgccgcagcgcgcgccggtacatcgccgccagccaccgcacccgcagccgccgcagcgccccaaacagcctcctcttcgtccctcctcctcctcctccgccgccgccgagcctcaccaccgccaccttcttcctcctcatccgcccagccgtcgccgtcgccgtcgccgtcgccgtcgacgccgacgccgacgccgacgccgacgccgaagccgccctcctcctcggcatccggaacagaatggctcgcctggcgacctggaccacgtcgtccaccatttcttggctttctcctatatacctcactagctagctcagcttgatctctaatctctctcgcttttcttcttaccaagagaagaagctaagctaagccagcttagctagcttgcttgcagagtgttctaattatactccttttctgtgaccttttctgggtgtcaagctaatttaatcactagatgaattaacttaactattcttcaataagtccaaacgactgatcggtgacgatgatgtagtagcagttaagtatcaggtcatctcgagaatggtcttttctttttctggaggggtactggtacatgctgatgtgttgtcttatggaggccggaaaagttagccggtgtgctacgttgacctcaacgacgagcggttagatctcgatcaaaaattaaatgtgacgtattggttagttaccgctttctccgttttagaatataaaaaagttttacaattggataatattatacaaaaattagataaactaaatagaaagatgttgtgattgattgataaggaaatattgatgaaaacattattatattttgagaaaaattcaaagtgttaaaagttgttatattttagtacgtagagagtacatactctatataattgatctctgtgaagaaacaaatagtatcttccaaaacaaattaaagcaaagcgtatataatcagcaagggaggttatgattaattcgatcaaggaatgtagcataaggtgcgatcgaagggccgtttgactaatggaattattattttttggatgcattaaactcgataatgcatccgagctaagaaaaatattactgctgtactggtagcccacaagttaattaaattaactaggccataaggttatggctcacatgggtgcatataaatttggacactgtatctgtacaaaattgtgtgaaatctgtctgttgaagtacacgcctcacagtcacagtcgttgcatattcaccccttaatccttatgtatacagcactagtagtattttagtccttggatcaaacctaaaaaatgtagtattttgccatcgagaacgagcggtgtagtaaaggaaatcgcgactttgaccatgttcaagaaaacaaaatcatgatattttaaagagtgaattgcatcttgaactatgttttcttacccatgtttcacaatgaactaggtgttatcaaacattttcactttcaaccaactatagttacttgagcatgcaatttggacaagaggcccacatgtcagccagaccatgtgtgtctctccctcttccccttctctcttcctcctcaagaccagtccatccctatccccactatcgctccctccacttctctttccagtttgcctatagcagtctagctgtccatctgttgtttcccttgagcttgagcatctagattaggagcttatgactagatcaagcactagatcagatcatgctgcctctactgttgcaagagcaatgagcacaatacatggaagaaaaaagagtagctacggagcagggctgttgaggcgccacgacggtgcaagtggagctcgagcatggggcatggaaggcggaggttaagctcaagcacgcagctagcaaaggtggccacagatggagcttgagctcaagctcaggggcaacgtagacagagctcctctcttcaacgccattccccgcggctctcaataccttaggctagtggtgttgtgctcctctgctagcttgacccaatgtcagtgccaaagttagagacgattggcaacagtcagcagcttgatgtagaagcaagcagtggctgagtggaaacatggaatgtgaaaatggatagagtggtctaatgtgcaacccaaggtaaaagactcttgtataaactaaaaatgttggatgtgccatagtccaaagtgaaactttagtcataataactagcccaatatacaattcactctattttgaaactaacccactttatagagaagcatcatatactatttacggaggggagtatatactttatttatagttttagaagcacaaactaatatacatacatcctataaaaaaggaaatcgatagagcatacacgttctaaaaaatcttacaaaaatgatcccaaccttttggttaaataaaatctagatacgatctaagcatgacccatcagtgtcagtaataaaaattcattaagaaaaaaaccttttccaaatcagtaatcttaggttgcattcttttctccccttttctaatttatactatctcgtttctcgcacacatgtatggtgtgtttttcttaaaaaaaattctatatcaaagttgtttaaaaattcatataaatgtaaattttaaatttattttatctaatacttaattagttatgtgctaatgagtcactccattttggtgttaaggaaaagttctcaactggagctaccaaaggcagacttataccgagttcatccatggatgggcccatacacacagaaggcccaaaaagcaatacgtctgtacgctggctcggcccattagactaaccaccagacagaccaagtaaaccacagccttcgctacgaaggcaggcaaatccggtccaaaacccaaacccaacccaacgaccaaaccaccgaccggccgttccactgcgccattccttccttccccccacctcctcgtcgacgcggagatcgctcgctcgccggcgacggcgatggcggcatcggcggcggctgcggcggcggtgagccaggcgctgagggaccgcgacgtcctcgacgccgtcggcacctccgccgccgcgctttcgctcgcgggctcttccttcatcgtgctctgctacctcctcttccgcgagctccgcaagttctccttcaagctcgtctacttcctcgcggtctcggtgagcggctcagatctggaactacttggttttggggggttctgggttcgggaggctagcctcgtgatctgcgtaactgcgttgggttgcgatttggaattggggagcgcaaagtggggatctgagggcagtgcggtgttcatttcgcctccgattgagaaatattgggggttcacgccgtcagtttaaccaacggatgctctgtttttgctgcttatgcgtgcgagctgaagcagttctcgacaattttttttttgtaagatgtttgctatctgatcggcacttgaagtagcatagggcatgctccattttttttttagtgaaccgtgtgaggatgtttatgtcatagacccttacttcaatgtggcaagtgatgtccctataagtatccatgtaggcaattgctgggagatcacatttcgtgctactgtcttcttggattggaagtacagttggtttgttatctaattatcatgttggtttgttaatattattaattgctgcaagacaagctgatgtctctaatctcaatttcttcaagacatttggaaatttgtttgagagaaatgatatcacatttctattcaaggtgtttttctgacagcttctgtctaaattgcaggatatgttttgcagcttattcactattatggggtatgcttctgactgtgttattcaaattgtatttgataatgcacgtagttacttcctgacttaaataactgcaactaatgtaggagaaagtgtattactgtgaaggaaaaaacatattgttctttattttgttatttttggaactgttactcatgattacccctttttttgctgactttctattatgcgctagtgaaatattcttacacacatgcttttcatattgcaggggcccatcaaatgcattctactgttttgctcatgactacagtgcacacttcttctgtgtggcttcttttctatggacaaccactatagcgttcactcttcatcgcaccgttgtcaaacataaaacggatgttgaggagtttggatcaattttccacctgtatgtgtggggtatgcaattcttttgaccacttctctgcctttcttggagcttgtgcgtgccaaattagctggtgcaatattattaagaagttagaaatgcttgttgatttggtatagtgcttctttttcatttgaagtattgacaattttatagctgtttcatctatttgaagtgtatgtgattgataagagggaacaagcgggagcattttgatttcttatatctaagcattatgtagatttgatgcacatacttttgtttctccttttctgttattgttgtctgcattgtttgtcatctaagaaccaagtatgcaagttccagtttctcatgcatttttcattcctgtctgctaatgtatatactgaatggtagacaacttaagacatttgttgacttgacataattgcgaacatgtgttgtaactcatcctattaatcttgttgccctgcttgaatttacagttcttgtgacaataattttccttttatatgtttctcaggaacttcactagctacaactgtattacgttcaattggaagtgattatggaaggccaggcacctggtgttggatccaacaaggaagcatgggaaaggcatgtgaccttttgtgttttgtcatgaatcagttaacttggttctaacactgctaacacctatctacagcttacatttgaaccttatccatggtagtcagagtggcccaaattggtgctaatgacgttcctatatgtttttgctttcatttagtatttgagctgttatcaaatgatccaaaacaaactccactcaacagaataagtactacctttgtctcaaaaagacttcatttctagctatgaacctaggcaagtattgtctatattcatagtcagaaatgaagtctttgtgggatggaggtagtaacatttatttatttggaattgcttacgtaccttgcacaagacagatggtatcataaagtttagtgagtctctgagagtatacgcatgctttctcttagtttgtatgtttgactttttgtgcattggcttctttcttttccatatctttactgcaatctatgtcttctgttaatttgccatcttgatcctagctagaccactcattcaaaataaaaatattgtcactttgtcagaattttagcaattgttcattatatgtcttttatatgcaggtcttgcacttggtaaccttttatcttccattgtggggtgccattctctacaatgggtatacatactttcaggttaatcgcatgataaacaacgcgacaagggtatgcatacagttttctattttatattgatgataaataaggcttgtattgaatccttgtaaattctgctctttttgcttatatgttctgattttcataagataatggatgaatttgtagatggctgttggcataagtgatcgatcaattcaatctgacgtgagggcagacaagaaggtataaatttcctacacatctcttctcattatgtgtactgaaatattttcccctaatgtgctactgtattcttcctactatcatgaattcagagagtaactcatttgatcctattattttttttatacctccagtcttgagatgaactggagtataataccttatgttatcatgtttggagcaaaaatgatgtgtaaattctaggagtacttatattatcatgttacctggatgtctggatcagcctcgcaccactgtctactgtctggtagcagataggaatgtttatttgagcagatacagcttattgacttgttttcttttgcaggcgtttaatcggtggggttattaccctctcattctaataggttcatgggctttcgcaacaatcaatcgtgtgcatgactttgctaatccaggccacaagatattttggctctctattcttgatgttgggtttgccggacttatggtgagtattttcatcctagatgctagttacccagttctgaagagttttcataacatattgaaactactttgataatgtgggttgagccaaccttttaagtttagggctagagaaagaggcttagaggactccacgtatcttgttgtcagtcctgttgataattttttataaatgggagcgctggagttccaaccctactctttcttgaaacaggcctatgaaattggttgtatttcatacttagccttcagtatccaaagaattggctctatataatgcatagatgagtcatggtctcgtggagtcctcttgaagttctgtttgtagaagtgtattgttgttttgtttccttgtgaggcttacctcagcttgagcttatctcacaaaacttctctggcgttacatcatctgtgaacacattttccatggattctaatgcttcatggtatctttaggggctttttaattccatcgcttatgggctcaactcgtcagtgcgcagagcgattgctgaaagacttgacatgtgagttattttctagactttacaatcatctgttcctcctgtatcacctcatttccgtttatcatttactatattggtttatgcactatataacattttgtttcctgaattgtccaggtatctacctgagagatttaaaaggagcctccctactctgacacgatttaaaagtcagcaagaaaatgaacttacttctcttattgtcgatgcgagtaacacataggaatttttctagcacactaagtttgttcatatcttgtgggttcttcaatccagaaagggtgtatgacattactgtagagccagatgtttagcattaaccatttgttagcatgtggaatagttcccctgcggtcctttgttgattgccttgaacacgagcagtgtaatatattgaagttgcattgtccggagtacataagagattaggagatagccagagttgtagatactactatgacgttgatctgtatccctttttttgtggatgtatcagtgtaccaccctctccatgttttgctttcatatgtttgtctcaaaatactggccacaggccacatacggtacgacttactaatgtttcggttctcctgagtcctaacagttgacagtgtcaaaacagtttttcccattgatgattattttcaccttagtgaaagcgtagttcttgtaaactgcctcgtggccttgtccatgggaaaggaaaagcactaggctattgctttgagatggtgttggctcgagctctcgtccatagtggaaaaggagaagcggcaaaaggtgaatacatggggaaaggaaggaggctggcaattgctttgagatggtgttggggataggattcaacatgtttgaaggaagaattgaatagggcttgccttgcttaggagttacggtgttggggataggattcaacatattcgaaggaagaattgaatagggcttggcttgttcaggagttactcgaatatttctcggtcttgcacactctcgtcaacagcgacaatcgatttgtcctctattttaaatttaaacgtacattcaaatgaacatccagtaaaactctaatataaaatatgatgcatggtgcatgaacatattcagcgtatatagggtgatttaatataaatttaggagaaataattgcctaaatctgatgtatgtgcaatttatcgcgtttctaagatttaaattacagtaaatactaaggttgctattcaaatttaaattaatgaaattttacagtatggtggtgctaagtttgagtgtacaataccaaagagaaaattattataatctaacaaaatttggttaacctcaatcggagttaaaatgttttttatataatttttttcaaaagtttcagaatttctcagtacaaaaataattaacagaaaccttttctcagatttaataatttgtttacaaaagaaactaaagcgcactatatagagtacgttttcctacagggaaaacgttttctaattgtgtgcatcgatttaaaacagtgggtccacatgtcagtgaaaggcactcctctaatcattcggccaatcattaaagtttccagaaattacatatagatcctatgcctacctatcagtgtcttgcatttcttaaaaagacactgggcctcttcactttacatcattttcaaccatatcattttttttaaagttattaaaaaatatatatatttagtttgttgttaagtttgataaatacataagaaattctgctaaaattttaacaatattatcatcttatcaaaattttaaaataataaaatttagtaaggtttatttaaaataacaaaatctgaacagccccctatcttttcctccttcaacctacaggcagctcgatgggcagagaggcgcggcgactcgggaagggctcgccggcgacgagcggccgcggggatggctcggccgaaggccgtggaagctataggaggtccttgcgcacatcctagaggcggtggcgcagccgggggtggctggaggcggcgagcgccatggccggcagtgcaggcggttcgggacggcggcgggcagtgtgctacggcgaacagtggctcgattaatggataggggagggcctagggactacgaggaggcttactccttgcttgattcggggcggaggtggtgcgtgacggcgcggcgacgggttcacgaggcggcggacggcggcaatggcggcggcggcgctccggcgagggggggggtctaaaattagttgatgaaatgggttcaaggggctcccggggtcatgctggcgcaaggaaaaggaagggggctcaccgacgcgacggctcgatggtgtaggtgatggcggtggctctgttcggccggctcgggggtgcggtgatggcgcggccgttcccgtcgaaacagagaggttagggcttcgtctagggatgttggagaacgagtgtggtgtggggagtcagccggcgcgaggtctcgatttataggcgagggaggagcgagaagcaggcgcgcgcggttgtctcgccgttggtgcgcacgggcgaggccgacgggagacatggcgtgggcggcctcggcgggaatcgcggcggaaggctggggacgcagccttcccagaggctttttgcagagggatggcagcggcggtcggggtcgtcgtgtcgcgtcgtcgccttgggcagagagggcggcgtcgattggccgcggcagagcggagattggcttggtcggcatcgggcagaggtagggcagagggcggcggcattggattggccacggcggctgcggtgcaaggcgcctgggcgcggcaggggcggcgtcggctttgtgcagccttggcacagcgggaatcgcggacagagggtggcttggtcgtcttggaggcgctgacttcgggttggcactccaaatgttcgacgaaatgacctcaagggggagaggtgaagaggagagggaaaactgagagtctgggaattttttttttcaggattgttacagagctcaaaagcttgtgccaaaattactggaagttagtgtagtcatgaacttcatttggtgaatttctgggatttttctcatgtgtagtttatattgttttgaaaattcatacaagttcactgtttttatttcaatttgaatcaaattttggatgttttcgtctttttgattgagatgaaaaacttgtgagacttaaggaaggttatttcaagtgtgtaccacttatttcaattctttttatccctttttgatttaatacttcaacatttttttgtttatatctattgcttgcaaatacattataagatgcatgaaaaatccaagaacgccaaaaataagttcaaaagacaaagaaaaaaaatcaaaatcaaaatcaaaattttgctaagtttttctttattttcctttttttctgacttcaaagaattccgggtacgttacaaaaagttcatttttattaaatagggtgacgacatgtcaatactttttatcatatgattaggaattcataaaagtataagagataaaataagtaaacacatatctacactgttctgttttcaatacaacttatctgttgcacttcttatacgagctatttcaatcgtcaattaaaaaccttattagaaacatcaaaatgacatcctcatttgcttgtagtactagttctccaagtagcagtgcttctagtttttctctggctgtggccgctagcttgttcgttgtcacccttcctgctgacattcttctcgtctgtcctcccaccagctgctactttgtgctcggctagtctcactctcacatagtcacctcaaggcggcggcggcggcggcggcgatggcttcactcccggaggtggcgattgtggccctctgcgccgccgagggctgcgcgaggctgctgaagcctatcctcgacttcctggcgaacgggatgagccccagcagcgccgccgccgacgcggccatcgtcgccgccctcctcgccctcgtcttcgcctacctcgtctgcgtcttcctcgtctacctctccgtcactaccccatcggcggtcgcggctgccgtgaagctgtccattgtcaccgcattcacgctggtcttcgccaggccagccattgcctccgtcgtcgtcgtcgtcgccggcggtggcctctagtgacagtgagcgaggtaatatttgctgaggattttggttgagcctgaactaaatcccagctaaatccccaaatccaaacatacaagtggtggggaaaaatatttactactactacagatagttcagtacaataaagtgatagtatcagatacaacgaattggagtagcatgtaacgccatggatttacaattgaagcactctacaatctactccctccgtcccacagtataagggattttgagtttttttttttgcttgtaacgtttgaccattcgtcttattcaactttttttttgcaaatataaaaaacaaaaagttgtgcttaaagtacgatagataataaagtaagtcacaaataaaataaataataatttcaaatttttttttaaataagacaagtggtcaaacactacaaacaaaaactcaaaatcccttatattatggttcggagggagtagatttaaggggaccatgcgtgcagccatggacagtggctgctatagctatgctatcccctagtttcctaacgaggcattttcctgcttggccttgggggcgaaaagacaccaccctgatgagtatgattagtcaataatgtattggacaaaagttccatggatatgcaatgtgaaatttctcctttctgaaagttagttattgtcactccacatcgtgttgtacgttggattggatggtttcatttgcattcagttgaagcacgtactggcaattcgttctggagaataaattggatacccaagccatcttctttgggagaccgatgctcaaaggtctgagaaatgcactgttggaagatggaacggacagtggcgtgaatgtttagagatctttttttgaatggaaaatgtgttgggagtgctaaggacaaactaacatccattatttaatagagaagaaaatggttaaaaaaaacctacgctgcctgccagctgaataatggattgcaagtaccgttctcgtttagagattgtttcaaggagtaaaaaaatccgtaggaaaagcgagaagtaaatatgaatgtaataggcatggatattctccctcgcaggtactaccaccaaatgatgctcctccctagcagatactattaccaacaaaaggaagtacttacaaattctctctggaaaaaaatgcaagtgtgtagaagcaatacttttccctgccaatgtgggggagacaggtgttcagtgatgctctgaactgaagcagattggtctcggatggttgtaacttgtaaacgcgcacatggttgtgtatttgcgcgttgcgtggtcgtctacgacgcaacttgctaggaaagcgctcaccatttggtccggcagcccctgaccacgccgtaagctatcagcatattaagttcattggtagtattagcaagcagcttaagtttctacaggggattagctgtcaaaagtaagatttttggggagagacgcttcaaaaactttcaacagggagagttcaatctgggtgacaacccaagtcctctcaagtagaaatttaagtgggtaattcctctgtcagtataaaaattcgcttgctaattaatttctcacatgttaatataaaattaaaaataagaaaaactcaaagtgagataaacgggcagaataatcccgcttgactgttatgcttgcattcctactctcaagccatctaagcatccaatggtgcaccgtgcacctttcacttatctctaaattttttaattatgtgtttgatgatactctctctcttaaaagagtgttgataacttgatacgctcttttttttaaaatttacaaccccatgtctatctcgtattttcctcgattgaaaatgttaccatagtgtctccattctgagatgatttacgtgcgaggtcaacacggagctactagcaaaaaattcaaaggaccgtactctactctcttgctagtagtactccctcccttacaatttaatctattagtttattcctaaatggtctacgtatttatatttatttattaggtctattcattatttatgcattagagtaaatggacattgatgcatgcatccatacacaccagtatttatataacacatgcaatatctttatttgctattggctaagaaatatttgggatggtgtatgcattgagtttgttgctagagtaaatatagtatgagagagttattagtttttttcttgatgtacctacgaaatatgtatatcaatttggaatggagagagtatttgttaatgctgatgaagagaaataaatgatatttctaagggcctatctaggtcctgtttggttccatgggctaatgtttagccctcatcttttagcctcaaattagccctcaaggatccaaatatgtgggctaattttgagctaatgtgaattagcccccctcaaaatattagcccctccaaggggtgctaatggggctaattttgtgtagggacaaaaaaaaaagcagctctctctcttctctttctactctctctccactttttagccttgaattaggctatagatccaaacataccaccctaggctaatgtttagcctaccaatttagctaaatattagctcttaaaattaaccgtgggctaatcttccaaacagtgccatagtaaaacaaatacctttcccctgtaaataagccctccggatgactcgaggttctacctcattccagaaggagaagcaggagagaaatcgaaggcggccggagaggagggagcggaggagaggaggaggaggaagaggagaagaaggcggccggaggaggagcaggaggcgtccgcggaagaggaggagaagaaggcagccggaggaggaggaggcggcggcggcggcgtcggcggaggaggagtagaaggcggcggcatcgtcggaggagaagaagaagaaggcggcgtcggcggaggaggaggattagaagtcggcggcgtcgtcggcggaggagaagaagaaggcggcggtcggacgaggagtagaaggcgacgtcggcggaggaggaggtggagtagaaggcggcggcggcgttgtcggaggaggagaagaagaaggcggcgccggaagaggattagaaggctgcgtcggcggagtcggaggaggtggaggagaagtcggcggctacgtcgtcggcggaggagaagaagacggcggcggcggctggcggaggagggggacgaggaggaggattaaaaaaaaaaaaactttgcttactgtcgcggtagcattttctgcatcgctgcacgcaccttgtccaatttcttcccggtcttagctcgatctccagattgtgcccatacctaacacaaatggcgtcccacctcgacgcggccgcgcttcttcttctctgcctcgcggtcggctgcgccggcttcctgggaccgattatcgaggccctcgagaacggctccttcacgggcaaccgtgccgttgacgccgccgccggcgacctcctccgcctcgccctccccgccgcctatttcaccggcataatccttgtctaccgccgagtggctctctgagtcgccggtgatcgtgagctcggccttgcttctgcttgtgtctctcaattgtcatagcctcgttatttggggattctttgagatttctgttcaggtttgagaaggatttgggtcttaaatcttaatcccctgtggcactatccgaattcatacggggcaattcatcagagggaaaagccaagaaagaaattagagcacggctgaataaaagatttgacctttcaggatgtcctttcttggattcacaagagagtgctccatcacggcagatctcgaactttgtatatttcatcaagtcgtcagcatgatccaggaaagaatctgttgtacctatcactaccaagctggtccgtccatgacagtatgctgatatgctctgccagtgactaggaatcttgggcaaccagtatgctccggcgaggcataaggtggcacatggtgacatggaacattccggtccttgcattgaaatcaaccagcgacctccagtgtgcttgatgggcctgaaggagaagaagaatcatgcaccatagagttttctgtaaatttatcatgtacagcaatttacaatcagctgagtgattggttttcttttctcgcaaatttcagtcctgcaaggtatacatttgttttcaatcagttgtgccttttcaagtcgtgctacaaagcagttatgtgctcagttgcagaagatgagtgaattgataaagagatagaaaagaagataaaattaacactgtttttctcctctttcttccaagttaagtagtaaataatcttgacctttgcaagtacagaaggaaccttactgatgacttttcccacaagtgggaactgaacaaatgatatgttcgacaacaaaccatggacttttcaaaaccgcatccacatcagcttggacccattcttccggccctgtatgtatgtttcttgacaaatgacaagtttactgtatgtttcttggcattaacttagtatgaatagttctcaaaatgaaaaaaaaaaaacttggtatgaatcatgtaatattcccggtatgtatcctgtaagaatcttaactgctttaccctgtgatatttctggtaggtcttcctgaaagaattgtaaccatgcgccgatgcgcgctattccagtagtctggtgcccaatctccatgccagcatgatcacaaaactcctctctgcatgtcattcatttgcacttggacatctaatctctgactcaaagctctcttctgttgagccttgctccttccatgtcgtagttctgtccaacggctgccactgaaaacccggccacccattgatgaagatacacagctcccatcttgaacctgatttccttcttgtagtctagctagagcacatgtaactcaactggcttgcttgccaaagctaatagggctacattggaacgaatgaattttacaggaatctgttaaaattcccgcaaaaatcctataaaattcctccgttccaaagtaggcctaactttgatcttaaagggagcaaatgaaaagccgcggccatcgaaaacggcgaagcgcaggagctatcttctacagtgggcaagctatctcagcgaaggcacaagtttgcaaagcagtaagcaccagcatcaggccagcaacacatattaatcgatggagcagcatacatatgatcgcacgatttatatatgcgtgtgaacggaaagccagcgattccttttcggtaaggaaaaacatggcgcggcaatggcgacatctacgccgaaatcgttgaaagataagcactaaatacaagtttaaaaaggattataagcactaaatacaagtttcgtggaagttgcgttcgttgaaaattggacgccgactccactggcgaagtttcgcggaaagccctggtggtggaatttctgtggaggctggccggccggcgacggggacgaagttggtgacaagatttcagtttggagttcggacgaggagaacgaaccggacgtgaggggcgagaaactaggcacatcggatcggaggctcagaatggtcctttgcgattctataatttgactaaacttttttttttcggggaattataatttgactaaactattccttcgtttaccgggatcacgttctaaactgcacagttttttccaaatattttatatgtaaaagtttgttttaaaatttaaataagcttattttataaatttataataatcaatacttcacatgttgctcaaaattttaggcaagcagccttagtgaaagggtgtactagttgtgtttttccccttttttttttttggtaatgtatgcttagggcccctttgaatcgtaggaatgaaaaaacagaggaataggaaaaacacaggattctgacaggaatacaattgtaaaacagaggattgcaaaacacaggaaaaacacaggaatggctgtttgattggaccacaggaaaaacgcaggaatcagatgagagagatagactcagagaaaatgttccaagaggttagacctcttgctaactttcctccaaaacccattccataggaattttaaaggattggataggattcaatcctttgtctcaaaggctttcataggatttttttccataggattgaaatcctccaaaattcctacatttttcctacaaatcaaaggggcccttaatgtgtatgcaacaattgatcataagggtgggacctagtacaggtaacattagttaatgccaactctacaatggctatggttgtgaaatagaatttaggtagacctcacaaggtcccactaaatcttaaaaatattgcttctcatctgctcctagtgaactagtatgaacaatgaatcaataaaaaaagtatattttattctcttatgtgcaggcatcctattttaatgttttgtaaaagatatgagagtaaagttaatattcaattttgaatgggttatagttgagataatattttttattctattttaaacttcagagatctctcaaaaaattatttgagattgctttcaacattggttatgatttcattgcaattaccgtaggaacacatagattgtaaactaaaattactatgaaactgtgaaatctttaccactattttacatgttgtgaac

SEQ ID NO: 4939 - DNA, 48217 bp, Oryza sativa
  unsure (1)..(48217): unsure at all n locations
tatatatatatatatatatcaaacgggctaggacttaaagccgtttgaggtgagtaaacctcacctctgacgggccatccgactgtgacccgtcataggtaactagtcacctgtgacgggttaggacttaaacccgtttgaggtggggtaacctcatctatgacgggtttcattttcaacccgtcacaggtgactagttacctgtgacgggtcgcagccggatggctcaccgatgaaagcatcctgtaggacccgtcaaaagtgacatttatcactgaccaacacttatgcccatcacagatatgctgttaaagctatgaggatctggcgtagtgcctcttgaaaaatttcctataattctatctctctcatcctattcctatgtttttcctatgatccaataaaatgtttattcatgtgtttttacaatcctctattttgcactttcattcctgttaaaattttttgttttttctaatcctacgtttttttcattcatactattcaggtccttagggtgtgtttagttcacgttaaaattagaagtttgattgaaattgtaacgatgtgacggaaaagttgaaagtttgtgtctaggaaagttttgatttgatgtgatgaaaaagttaaaagtttgaaaaaaagttttacaactaaactcggccttagactgcgaacatttcagcagcataaataatttggatagttggaatactgcatgcgttggagcgaccgggagggacggacgcgtacgagaggagtataatccaatagaaaaggtaatggtcatcacgacgccggccggactcgtactgtcgcacgcccatctctcgctcgcccaatcctccatccgccacggtccggtccagtcccactccggcgcggcgcattggtacttgcacatactcccatcgccgagctatcgcagatagaccacgcacgcacagggataagtcaactcatcacagggctttgtggcgcagcagtagccggagtagtatcacagattcacaggaccatctcgtctcgtctccctcctgtttgatccgccgcacgtcgcgtcacggcggaaagcagattggattggcgtcgctgcccaatcctgccgaaaccgcatgccaccacctggcaaaaaggatgtcgctgccaccaccccacctctaaatttttacatgcatatggacttttactcctacgcgagaaaatactcctactgcttcgggtgtgtttagttaacgttaaaattagaagtttagttaaaactgaaactatcagggttatgtataacacatatctaataggagttgattaaatctctacaggacccaccacatgccatatcctatgcggaaacaacctgtgaatataggaggagttccggataaggaaagacaaccataattctacatggaaacgacaaggacaactcggattgtatccatattggtttccctagttttacttggacaagaggacacctatgggtataaatacaagaccccctaggaggagaggacacaatcaacatacacggaataatagatcaagacacaagatcaatatacaagccaacatacaccaagataagccgccggatatcgacatcagagatatgcctggatcgaccctgtccggtacctacagaggtcggccgtagggatctagcgtcgtctctaatctcgccgggcacaaactcgaagaggaagactaccttgttgtcgactacgagtcagaccttcagaccgccatgtcaacaacagttagataggctaccccaaatattgtactggtgtgattatggtgaataagagcaatacctgcttcggccaacaggatgtagggttattacctgacaattcaggggcccgaacctgtataaaaatccctgtctccatctcttttacctcaatctcgcatatactctagtaccaacgatctccatactatgcaaataccggaatcgcgacatcaaactgtgactaggaacnntgacggaaaaattgaaaatttatgtatgtaggaaagttttgatgtgatagaaaagttggaagttcaaataaaaattttggacctaagggcttgttcacttcactaccatttttaaccttacattttttatggcaaaattaaaaaaatggctacatttagtttgttatcaaattttagtaagtacatatggaatcttgccaaaatttgataaacttgtcaaaattttagtaatcttatatcaaaacttgataagattgaaaataatagcaaagtgaataagcccctgaactccgtcgaaaaaggaatttctcttcgtgtttcactacacatgttttgcccgtgacacccgtggttaattgtggtcaaatcggcgaccaaaatctgctctatccaaatgtggcgcgacgtacgtacaataattaaagacaactccatcgtactggcgtactgtagatgcgatgatatgcgagacgccccctatacgatccagtagctattgctggtgggcggtacactctcagacgttcctcgtgccggacgttaattcaattgggtaatttattagtagtattacttctaccagtatacggagtagtgtttcaggcagcagctaggttgcccgtgcgaacgcataatggcacgtctcataaatgcaccactgtctcgtcgtccgtccttcgctttgctttgcagattgcaggcatgcgctttctgatacggtacacgcatgtactccaaatgtgtataaacgtagcgatacgtacgtgttggtgttaagggcaggtgacaatgtacgtttctggacagattacgatcccatctgatctcgcatgcacttggacgtatgtataccaccataacgatacagtatatgtgtgtactcatgtactgtagtagacatggagtacgtgcgtatcgccggcacgagcagctgcaccctgcacggcgggatgggctcgggatggatggatggatggatggagacgtcgggagacgcgaaaaccggcgcgttttacaggcgattcccctgcgatccagcggcagagagacgtacgccacggaggagcgacgagaccggtggggagcggcgcgtgacggcgtgaggccgccgggtcggtggatcatccgttccgtgacgcgccgcgacgagttgtggacgacggaaaccgcgcgcgatgggcgccgcgccgggacccgggagggtaccggagcggacacggtggcccgcgggtggccgtgtgtgtagccgtaccggtaagtcgggcactggcgttgggccctttttttccttaggcctggttagtttctaattttttttctaaaaacgtcacattgaatatttggatataaacatgaagcattagctatagattaaaaaagctaattatatagtttgtatagaaatcgtaagatgaatattttgagactaattagtccatgattagccataagtgctgcagtaatccacatgtgctaatgatggattaattaagcttaataaattcgtctcgcggtttccaggcgagttaagaaattagtttttttcattcgtgtccaaaaaccccttccgacatccatcaaacttccgatatgacacccaaaaattttcttttcacgaactaaacacacccttgctcgatatattgcaggacggtatcttgttcggacaatgtattaaaaagaaaaatagaagacaatgtattgtgtacttcagatacctatgagatatcacctgatatacctggtaggtttattgtcccatagaagtcccctaaaatttaaaagaaaataggtgacattgtattgtgtacttcagaaattttagccaatcttttccatgatcccgagtttttcttcttcccttatatatcctaaattttggtttttgatatcttccatacttttttcggttagtcaactgttttaatgatgtaaaaaaagaagtcaattttgccattggacaatgcataaatttataaaaatcttttattgtgtgactatcatattcataagtttgttgaacgagaaaatattatacgcagaaaatttagtatatatttaaaaaaatgtcatttttttaaaaatggaaacaacaattagtcattgtagcatttcttttgggataatacttatgacatgcaacaaatttgttgtgctactattttacaaaaatatgctacatatactattgttaataaataataaatgttatgttttgctatgaaatctaaaaataaccttctgacaataatatctcacacaacaaactcataaatatataagtcctatgtacaaacttctagacttcaacaatatagtactccataatttctttcttccatgactaacagcaaaatatatatttttatagaaattagacagttaactaacaaaaatgtatggatagaatccgaatcaaaatttggaggtataaaagggagtgagcacaactcataggtacaaaaggaattggtcgaaattctagggcatacaagaaattttctaaaaaaagagacattgcctttggcagtgaaccataaaacgtggtcccacatgtcggtcgtggtagctcgggcatcgggtatcttgtttggctccgtggatggctgggcggctatatggcacgacaaaaatatagaaaaatatagagttactcctagttactacctctgtcttctaaaatatagaaaaatatagagttggatataaatattaagaaaaatggtagaattaaatgggaagaattgtgattgatcgagaatataaggttggtagggaattttgcgtgataaaaggttgtgattggtcttaaaaaaagaatgtatgtgttgaagttgatagtatacctctcgtgtttggtgcgactagtttgatccatgtaaatgaaccaaattttggtttcaatttgtgggaaccacatgaagaaaatgccgatctcactagcgtttgcctcctactgccgctgctgcgcaaccggatggagaatatttttattcggttgtggtcgacttcagtttgaaaaccgatttttttttcacttagacacatcgtccgactctcacagtgtgctcagtttgtcttttatttcattctatgagggtccgattttagtcttatattctctttcctaaaatataaaatattttagttaaatgatatatattccactgctacaaatctgaacgtgctaggatatatatcacccaaccaaatttctttatactttgagatgtggagaatattggagttgctcttatattctagataaatttttaagaccaatagttgttatgctttaggacggatggagtacaagtcattacatagctttttagcattgtactgttcatttttttcgttttcttttctttcaccgacatgtcgctgtgacaacgatttatcgggcccaccggttagtggcgttttcgtacatgtgtctttgccttcaatttgatgttaaaattttgaaatgcactgtacaaggggaacacagcggtgtgggaaatgcgtcttccaagatccatgctcgcgatgctagccggcgatggcgaggggaaggaaacacagcggtgtgggagatgtaaaggttggcctttgcgacgcatagtgatatacccagttttctttctgcgtttaaggtgattagccacttattggagaagacaatcaatttacacataattaactaagtattaactattacagatatttgagttacttcaaaatcgcatcgtttatactccctccgtaccaaaataagtgtagtttttacactgtttatgtctaacgtttggctattcgtcttatttaaaaaaatatgtttagtatttttgttgttattagatgataaaacatgaatagtactttatgtgtgactattttttttaattttttcacacatttttcaaataagacggatggtcaaaacattgaacacggatatctatggctgcacttagggtgtgtttgagtagaaggggattgaggagattgggaagatacgcaaaacgaggtaagccattaactcatgattaattgagtattaactattttaaatttcaaaaatggattaatatgattttttaaagcaactttcatatagaaattttttgcaaaaaacacaccgtttagtagtttgggaagcgtgcgtgcggaaaatgatgtgcattctcactccctaccacccaaacgaacgcaaccttattttaggacagaggtagtagcgtgttagattgcccatgataatccagtaattaaagcaaagttaataatacagccgacctgttggttataaggttctttgtagacttctattagcctgcccatataatagttagctctttacaattaatacatggcctacttgtctctcttacatagtttcttggttcttgtgtctaagccggctataagtttatggcccgcttctcctctctctcctctccttcttctccaccttagcatttagccggcttatagcttactattatacttgctcttagtaacttataagaacagcagggcctagtaagagctgtccactgccaagttcatgccagctcgtccagaaaggatatgatcatatgaatatgaatccacggtcgattccgtcgatctcgccggtcgccacagccttgccgtcacctgtcgcgcaagggaaggaagcgtgaactgttgcctcgctgagccacactgggctgtgtatgttcttattcagtttttcttcttcttccacggagccgaagcgaagcccagaagcgaggctgcaactattgcaaatgtcagtctccagcgtctctagccgtcgccgttgtgcatcggtacttgcagagtgagcgctttgccgctggctggcagctcagctcgatcagggacgagtcaactcagagggaagagctgtatgcgtgctttgtggagcaggagcatctcacagattcttcgcaggaaacactactattcccagtcgcccacttctgtttgatccttgtgtcagttcagagaaaaggattactatctgtaatcctgtactccaacacgagttcagaaacgaaacctttggcgaaaaatggacagtatatgatactcggatcgaacagctaaacctgtctctgatcaacactagtatactgctgtagttgtattttttcagacaggattctgaactgaagcagcagtcatccgggcaccggctcttcttaaactgctcctccccttctgctcgtgctgtaattcttcgtgacagtgaagaactgaatcctatcttactctactaacttcttaagcttgacatgtgaagatgccacatcatcatctactaacaaaataccacatcatcatccactaacaaaatgccacatcatcatctattaatccactaattaacaagatgccacattatcatccactaacaatcatcacatttaaacatcatgtaaacatgctatatctttatagctattataatttaagagcttttcaaatataaacatgttaaattatcatccaacataattcatataatgtttcaatgtatatctttattatattttatgatatcctatatacttatatagttcatcctcacttagttagtacttaaatgattaatctatggtccaaattatctttctcctttttttcctttaattaagtcatatcacatcaattgtttttagcctttagatgattattctacggtccaaactatatccctatttttcttcttccataaagtcatactgaatcaccattctacatactatttaaatttaaattatcataaactacattaatttacttaatctgatgttatctagctatcttatacgttatttttttttgttatcatactaaattcccgcaacaatacgcggggtttcacctaattgtgattatagtagatggcttgtgctcgtaaaatgcatagatttggtggcattgactggttctgtctgcttgctcatgctgttggagcttagctgcaatctgtcagtgataattcctgggcagttgcaccattatgctcgtctgagccatggagactggagttcaaccagactttttaaaaaaataacagaaacatacagtaatgtggcgccgaaacaacaggtgacgcattatggtagacatgcaaattaaccagctacaatcatggaacgcttttgtttgctcaaggcacgactccacacttgcaataatagttcatcctcctgtcatctaaatagtacaaaacctatcgattccttaactatggaacccaaaagtacgtcaaaagctgggtgtacaacatgtacatatataggactaaagatatttctgcattacactccaaaagtatccatctgcatcaaacagatcaaacgactgcttgttgtggtgttcaaggggcaggaccccaggatgcacaccgatgagatttggtatggccaaaggcaaaaatatctggaacgaaacaaggtgacagaatgcctcctattgctatgtaagaactcagaacacattcaagcctcttttctagttatcctgtcaaaaaagcaaaaggaaaaaaagaagttgatgagacaggttacttcctaagtataggaagataacaaatagatttacagacctgaagcaatagattccaagagcatccttgatttcatgcacaacagaaacggcaagatgcaggtaaaggcccactgcacaaataaataacacactaagactacgtgttggttgtaaacctataaaagcagcaagcagaaggtaaacctagaagttgacatcaatctataacgtgtatactgttaatagaatactgtggagtatgcatcacacaattgataaaaagaggaccataatgagttttccactgtaacagatgatgcaggatttcttttttaaaaaaagtttttgcgcttgtgagcaaactaggccaacactagccattaacctgaaaccagtccatcaataaaacataggcatatctacatgagactttagattccggactttgcaatacatacaacgatatataatccaagggaacaaacagaagattaatgtcaaccaagccaacaggttcccacaaaaatgagtgatcatacaatgaaactaagaccgagtacttcagcaatctcacaccaaaaataaataattaaggtaaatcagttcacctgtgtatgcgcaatacaggaaaagaaccagcagctcatcaactaaaggaatcctggcaatagtaataatgatatatcgtttaatggatccgcgtaaatggttcacctgaaatattagcagtactaggggcaacaaagataaaagaaattacccagcattgatctttgctgtgagagcatttgcaatagcgaaaggaagaaacaccagagactgaaataagagatatttggtattttacttcaagtgactcatgtacacgtgatgtgcagatagaaacaagacatggaactatggagtatggacataccatgcacattccagttttgagacctttgggttcatcacataaatgagcaagtatcatccttccctgtccatgcatggcaactcaaaatatgagcactaattccaggaaggaaaaacaaggatgatggtagattagtattatgcactatgtttgcaaatctcactctacagaaaaatgctccatcactattcagtaaagaacaaagcgcagtggcacattaggtgaaccaagtggcattaggtgcttcttcagcaacagtatatcagtaccaatatgttgtgcatgttagccataaatgcttttcataaaaatccaggcggataatgggactatcaagtttttaattgtcgcaatataacttggatggttagatataacctaattagtgatttgtgatggttagataaaaattcctagacttataactgctgtgcagatagatcaaagtagatcataagaaagttttgcaaagatgaaaactataatgaaaactataagaaagtaattaaggaactgcaagttgatgaaatgctgatccacatttaatgaacacaagaatatccaatatgatatatcgtccacaaaacaagctaaacagtattcagtttaccaccctttccagatcaaaaggcaaggtcagctgatggcaggcatgttcagttgcgtaactaattgctgccacaagacaacagtgatacaaatgcccaaataccattggcctgatttatctgcatatggaccctttgcaattctgctgcacagttctgtataatttggtcattatttcatatagtttatagtatttttataggttagatgggttgatcaaaacctgattgaagcagcctattgtttttctagtaacctactaacaaagatccatttccaaaatgtaggaagtttttacttgctcttagcagaccacattttgactctaaactcttagcaggccgcattttgactctaaactctaaaactggatacttgacacccctcaggtattgaaacaaggctggtttcaaaaacgatttttgtccttggtgccctctcaggctctcactaactgaagcatgaagaatgctgaaatagtgaagagaactggagcatggagtgcccctggttgctttgaaatttgaactcatagcaggtggctgtttttaaggataggcaaggcctagcaggaaccatgtggttagaactgataagcatgacaacaatgggtatgacagtggctgctccagtgaattggtgattgcgcactgaggaaggaggtagaatcctgtgttaaaccatcgattaaaatccatgctaggggcaaaacaaattaaaaacttaccaccaaatatccaaaagcaaaaccagttccgatcacaagcagatgtggctgattcctcataatatctgaaggagagaggtaagacctgcacaataatatacagaatcctaagtatttcattcagagcattgcatcatataataataaacaacaagattactgatatccataccagacagcaactccagttaacaatgcaatgaaaggaaggagctgcaagccaaataaatatatatataaagtaagaattgctatctgctgagatgatcagatgaaagcaaaagtcatatggtctgttattattggaactgttcatatgttgtacttcagaaaagtaacattctttttaagaacatcaggctctgtaggaattttataaaaaaaaggatgttgttctataaatagatatttcatatatgttgactgaaaaaactttataataacatggttaggacagattaaatcatgccatcatttttctattgaaggcttgagcaagattattatcaggggcatataatgatcgagatgaagatatgctatcatgtgctgtaccaaaaaagagcttacaacagtatttaaagatgcacgaatgctttgccctgttaaacagttgtttcttaaataaaacaagattcactcaacaagctccaaaatatgtactcctaggtcttgtcttattgtttgagaacttgaaaatatgtactactagatcttgtttcattgtctgttgaaaacacactgcccaagcagctacaatcttgccaactatccaacaacacattgttaagaacattgggcgcccgtttaagataaagcttacgatgcaacaaaattgaaattaacagctataaaagatgaatttgacattttacaagaactcagggccgattcgatttgtaatgagaagttgtttattaaattttctgcattcataccacaagataaacagacctaacagggaaaaatatattcatagacataaatgaatggcttagaatttccaaaaacacacaggactatcacggttctacagcttcaaaagtttccaacttctagtcttactacataagaaaaaaaatgcaataagcttaccattgccaatgccaataccatgcttccttttcttgcttcaactactttttggacattgctgacactattcaacaggagaatagatctcattaagtaatgataggtaagaagacactgtagaacagtgctgctttttactcttacatcttatggaaagtgccacaaaaagtcacttaaggcaccgattcatgtaacagaaaatagcaaccattaataagatgaacttgatacttatggaccaaattctacgcaagaatcaattgtttgtaagaaaagatgagtcaaaagatatatggtacatgagtgctatttgttaatcttatttcatgctgtggagctgctgcaaaagttacttcagaaagaataagaaagataatttacactcacttggatccaatggtagggattacggcaaacaggatcataagaatcatcacaataatgtataaggggatatctgatacaatcgaaacaaaaaaatcagaaataattctagtggcaattttgttgtcttttgtgcagttcgttggtaacatgtgccagttgatgtcaaagctgatagtaaatatgtgattatgttcatacagaatggaaataagtattttcttgtgcttgaaaaaacgtacctggaataaatggaaggggtacccaacttaaaaggggtatcgacttccgaaaatcttgtgcccaccattcagcgcctatattgggacacaaaagtttctataacacaagtgcttacactagaacattgcaacaaagatccatagaataaatgtgcacaatgtgttagtttattacagaaattaccagtaagaaaggtaaaagagtgggatagatatatcagcatcaggccctccgtaggtccatttattaaaggaagaataagtgtatttgtaaagaagctggtggcatgagaatagcaaatgtcaataaacaatagtcagaccatctgtgaatcaatgaattaatgaatgtattaatgtaattaaagttgaagaaaaagaacatttgccagacattttagtaattaatactagtaggttttgttacaagctgagccagcaaatatccatgtatgtaatcatcagttaaaaacttttctattgacagaattagaagaaacagaacccaagatgttacacaaactggaaaggtaacatttactacatcatggaaacaggataaagcagataatcatcatatatagtgattgaaaaaaacagacatttggtctgccatttttttttctccaagtatgttctcttgcattttgttatgtcacattatttcaaagcaaaatgagaaaacagcttattaacttaaacattacagagctagcttctcaaaactttaggaaagagtaaagtgtacgggcggtccctaaacttgtgtgggtgtgccaactaggtccctgaactctcaaaatgaatttttgggtccctcaacttgtctcgggtgtcatgtaggtccaaacgggtttcaacctactccgtgtgctgacgtggcatgtcatggtagcgcctatgtgtcagtagaactattatgtcagccacatatagaaaaagttaagaacatattttttctcatgtcttttccatttattttttcaaaattaaaaacatcattttctcctctctttttaaattttatttttttctacatgattgacatgtggatcgcactaacacgtaagcgtcactgtggcatgccacgtcatctcacggagtgggctggagcccgtttggacctatatgacacacatgacaagtttggggacccaaaaatgcattttgagagtttagggacctagatgatatatttgtacaagtttaaggaccgctcgtgcacttcactctttaggaaatattcttgttcgccactgaacctttcagaaaagccatactgcaaatttttacatgataggtccagactccagatccacatgtgtgacatataacacagacttacagaaaagattggtattgtcccactaaattagggcgtgttcagtctattgccaaaatcaaccataccaaattttggtatggaccattgcaaccttctcaatttctaccaacatttggtaaccttagaaacttctactcacgaaactatatcaaaatttggtaaggtgtcaaactaaacaccacattcacatcttgatcttgccaaaattttggtattgtcaaattttggctttaccaacaaatgttaaggtgtttttggcaatgaactgaacaaacctttaatcttcatcagagcaagaagattagtatagactaacagtacgtctaaaggctcagtggttgctacaataagcaacatccttcttggaaagaaaaggatgagagcagtttttgaggaaatatacagtaatcacaggataactgagttccaaagtacttactgttcccatgttgcaagatagaacgggacagcagcaatcacccagaaacagaaagtaaaccttccacacatcaaggtgcttccaagggctaatgcttcaaactaaccagggatcaaatcagtcaatatagaagtatagaacagagtgatttatataggtgagatggcttaggaatccttacagcacaggcaagagcatcacatcctgtaaaatgacaaatttgcatattgtgagtataagatagacatgtgggtgtggaaagagcattaaaccttaacacattaccatgatcaaaaagttctcctagaggacttgatgagctagtgcgccttgcttgtttaccatcaacagcatcaaaagtctaggaaaggtacaatacaataccattaaagcaaatgcaaggcaggagcatagttcataaaatcaagttgatgaacaactgcattatgatttccagtttatttggatatattagaaacacaatgcatacggtaaacatatacagaaaaaaaaatcagaactcttttactacttgcaatctcaagatgtttcacaaacctggtataagaagagaagtaatccatgggcaagatggacccacctagggggagctgtgtcgaggtggggcgaatagatctgcgaaattaatattctatcaagaaaagaatgggtgcaacataacatgaagcatgaaaagaacgggcgttaaataacacgaaacatgtaatgcattagaagatatcaaagttagggcattaggcattagcagctgatatttttaacagctccctcaaattacaaaaaattcaagcaagaaagaaccttacatagccaagaagtgctgatacaactagaaacatgaatccagtgagtgtgatctgaaatttcagaaaacatcataactgttgaccatagacaaggaagaactgagaatatgtagatcatattcttaccatattaggtctgagtgtggatccatacatgcaaatggaaaaaaaaatgaatcagcatccatgtttttgttaaaaaaagagtaatatacatgagtatctttgataattattatgacacaacaggaaagctgcaatcgtagccgcatactactctacttcttttacatacagttagacagtcatggttgttaaactcctacaaagttgaccattggtcaggcacatacaagtgaatcatcaaagcaaaactagctcacagattaagaaaaagaagcaaaactaaacagatcctcaagcagacttgatatagtaaatgccaaatatatgaaaacacatagatgcatcaattgaatttgatttatgagcataatcagtcatgctcactgtggtcctattcatgatgcaaaatgcctctcagagacatttgagtttattccttccctgtctagatgaaatgacatggcatactactaagtactgacttactggaattatgtcaacaaattaaggcaagcaagcaaataaaaaaataactaactttccaacctgtaaaattacagttcaaccagatgctatggttttaaaaccagctcaaccagatgtttcttttgactggtcaattcaaccagatgttacttcccagttaaggccttgtttatggaataatttcgcaccacaataggtgcggaataaatccgaaaacgcttactatcgaacgtccgatacgtggagaaattccggacggtcccacagtcaaaagtcgcaacccatcctttcccaaccttatcctcattcctcctcatccagtcatccctaacctctcgcatcgacttcttctccgtgcagctcggccacggcgtcatcaggtggcgctagcgccgctgtagacggcggggctaccgtcacgggtggccggattctagccgttcagccaacaccgcgagaaagtggtcgacgccggttaggccttgagctcgccggcggcgggggcaccatggttgtccgttgtcaaagaggactcgagctcggcggcggtggtgtcaacgtcacaaggagatacggccagcgacggttagggccctgagctcgccggtggcggcggcactgcgaggaagcgggctggagcttgaggcgccgttgatggagatggccttgaactcgccgacgaaggtgaggatggtgggagcatcgagctagcaaggatttgttccatgctagttgctagtttctttatgttgcacacaagtgtttcttgatgttgcatttggtatttcttgatgttgcaattcatatttctggatgttgcatttggtacttgatgctgcagttgatttctttggatgttgcatatgtttttgctcttgaagtatgcgttttttagtgttcacatccgactgaaacattttcggtaaaataatgaaacattcttccatgaagaatggaacatcaaagaaacaactctgatgaaactttttttttggaacagtgaaacattgcaacaacttatggtgaaacatttatttggaacagtgaaacattgcaacatctcttagtgaaacattgcaacatctctttaatacgttgtggaacaccgtccggagatttgtaaaactgcggccgtctgatgtgtagtcgtccccgaataaatctcgtccaatccctcccacttggggattaaccaaacatgggctaaatggttctttcctaagtgttcaaatgcaatgtcactgcctttttccctcaaaaaaggaaaaaaaaatgtcactacccccatatagtatgaccaaattcaatcccctcgcccatgctactccctacacttccacaactcaagatcaaacacacacaagtccctaccgcacactaacctaacaaatcacgaactagcagactactagagagcagagccagagcaccatcaactactcaaactcgagcgaggagcggggaagggaaggtgggggggggggggggggcgctcacggcatccagagcgggaagagggtgacgcatctgctccagaagggctggagcacgtacttggccaccaccgagtggtcctgcccgctgtacctgtaccgcttcagcgtctccaccccgtgcgccccgatgtaccccatccttcccctcggctcgctcgctcgctcgtcggcggggagctcctggtcgggggaggcgtcggcggggagcagtggggagcttgggggcggcggcggcggcggcgagatcgcggaggcggagaagatggggagcggcggatcagtgatggcggcgatgggtatattcgagtcgaaacggttcccccgtggctggccgtgggcgtgggctggtctttcgctttcgactttcgagtgcacgtcacgactcaggggagcctttttcggttgaaggggtggctgacacctgtcccggagtccaacaaactgtaccacaaaaaggactttgttgcttctttttcttttttttccttccctggaaaaatatccttgagttacaacgagttaatgttattttagtcttattattcttatatggtttgagctaggattaaattcattgtggaaattcgcttaaatatttattttaaaaaatcatgagctgcaattaggattccgactatcatcttaaattaacatgcgagttttttatagccgacttatatacggatctgtatttcgaaaagcaaacgaacttaaaatccaactcatacatggatctgtatttctaaaagcgaacaaacttaaaaaccgattcaaatatggatgacgtaccaaaataccggcaaaaacttttttaatctttataatggtagagatatacgcatagtagtattatatttattattgtatatgtaaaaccatattagccaacaataagcaagtttctcaaaaaaattaatagatttattaagctggtttcaaaagttacacacaataattgatccaaaacttgcaacaagacaagagtaatctctcccaaatcttaaaaaaattagattgttttgagatttgtacggtgccctctcaaccctaactcctctctcctcaacctcgtgccaccattttactaagattgatgtgacaagaacccttctcctcgtggcctgcctcttccctggtaccgtcgcctgaccttacccaagagcgccaatgacgctagtgaggcctctcggccaactttctcccctctctctggcaatggctcttcgtcgctaaatccaccatcgctagtcattgtcacctaattagtcactctgtgtttgccctccgttgttgatgtcagcccatccctgaggctgcatcgacattgccacccgctttgccgcgcctgtccaagtccaccgctcatcgtgggattctccgccacccacaaccatctctctgaccctcgagaaactcccttcttttgtctctcctaccctctttcaccttgatcctaaccaagaactataactggtcgggggtcgatgctgtcttgttggagctaccatgagcccatgacccataggaacatgaggaaaatgaggccaatacgaatatttgcacaggttcgacggttccgaaatttgtgttgcatgaaggtttagtaattccattatctttatttaatcacccactaacatctccatatattgcaagggatcataacagggacacatatcatttgcagaactgcatctatagtagtagttactaaccagatgaactcggtcccatataacaacggcacctattgcagatgcagtactgcaggcaatccatgtgttcatggcaagatagcctgaattgcttatgcgcgcggaagccaaaagacatcaatggcacagcatcatgggccgtcagatcagagacgaacgctcggaatcgtatctggagaaacagatagcgacactcgctgcctttaaaactaaacccacgcaggtttctgaaacttggaggcgggacgggaggacgacgacgcaacggaagcgacgccagcggcggacgcggcggcggctgctgcttccccggcggtggcgcgctctcctccgtctccatttctccggtaaggtagcgccgccatcttcgtcctcaccgatcccaaaccagcgacgttgtgcacgaagtaatcgcgcgccacgacgctctcgcaggtctcaggaaccgcgcgccgcgcagcgccaccgcaggagaggctcaccggcgagcgcaagcgaccttccctcagatcggagctgcagcgcttaccctgctgtgtcccgtcttcgcctccccgagggtcacccaccactgccgctgatttcacaaggtacgtcctcccagtcgccatcacatatccgccagatgttcgacgaaattcctacacggttcggtggttttagttggggtacattttgtcctctggtatgttattttcgagagcactgtatcaacagaagcagccccgcgcccagagcactagattttacagatcacccacatgccatgcttcaggggaagagttgataacgcgcaggagagaaccatccattgaaacatttgatattatctatgaagatgattgattgcattgtcctcgtgctgagaaatagcctagttggtctggtaacctgcaagtgctcaatttttaacatcttgcataattctcgcaggagaattgcaaaagaaaggcagcaatgaattggtttgctctagtgttgagattcataggatctgttcttcgtacgagccgaggctgtagtcgacttcgtgcacttcttgctgctgatactagtgaagggaaatctacaggaaaagagaacaagagcatcaacaccggtagatttgacagagtcaataacattgttgggggactacatgatgtattcagtggattagcggttgccgtggattgtgttgggggaatcggcgctatcactagtcttgttcgtcatgtttatggtgtatttgctgcttctgttcgaagatgggcaaccttggcttttcgctggatttatcatcgttagcagatcttgggacagcaacaaacctcatctttacctatcagtttcactgctgttgatcacacaattatttctactgttgaagatgcccaaatagctgctgcacagtggaatgggaaggaactgatagatgtgccagaagatataactctggagctcgctattgaaatatggcagatcttcttagaacatgcagctggcgatgtcattgacaaggccccaagtctttcagttaaggtggggcaacagattatactgcgagaaaaaatcaaagcagcatcaatgaagttacaatcgaagaaagcggctatagaggtacttgagagccatatcaagtgcacagaaggtgatcgggatgcatgtgatcggcttcttcagaatctgcgtggccagcgacagcacttgtagcttcaaaccatgacccaatgaaatttcaattcatgttcaagaagaggaatacaaggggcaatgacaattttgaagaatcattaacaatcctatactacctctaggagatgtttgtacaggcaacatacctcatagtgttagtagatagtagtactgtcaatatggttacaacttggctttaatagctgttacttagtaatttggctgatgcaatgacttttttttttggtgagaaattgtaaaagccaaaatagggaaagaaagaaaaaactatgagaaggaattttcttttgccaggggtctgggtggccatattccatatgaagcaatgtttgtatggttagttacagttttgcttgatttgtgtggtagtacctggtaatgtggtttgcaatagtttttaaatatcagttgttgccgttttactcgtatctactttgccaaggcttgaaaagatttgttgtagcatttttcttaactctagtacggagtaatagatattgtatggtttggaagatttaattgccagagtgatatgagacgtccataatgtgcttttccatccatatttccgcatcatattcatatgaacatgtgcagaatctgtttggtttgtgtaggtattgctactatttggagtttggaggtcttcacatgaaacgcgagcgtgcattcaatcaatcaggtagtgtagctgacaaagaaattttatttcatctgaggatattcttttctcatccgctcagctcaaccctcgtcggcggcgtggtcagtgtcccatgatccccatccgcgatggacctgcaaatgcaatcctagtagagtttccttctccgtttcgaacaagaacccctgtactttacatcaagctcgattacaaaatctgatccaatacttccaatgccctatgacccagattggccaaagaaaaaaaaatcgaaatcgccagacctgcaccaaaggcatggatgcggcgggccgccgcatcgttcgcgcgctcatccgggccaatgatgcgatggagcctgtgaccgacacaatcgcctccgccgccgcccatgtcggcctcgtctacggcgcgatggaagttgttcgggacattcgcgtcgtcgtcggcggcatgctcagagttgctcggggcagcggagatggcggccagctgaagctgctcctgctgtcgacctcgccggcgcgtgcgggctgggcacttcaaccagcaggtacgcctgatatgctccagtaccttttctatttccaatttgccattaaaactacttccttcaagttgttttgatttttttttccaaacaaacttttttaagtttgaacaaatttataaaaaaatatatatagcagcatttttaacataaaacaaacatattatcaaaatatattcagtacaatatttaatggaagtttttggtgttgtagatgttgctaatttttttaataaacttagtcaaatctaaataagtttaattgtggcaaaaagttaaaacgactcataatatgaaacggagggagtaaaatcttattcaagttgttggatcagatagtctctttgaagtttgaacccatcaagattacatcgtgtaaaaagagatgcccttttttaaatgcccaataaatcaagaactaatgacttacctaatcttcttagcaccaagaattacaaacagccccacattggatcattggatgggcccaagcatgtatagcaactggtagacattgtacgaatatcagcgattgcaattttgaaacaaaatttttgaaatttcagtaattttatccccatcagcaggcgcatatctcggccaaaatttttggagttccttttcctttcaattttttgtgaatttgatcgatatttattcaaaatcattcaaaatttattaacttcgaatattttcgtccaaaaaagttccaaaattccgaatttttgttgaaaaacaaaagtgtaagcgctgtacacgatagtgcagtgcacagttagctctcaatgtggacaaattacagcaccactacacttgggtcacaacagtcggcactaattggccatcggttgtttcggttaatcccatgacgaagcgattgaaataaatcaattccaaatcccacctaatcaaccttaatcaaggccttagagggccagacgtatgccttggagcatccatttggttttctgttgtaactgtaaggcttgtatttttttttacttcagtactggaatggagaatgaactgacctgcagacgaacgacatcagatcattgccatcagaagctaaaccacggaaaggggagaaatgttcaatttgatgatcttccagaggtttgtgaaaacttccttgcaaggtttatacggagtatggaattgaacttgcaagcttgggggtgtgacatttctattctgcaggatgtgatatgcttgatattttcgaagctgcagctgaaagatcttgtaagcaccagtgtcttgtcaagcaaatggaaacatatgtggacaatttgtccaacactaagatttgatagcagtacactgtgtggcagcaacatgtgcagtgcagaacaatttactcagaaattcattgacaacgttaatgcggtattgcagcagcaccgtggcaaactggttgaagcactagagatcaaaattgattttaacagcagactggctaatcatctcaacaactgggttagttttgctgtatcatcaaagacaaagagcctggctttttatttaccacaaaactatacttctaatgtcttttacatatttccctttgaacttttggacgtcaaaaccttatcccgtctgcagcatatccaacttggctttgtatctttaataaagctacctttccagtttagtggttttccaaacctgaaaaagcttgacttgctcctgctgcgtactacaagagaggaccttgaagatatgatagcaaactgtcccaatcttgaatggttgagtttaaatagatatacttgcaagttattcactgccagataacaaaaatagaaatagatgcagttaatcttaaggcttttgtatacaaaggatttaagctgcgtgttgacttaagtgaagcaaaaggactggaaactgtagatattgaattctttggtatagctttagattatcttcttactgcaattcccagtgcacttcccagcgtgcaaaatctgactattgaagctcgcattttacaagaggtttgttctttgaatgcgctatttgcaaagactcctactttctaacctcttacattcattttaatgactttatttccctcatgtcagtcaccctggtttgtggaaacttcatgcaagttttctcagctcaagtgcttaaggatgttgctgcatcaccggtttagtgataaccgcaatactctcggcttggcttcctttttgaaggctgcccctctcattgaacaattggagctcgatgtaagtcttcttgattgttcacttacagctcttgctatgcattggtgccaactcacccagtactatttgttgcgtgtttttagttgtactttttaattaatgttcttgcaactgaactgtatttctttttggggggaacatattgcctgaggcatccttaaaccaatccgataatgttcctccaacgagttcctcgaagttctaaactttattaacatcattttgccaccatccgtaaactgcactcatgttcttggcatatataacaaatctacaagtatatttatctagatatgttggttgcataggccatgttgagctgcttgtgcacattgtggaaaatgcaccggccttggaggccttaacgatagatcgtacacagagaagaggccgtcctttgcatgaatactcggcaagattggctggtatcgcttctagaggataccttgatgggaaaattctgcctactacgaagctcgtaattatctaacatgctatccatcagagaggggcatagttaattagggcattgcatgcgctgagatgggaacttgtgaagtgttaccttgtgtgtatactctcccatcttaaaataaatcaacttttatatatgaatctgttcggattcgtgtacaacagtttaactcattggtatccagattcgtgtaaaaagttaaacttatttttggacagaggacctatatgaaaggcaggctggttgttatgcaatttctacagtccgctttcacatatctggccctagccctactgcatttcttggtgatcttgtgttgcaaaatacttactagtatctgattttaactgaacatacgggcacacgccggtgcctggcacgttaagacatgtgttcagcatcaataccatacacttctactactgttctacacactgcaaacatttaaattttaattaataaaatgtgggttcaggcaaatcgccgacgagcacatcaagcacacaatcgagaaactcatcagtgttacgatggattcagttagagattagatccgatggtttcgaatttaagctgaacaatattttctagaaagtctaaatactcccttgaagtttatctaacacactaaacttcgaaccggacatccaacttctcgaactttaaaattttgttcatacaatccatagtcttttttcctataatttgcaataagttggatgagtctgactatgtgacatatacattggacataagtgttaaaatattcacttgagtacctttttactcagttttcgccatcacttataaataagtatcaatataaattagtatgacattattacagagtataaatcgacgactgacatttgatgatatgttactcaacacagctcacttaagctttccaaatacgcaaaaacaccatccaaaatcatcttaggtgtactatgaatggcatggtaaaatttaaggagttgagtgttcggttttacagtttaggattgtagacggacttctatccaaaatttaagtgggcatatggacttattcaaatttgataatatcttggattcaaatttgttggctatacatcgtcttgaaactaatcaacaaagttcatttaacttcggttaatcaagatgaattatgaacaatgggagatttaatgtacttatattcgactcacaaagatctggttcatgagtcacgatgagatctttgtatattattacctccgtttttggttataagacgtttttactttgaccaaagtcaaactgcttcaaatttaactaagtttgtagaaaaaaataaaaatattttcaacccaagacaaatttattatgaaaatatattcgattattgatttaatgaaactaatttgatattataaatattactatatttatctataaacttagtcaaactaattatttgactttgattaaaatcaaaacgtcttggaatctgaaacggatggagtatattctaccttatcttgttcggttaatatctcgtacaattaatttgaagtggatttgaagatgatttatttcacacttattaaagtgtggaattattttcactcatttctctctcatccttgtcttttttttttagccggataagtccttaaaagatccgatcacttataggactttaaaccttgtgtttgactcataataaaggtataattggttgattaagagtccaagatggagtacttcttgcttggagaggaggttactgtctagcgggtcctaccaaacctccaaatctgagtagtttttttaagaaaataatttttttttcctgatcaaaaagaaaaatcgcaaataaacccaaaattaaccgccgccgccgtcgaggaacacctcgcctgctcggaagccatgctggcgaggctgcgcgcggcgtcggacgcggcgcgcgagctcgacgtctgcgtgcgccacggcgacgacgacgacgactacgtcgtcctccacggctgcgaccgccgccgccagcactacggccacgggcgctcctgcctccacggctgctccggcgtccgcgccgccggcggcctggtccgcatcgtcagcggcgcgcggcacgtccgcagcgcggtgggccgctacctcgccgccgcggacgacgacgaggagcacgacgagctgtccgtgggcgacaaggtcctcatcgccgccgacgtcgtggtcggcctacgacgtggtcgtcggcggcatcgacgtcgtcgtcggcgtctgcgacctcgccgagtacgctcgcggcgctctggcccgcctccgccggatgtgcccgggcgttggcatcccagtcaggttcaggtatacctcaaaccagattgaattccataaggaccgtaactgaatttgatccagtacgtgttcaattgttcgccttgctgctgctcgtttggaagggtacaaataacgctagattttcttgttgttttagtttactttagcagattcttatactttcagatcttaaagagagggtttgagatcagatcatcccaattttgtccagagaaagctttgcttattactttctagtagatagattcagtgttatcttctagacttgtatcacttcagtatttgcattctttttttgttgtctgaatagattagatattgtagatgaaaagtacatacaattgataatgttcattgcaggattggaaagaagaaagaagattgcggtcccaaacgaatccgcaagccagggacaaaagaggttcgatttgaagacctttctgaggtatatcaaatttcccttttcggttgatatgtctacaaatctacaccattaaattgacagccatggtgattaactatggtgttggtgttgattctaggatatgcaaaacatgatattttcaaaattgccgctgaaagagactgtaaggactagcgttctgtcaagtaaatggagacatctgtggaaaatttccccaaaactaagatttgatggcagcacaatgcgtggggaatacatgttggagaaactcgttggcaatgttaatgcgaccttgaaacagcagcgtgggcggatggctgaagctttagaggtcaaacttgaatttcaaagcaggctagttgcttttacaggcgaaaaaagcattctggttgatcatctcaacaattgggtccatcatcttgcacaacgagcttagctcttgatttagcaccaaaggaattcagggatcgccatgaccgctacatgtttccctttgaactcttggatggaaaagccgcatcttgcttgcagcaaattcaactaagttttgtatctctcaagccaccaacccaattcagtggtttcccaaagctgaaaaagcttagcctgcacctagtacaggtcatcgcaaaggatcttcaaggcttactttcaagttgttctaatcttgagtggttgagtattgttagatgcaatcttaatgatgatgaactgaaggttgattgtgcactgtcccgactgctatacttgcgtattgcaaactgtgagatatcaaagatagaaatgtatgctctcaagctcaagactttcatttacgaaggagcacagctgcctgttgatcccatccaagcacaggaactagaagttgcagatatcgttttcaagggtgatataacttttcagtatgctctcactgtgctccctgtggtgtttccaagcgtgcaaaatctgactgtgcatgctaattttgggctacaggtgggtctaagaaaacttcgcaagtcaataatgatgaccatatcatacttgtagattttctgctgacatggttaatgtttttttattttcagtttccttggttattgtcaactaaatcaaagttattcaacttaagtatttgaagttgctattgcctcaatgttctggagatatggacaacattgtctatctagcttcttttctgaaggctgcccctctccttgaagttttggagatccatgtaagtacttttgtgggtttgtcttctctggtagatatgttcatgtgaatgtttggttgtactacttgtaagtagtatttattttcaagtccctaggattccaggtattttcactgacatttgtccctaaattaagttgctattgcacatccatcagcactacatgttttcttgttttcacatgtttatgctcatgctaacccagaatcaagttttggcatataccaaactatacttaaaaatactgttcttttggaaccattgcagttcaatgtacctggctacgaagatgcagggataccggttctcaggagcctcccaaagtgtccatacaagaacctgaagagcatatacatcacagggttcagaggcctgaaaggccaagctgaatttcttgtccacgcagtggaaaatgccccggctctggaggtgctaaccattgacacagcaacgaaaataggcgtccgttctgctcaacacatcgaaagcgccggtggttacgttgctagaagctgccttgcaagcattgtttcacccaagaccaagtttcagatagttgatacagctaggtagagtagataccgagtactagtactgtgtcaggtactacgtatgcagttattgcctgttgtgtttgtgaatttttgatacgtactacgctctttcgtctgggcccctggggtgcttgcatcacatctgaacatgcgtacgcgaagattggcacacagatggatgcagcatgggaaattttgcgtgctcggtttgcatctcttgcaggtcacgaactcttctactactccactatacgctgtgctatttgttccttgtgcaacgccagtgtctcaccatggttactgccacacgacttgatagttgatgcactcagcagtatccagttactgacaaagcgaaaacttggtctgtttggtttgtggccaatgcaaacctcaccaaaaatctggcaatggtaagattttgagtgctgacagatttttggtaacgctgctcatttggtttattgcatttttttcctttgtaaaatgcatgttttgttgcgaaaatgttggtaataccacggtactatctttcttccagaatctaaaaaactgccgcaagttttttaaaggaaaaactttcaaatctagctatagtagtataattgtaatataattttattataactatactataacttgtatataatcattaaaataatatatgcaactttatatttaacttgtatagagattacaatgtatagttacaatgtaaatatagtctaattatattgtagttacactacgtctatactatactccctccgtcccagaatataataagttttagaattagacgcgattattaagaaaataggtagaaatgaatggtggagaatataagaagttttaaattagacgcggttattaagaaagtaggtagaagtgaatggtggagagttgtgattggatgagtatgggaaaagtgaatggttgagggttgcgattggttgggaagagaatattgatagataagttgttatattttaggacaaatcctgagagctaaaaattgttatattttgggacggagggagtagtacatttgaaagttttttttgccaaaaaaaacttgcgacagttttttagcagctctgttttatcagggtaaacacgattactgagataaagtaggtaaaaataaatggagtagtttgtgattggatgaggagtaggggtaggcaaaaaattgaatagtgaaaggctataatctgttggtgaagaaactatcactatattttaggtcaaattttacaggtcgaaagttcttatttttaagatggagtaagtaactcctttggcaacaaacaaacggaggcatcatctctatctccttgatttttttttgacatggctaaattaggcatggtttagtttccaaagtttttttctccaaaacatcacgtcgaatctttggacacatacattggagcattaaatatagattttaaaactaattgcacagttagagaggaaatcgtgagatgaatcttttaagcctaattagtctatgattagccataagtgttatattaacccacatatgctaatggcagattaattaggctaaaagagattcatctcaaggtttttaggcgagttataaaattttattcgtgtcccaaaaccattttcaacatcccatcaaacatctaatacgacttttaaaaagttctcttttagcgaactaaacaggcacatattatccgtgagtagtaatgcaaagaccctcactcaacaaacaatctctctgttaaaccaggacgtgccaacgtttaacatggcgctgtactcctaatccactggctcgcccgtcacgtcgatcagcacttcagctgagcgagcacgcacgcacgcgaccacgggcactcgcacacgatgacagagagcgcgagagtgcaggttgcaggagagtgatttctcttctgggcgcgcacccacccacgcgcgagagagagaggcagaggcggtcaggatcagggctggctggcacctgcgacgtcgctgcagactctgcactctgcactcctcctgcactgtctgcacgcacctggccctccccctgaacactggccgaagtgacccatcctctgcacctgcaccaccagctcattatcctgccatctgattccccctcctgacacctccacactgcctgcattcatcatctccccacccctgtactgtactcccttcaaaaaaaacaaaacctggttttcatatccaacgtttgaacttccgtcttatttaaaaaaattatgaaaaaaatataaagacaagttacacataaaatattactaatcatattttatcatctaacaataatgaaaatacgaattataaaaaaattttatataacatggacagttgaagttggacacgaaaaattaggttttgccttttttttttttttacggaccgagtatacgtagtgtaccactccgtataatattactactcctccacactggacagaacgaacaggttgtggttgtagtgtgcttgtgctgggtgaggagacagacgtcgacgatgatggccggcggcggatcggggaggtgcctgttcacggcgacgcagtggcaggagctcgagcaccaggcgctcatctacaagtacatggccgccggcgcgccggtgccacccgacctcctcctccacctccgccaccgcgccgccgccgccgccgccgccgacgtcgacaccgtcccctccctcgccttccctccccatcaccgtacgtacattgtcctctcgttccgatcgatgcgtacgtgtctttctttaatttacttatggcgttgcgcgcgtacgtgcagtggggtgggggtgctatggcgcggcggcggcgcagtacgggaggagggtggaggacccggagccggggcggtgccggcgtacggacggcaagaagtggcggtgctcgagggaggcgtacggcgagtccaagtactgcgagaagcacatgcaccgcggcaagaaccgttcaagaaagcctgtggaaatgccgccccccgccgccgccgccgtctaccgcccgtccgcgctctccatctcgccgccgccgcagacgccgacgcgcccagctacggcgccggcgccggcgctcctctccagctccacctcgactccttccacgcctcgacgtcgccgccgccgtcctaccacaggtacgcgcacaccagcagcgcgccgctcttcccgtcgtccgccgccggctacggcggcggctggtcgttgtccaaggagcactgcctcaccctcggcggcgccgccgccgacctgagcctcgacaagccggcggatcaccaccacgacgccacgtcggcgacgacggagaagcccctgcggcgattcttcgacgagtggccgcgcagcgacgacgggaggacgccgtgggacggcacgcagctctccatctccatccccaccgccgccgccgcgtcccccgacctcgccatcgccggcgccgcctcgcgctaccacagcaacggtacgtgcgttgcattgcacgaccgatgctttcactcaccactgaggcactgatcgatcgattcttgcgtgttttttttttgttttttgttgcatgatcgatcgatcgaccgaccaggcgaccatctgcggacgagcgagtgatgatccggcgagtttggttgctgcaatcctcagacgcaacggcacaagcagacgagtagcagcatcgatcaatgtcattggcttgataacaattgtattagcatgcatcatgtctttaatctaattaatcttgagtggtttgttcgtcagtgacatcttttgtttcactgctcgtttttacttgagtctgtgagcacatttctctcgtgttatactctatttgttcgtcagctctagtctacatcaggttgatgctaacgccgtacttctgctaggctccacagctcccatgatccatctgggacagcaggtcaagcgtgtcaggttaattaacacgcctgacctgatctgagctctcgcatgcacgggcgcaatgatgatgcaactttctctgcgactgacgttgtctttggacgatccatctgctgcaaaatcaaaatacggattatcaaaaccgggcgtaacaaattcttcgactgtttagattatactaagtgccctatcgtttcgtttttttataataagctaaaacggtttattagaagataaaaataaatttgtaggtaaaaatcaatgctgaaaaagaaactacgttgaaaatatcttaaaatcaatatcaaaattaagtttgaaaattttaaattttcaaacttaatgggccatccgatgggagcctaactttttttctttaaacttataactttttcgtcacattgaacttttctacacaaactttcaacttttccatcgtatcgttttaattttaacgtgtaactaaacacagccgaacttccttgcgaatatcacaaattcgtgttacaatagaaacaaactgcagatgaacagacgggggccgtagctgtgagcaaaagagaaaaaaaacggataaccaaatctcgccggcaaactgacgttcaaaacccgcacggaatctgacggaatgcacgtgaggagtatggtcaagccgcggtatgcttcgccgttgtcggggcgtggggtgcggcgtctccgttggtagacagagcttgagagatagtactgctactagtagactagtagtactatcttctgtaaaagaaattcaaatacttctttcatctatttttgatagtaatatttttaaatgtaaaaattttatttttgatagatatatttcaatccaacaacttatcatcttaatgactttcttggatttaatacatgactctttattcttctacacatgattggctacatgggcattgagaaatataaatattaataaatcgcttgtttacgaggaataactagtagcatatttaaatggatgataagtagaattacttatccttggtctgtgtgacaagatgaaatatgactatcaaaagtagatagagggagtactagttacaaaaatattttaaaatttttgataggttaatatactctctccattctaaattgatctatatattttataggtataataagacaaaaaaaataataactctctcagaggtatactctataatatatcacaagttaaaatttagtttttataagtgtaataaaatagaaaatataactatgaatgtacaacaattattttcagtttagtttattttttttttgacttatagaagttgaatttggttcaatatatttttggagtgttatattttaaattaattcattttaaacctgtgataactactactagatgggatgaaaatcatatccgagagagagagagagagagagagagatttgcttgctgggttgccgtgcacaggtgaggcattattctactgccactggcagtctgtctgcttgactgacacacccattaccctgcctgcttgcttgcctgttcggactcgttacgtcctcgctttttggcttggtaaaacagaaaatttttcaagttaaggggaaaaaaatctgagtactaggccctttcaactttcagtcacgttaaacctttcatacacacaacttttctactgcatcctatcaatttcaaccaaacttccaaactttagtgtgaactaaacacaacctagtatcatatttcctccattctaaaaatatactagtaagagattttactagtaggaaacttttagaaaacacgattatggatagattctttgtctggatttatagttttagaaattatctcatttatttaaaatctcgtatattttagatagagagaataataaacgaaacatgagtacttttaatatattgtgctattggacttcgtttttaccaggcatgtgaaaatgcggggcaggaatttgcccacttcaatcctaatcgttccttggagagttgcagtgaaactgaccacttcggtccattccttgcagcgaagctgttcaaatggagggtgtgtttagtgcacattaaaagttcaattgaaattagaatgatgtgacaaaaaattaaaagtttttatgtgtagaaaaattttgatgtgatgaaaaaattgaaagtttgaagaaaaaaattggaaactaaaccagtttggagtagtatgttacaatcgagttcgattatgttgagcattaggattgattgttaaatttttcaaaagtttgccctaagttttattgacagaaagcacatggtcgtgtattgacatgtgttttctccgtatcatattaaattcatttttatcttccactaaaaaaaagaagttcatttctagctcttttcgtttatccaaattaagcgtatttttaagtaattattgcatcgaagtttgtgaaagtaaaaaataattgtattcgtagaaaataaagtgaggaatagttacattgagatttgataaaataaaagtgtttttttatgtattggtatgtgctccctccgtccaaaaaaacttaatctagtactggaagtgagatagagagagtatgaaaaggataaaattaacttattttgggatagatgtaggggcctgtttagttggcaatttttttttgcctgtgtatatcacatcgaatatatgaacatacatttgaagtattaaacatagtttaataacaaaacaaattacagatttcaccagggaactgcgagatgaatttattaagcctaattaatccatcattactaaatatttactgtagcaccacattatcaaatcacggtgcaattaggcttaaaagattcgtctcgcaattgcctggcgaattatataattggttttttctctatatttttcatactttatacatgtgtctaaacatttgacgtgacagcgtaaaaaattttgtttgggaactaagcatgccctataagtgctagttaggtaaaaaagaaaagaagagctgcaatgcctaagactattccagccaacaaagaacattaattaattcacatgttttcagcttttactggctcgttttcatgctcacgttttcttgaactgctaatatttttacgatttttacaaaactttctataggaaagttatttttaaaaaaattcatattgatcttttccaaaagttctcttaaggctaatgttcaataaatcatgcgataatttgccatccattttgcgtgtgggggcctctccgaacgcagccttaaaaagtcttggaaaaagtacaccgaaggtccctcaacttgtcatcgggataaaaaacgtcctcgaaccgcaaaaccagatatgcggggtccttcaactatataaaactggtcaactgaggtccctcggaggttttcaacccggttttatccgacgtggctgctgagtccatgtggaacccacgtgggccccacatgtcagccggccacgtcataccctcttccttcctctccctttgtcctctctctctctcactcttctcgtttgggcagacactaggcagctggggaggatgtcggcggctactgccttcggcgggtgaggtgggagaggacgagggcgtcggcagccggtgacgggcgacacgatggcggcggctagcggctagcgacnggnnnngngnnncngcggccgctccgccaccgctctcgcctgccgttgcagaggccgtaggcgcggaggcgggccgccgtcgagggaggaggtagggcaagtaagggggcggggaggccggcggcgacctcctcaccgggcagagacaccgatggcgcggaggttggcggcggagaggacgagcaccacggcggagttgaccaccgcggcatcgggatcgcgcgcgaggaatcgatcgtagatggcggcagatcatagatggcggcggcggcggagggagcgagctgctggtggaggatggagtgcgcgagggagtggaaggcggggcgggaaagggaccagatgaaggccggggcgtcggtggaggcgatgacctcggagaggagcgggtcggcggtgtggaggctagctagcttgccatttcatgcgtgcatgcgccatgcaaatatagaaatgcacactgtgcccagtatatatatgcgcgcgtatacagattacagagaatcaagagcaagctatgttatttggccggtgaagcaactacgtgcatgcatgcatgcatactaatgcacaaacatatatggtgctcgattaggggtgaggtgattagcgggcttaattaagaaatggatgcgcctgccctggacttatcccatatccgtaaatgacgcgatcacggcgtattatgtatatccgcggttttgatttatcggctagataagcttgcttatcgatcaaattaaaaagataagatggggttttgatttatctgaatgacttctgttggcgcgagcgctagcgatgcgcttgtcctagcgctcgtcaccggaatatggcccagcagcagagaaacaaaacgaacaaacaaatcaagtttatctctatcgattgcttcttatctgcaggaaaatcggaggaggtcgctccggcaacgacgcgacgtcgttggtgagcgagaagacgtgcgtgcgcttcggcgctgccgcccaggttcgccatggctgtagatcgatagtgttttttcattcagaacggaagcaggagggaggaagagagggatgtctggggttaccttttggcgagccgagggagcgtcggctccttcggtgtcgtcgccgccaccgccgctctggagaagggggagaaggggggttggatttggaggaaaaggaaaaggcggcgatgggaggaagtcggaacgaatcgaggctgccgccgtgctccccttctcccgtgtcgccgtgtttcccagctgcagctgccgccgccgggcgccggccgccgtcgtgttgctggccaccgtcgcggcgccgccgctctcctctctcccgcctcgcctgccggcctcccgccgcttgcctcgcccagaaagagagacgaggagaaagaggagggtgatgacgtagattacgctgacatgtggggtctacgtgggtcccacgctaactcagctgccacgtaggctaaatccggatcaaaaccgccgagggaccttttgtgaccggttttgattagttaagggacgcgggatatctggttttacgatttgaggacgattttgtatctcgatgacaagttgagggaccttgggtatactttttccaaaagtcttcccttgcaaacagtgccacggcccactagcccatcagcccggatgtgcgtaggaataagttcaccggccatccctcaactttacaccgagattttttgaggtttcttaaccacaaaaccagaaatctccacccctaaactatacaaaaccgttcactcaaggtccctaggcagtatatacgagtggttttgctgacgtggcatcctagtcagcaaaaaaaaaattaaaattaatatgtgtggcccatatgtaagtgagacaatggtgtgggtcccatatttctctattttttttctttttctcttctcttctctccgaaatctctcgagtctcgagcaggcgtggcgaccgagggggagagaggtggccgacggcggagcggggacggcggcgacgtgagagggagagagaggcggtcgacgcgacggcggcagcgggaaaggaggagagctggcggctggcgcgacggcgagctcggcgtcggagatgttcgaacgtgccgggtgctcgacctcgggccccgccgccgcccgccgggcgagcggcgcgctctccccatcgaccctctctccctccccaaggcgatggggctgctccgctgccgaaagagctgctgcctccattggatgaactacctcagccccgacctcaagtgcagcaacttcaccgacaacgacgacgacgagctcaccatcaagctccacacccttctcggcaacaagtaagcaaaacaaatttcaacgtgttgtcatctgctccggttagctcttcttgtgttcatggtgctgattgattggttctgcaggtggaacacgcacatcaagcgcaagcccatgagccagggcatcgatccgcagacgcattagccggttagcgctgggaccagcgttgccgcggcaagcgagctgaccacgacggccagcactgtcggcttcccatccctgcaggcgccggcgccggcgtgagggagctcgaggaggaaggagggaaggctgggaggggtcttcctcgtagtcgtcgttggcggcggaggtgtctccggcggaggccgagtcagcggcggaggtgagcttgagctccgcgtcaaggagcaccgcgaagtcatcgctgccgctcgacgacgacggggaggacggcgacgacgacttggcggcggggcttatggccaagggcaaggggcgtgctttggtcggttggggtgggctggatgcgcctccgcgctcgcccacctccgctccgctgccacgctcgccctccgccactccacccgccgccacgctcgccctatgcttttctgcccgcgaccgtgctcgcgctccactgctcggcccgctgtgcttgcgccagccgccgctccgctgccgcgcttgccctctgctgcgccacccgcatccgcgcgcgctgctccgcctgccgccggcctccctcactgaagaagagaaatagagaagagagaaaagaggagagaacggagaaaggagggagaaagaaaaaaaattgtgcagctaacatgtgggccccacgtattttttaaattttttttggtgactaggatgccacgtcagcgaaaccacccatatatactgcctagggaccttgagtgaacggttttgtatagtttaggggtgaagatttctggttttgtgattaagggatctcaaaaaatctcgctgttaagttgagggacctccggtgaacttattccgatgtgcgtaccgatcgcatctgcgcaagtgagctgggccctatcctcgtccacctttcagcccggcccatttatatccagcaattgcccgtcacgcctcgtcttcctcgtcgtcttgcaagtctgcttccacctctcttccatctccgaattccttccccccgccgctcgccggagcggggaacgtggtgtttccgccggcggtttaccccaatcgggagtcctcccccaatccgggtggacttcgagtttcgagtcggaatctcgcaagaacagtccgtcccggactcctcccccccatcggatcggccagaaaaatccatcggagtcagttccttccccccgtgcgaatctgacgggggcgcaactcgtcgcggatttctccctgttccccccccacctccggcgatggccgcggtcgccgccgagcagaagaaaggttcgtcccttcctctttcctcgtccttcagcgttcgtttcttctgcttaaccccatctcgtggttgcgcaatcgcagtcgtggtgcacttccggtcgacgggcaacgcgccgcagctgaagcagtccaagttcaaggtgcggggcttctcttgtcctcttcttgttgaatctttgctccctgcttgcacgattcccacatgttgtatcgtctgatgccgattattgttactgtaatttcgcaatgatcttgcgttaaagcgaatgtgtagcgcgctagttcagcctaggccgattaaaccagcagattaaaaatgtagttaatcgagccacgaaatatcagtttgcttttgtgtagagatggaagaactcgtatttggggggactatgttgtaataccctagaaaaatgttgttaggtgaggcatcctgcagcaacgtggccttcattgtatccatcaggagacaggattttgaaaaagggggggggggggaaggtgattgattggctcgttgaatttttgatgatttttataatgtctatttcatagtattaatagtagtatgcacaagaaataaacgtgctgattcagtcaaagatttttttagaaaatagtatacctggagtaacttcacgatgtcgcctcatgatatattggatctagcgatggcaatggagccccgttgccaccccggatttgatcaggttattttcggtggtgtcatatggtgtttcatctttttttttttagtctagtatggaagatatgtacatggcttgtagagggtggcaccatgtagttttgatgccctagtcaagtatcagatgcattagtattttgtggttctacggacataattttctgttcaatttgtatgagactatgagttccttgtttaatgagcgagtaaataaattgccctggaactcatagtgaaatgatggtaacttgttatggttcatccgttcatgcaattggaagctggaattacacataggcttttgcttttgcattttcagattggtggaaacgagaaatttctgaagatcattgactttcttcgccgacaaattcaccaggatacagtggtacaaatatagcttgtaggttcatctgagttgaatcaacatgcttagaaatttgttgatttttttttgttttacctgcagtttctctatgtgaacagtgcattttcaccaaatccagatgagttgataatcgacctatacaatgtaagctttgatgtccgtgctatccgttcttacatatcaatgtactgccaaataaccttcagcagagtgcattatcatttttttaagagaacttcaaaaccattttgacatcaaggcttgaaagttaattgtaggtgtagcatactgacttggtttctaaactaattactgatgaatgatactacagtatgagtaattacataacctagtgatattattctggtatcgatgtcacatttggtgaatgattaaaggactaacactaaacatttatgttttgcatcaaagaactttggaatcgacgggcaactggtggttaactatgcatcatcgatggcatggggctgaaaggctgtacctgctggagagaggaaacttcaatcaacatggaaaaacctgtgtacaaaatttacttgccgaaacactcatcatgtaaattgctgagaatttaacttcaaagcgaagctctttcgaattattattcggtacacgttgatgtcagtagcagcagctgcaattttcacggggctttcagccccactgtaaaactgagacatccttcattaaacgccccagtgcttcagacatcgaagagcatctttcagttgtgttatgtactagagtactttctgtatgttcatcaactgctgctaatatactctccttctacagcgagatgcttgctttgaattcctcttggtaccatggcccccttcagattgtcattaagctcatgctattaagtgagccaacgatcagtgtcactgaaatgtttcgtgccacttgctaattagcttgtaaatcaaggagcacatgttgcggcagattagtcctccacgatgatgccgttgtgtccattaacacatgagcaagagcgacatgtattgtcagtgccacagtgccacttttggtattatggagcaacgtcatgctgtggaaaacggaatgcatgtcgctatgtaaagtggaaaacgaatacatgtcgctatgtaaacttaggggtatatacgtacacacgccactgcacctccacagtccacgccatactcttccactcacctttacgtgatagctgcactagtgatgaactgataatggttgtgattagtttcacgttaaaattaaaagtttgaagaaattggaacgatatgacggaaaagttggaagtttacgtgtgtagaaaattttgatgtgacggaaaagttgaaagttttttaaaagaagtttaaaactaaaaacggccaatatgcatgattttttcgttttgttttctctctctttctgtgttggatttgaacttgtcacatgagtatcgattgagtggcgcctagacctgatgcagctagctgcacgataaatagccatcactcaaacgaaaaaaagaagatgcagtactactacgagctaaccatatagtactacgtaggagtactactgacacagttccacacatgccaatacctttaaagcatttaagcacctgtctcagtgagtagctagctcgatcacgatggcaatatggtcacaattttgaatgtagaggctgtgtttagtgctcttcaaaccttcataaattccttcacctcaagtgtttggacatgcatgtagtattaaatgtagaaaaaaaaactaattggacagtttgtatgtaaattgcgagacgaatcttttgagcctaattataccatgatttgataatgtggtgctacagtaaacatttgctaacgacggattaattagacttaataaattcgtctcgcagtttacatgtggtatctataatttgttttgttattagtctatgtttaatactttaaatgtgtgtccgtatacgttaaattttttttttgacgaactaaacacggccttaattttgcactccagttcagggtttatgattccgacgaaatccggtcagaaatccgtctgagattttgaggagttttatccaaattcaaatttgaatcgataaaaaaagaaaaaaaatcaaaaaaaatcttataaatactatgatattaatagaacctattgggatataaattttcgaaaaaaataatgtattgtatgtatttactgaaacttacgccaggaaagaaaagaataaagaattaaaaaaggaaacaaattaccgatcgaaatttcgatgattttgatcggaatttcgccaaaaccgaccggttttcgagaacttatcagcaaactcagggatttgtattcaaattttggtttataaaatttattcaaaatttaccggttttccaccgaatttcgtgaaattccgaattccgccggtgcccgaaacggaagggctgtcggaatcggaaacctgctccagttagcatttcgcaattcaaagctgtagcagatgacgaaacggcggtgatgttgagtacttctcttctgtgtgtatatgcagagtaccacattggacaccacaagaatatataccggctgaacagtgtgtacatctaacatgtcggcatttgtactcctatttgctactatgtgctttaattatctcccctccctcgtgcaaaatggctcatttgtccctattagggactgcctttttatgaatgactgaatataaagctgaatcattttgtgatcactatttaggatacgtacatacgaataaactaactattataaatttgaaaaaaataatatttttaagaaattcgatcatatatagaaagtttttcttttaaaaaaaacaagtcataacgtttaggaattgtagaagcatgtctcattaaggcgctatttgattcaaaggcaattcataggagtattttatttctataggaaattttcctatatgaccctttgaatcaaaggaatgaatcctataaaatcctatgaaattcctatggaatacatcttctcatgtaagttttggagaaaatttaacatgaggtaaaaccttatataaaaaaaatcctttgagtctttatctcttctcaaattcatgtatttttcctgcggtccaatcgaacggtcattcatacgtttttcatgtgttttgaaatcatttctgtcagaatcctatattttttctattcatctgtttttttttcttccaatgattcaaagtggtcttaatccaattctcccatttctcaaaaaggaacaagcccaagtatgagagacagtatccaactatccatattaattcgtggctcaaaattaagggctcttttggaacatatgaatccacaaacacaggttatatgaaaaacgcaagattaaaatatcgtggcttgttgaatcctacagggaacaaaatcgcaggaaatgtttcaaagtggttatttggatgtctcatggataaagcataggaaagtccaatactacctcattttttaatagataacgccgttgactttttgtcacacgtttgatcattcgtcttattcaaaaaatatatataattagggatgaaaacggagcggatagtttccgtccgctccggataaaaacgaatacgaatacctctcggatcggataattctcggatagttcggatacggatacgaatacagatattttctctcggatacgaatacgaatatggtatcagggtttccgtcggatacggataataattcggatatccggtgaacagtgctattcgaatatccgcagaagccacaagacataccccatttctttataactctatgaccttcaatatacctttttagattttaatagtagttcatctcttaacactagtccacattattaatattatttaaaattttaaaaatatttataaattatactacattttatataaaatgagctaattatatatgttgatatttgtttctattagaagttgaattggttttcgtgttccgagaaaaaattgtttccgtatttgtgtccgatcatattcgattcttattcgtattcgagatagtccgtatttgtttccgtattcgagctatccgtattcgtttccgtatccggcaaaaaatataaaaacgaatatatataaaaacgaatatgatatgagcattatccgtccgtatccgctccgttttcatccctatatgtaattataatttattttgttatgagttattttatcactcaaagcacttgaaatttttgaataagacaaatgttcaaacatatgtttaaaagtcaacgatatcatctattaaaaaacggagggagtattaatatgttgatttgttggtgagagaatggagagagagtgcattgaaactttcaaaggagttgtaaacatgaggttatcctcttagtagaaatactccaaatatacatagaaattattatttcctatgaaattcctttgaaccaagactagcattcaaagactctcaaaggatttttccccctatggattctattactccatatatatttcatacaaatttcgtccaatctaaaaggactcctaagcactgattttttttctttaaaaaaaaagaacccaaagttaacatgcgaaaagacaggggcctataattaatactccctccgtcccaaaatataagcatttttagaatagtgtcaagtcaaactttttaaattttgagtattagtagcaaaaattttagaaagattaatcatgtaaatttgatcttactatatttatcattaaacgaactatcataacatgcaactctttttatttaaaacattctacttttatagatattgttggtcaaaatagtatctcgaaaaccgtgtcaagaccaaaaatacttatattttgggacggaggggtagtattcattgattctctccatccgtagcagccaagtcccatggatggttgcatgtgaccacatcgtacggggctacaaggtggtgtgtattcatgcccacaccgttgcatgtataagtacagcgcaaaagtggtagaacgagaggctctgatgcgcaccagatcgctcagtctcacaccgcacagagacagagaagagctctagagagaacgagagagagagacagagagagagagagagagggagaatggggaggagagcttgctgcgcaaaggaagggatgaagagaggggcatggacgagcaaggaggacgacgtgcttgcctcctacatcaagtcccatggcgaaggcaagtggcgcgaggtcccccaacgagctggtgagctagctattacctaatcgatcgatggtcatcgatcatgagatgatgatgatgagatttgtacttaattgtgatctgtatggatgctgttgttgatcaagttcttgcgatcgatcgatctgaattttcaggtttgaggcggtgcggcaagagctgcaggctccggtggctcaactatctccggcctaacatcaagcgcggcaacatcgacgacgacgaggagctcatcgtcaggctccacaccctcctcggcaacaggtaatctcatcacttcatgatcactccgagttccgtatcaatttcgttgagttcacagcttaaatttggagctatttggtactgtcggtgtgtggatagtgatatacttttttcttttcctggttacggctttttagggttgtaatataaacttcgcaacttcttatacgagtcattcgaaaaaaatttgaagctggctaacgctagacaataataagctgatttaacttctgttttatttttatttatttttatctttatcttttttaacaaatttgtaatttgagctgtgaaatcatagcttactgccgttttgatcgatcgtgtatatatgttgtcaggtggtctctcattgcaggcaggctgccgggccgaacagacaatgaaatcaagaactactggaacagcacgctcagccgcaagatcggcaccgccgccaccgccgccgccggcagccgcggtggcagcacgccggacaccgccagagcgacggacgcggcgtcgtccagctccgtcgtgccgccgggccagcagcagcagccagcctcccgcgccgacaccgacacagcaacggcagcggcggcggcggcggcgacgacgaccaccgtgtgggcgcccaaggccgtgcggtgcacgcgcgggttcttcttccacgaccgtgaaacggcgccgctcgccgcggcggcgccggcgccggcaggggaattaggagacggcgatgacgtcgactgcgactactactgcagcggcagcagctcggcggcgacgacgacgtcgtcgagctcattaccggcggtcgtcgagccgtgcttctccgccggcgacgactggatggacgacgtgagagccttggcgtcgtttcttgacaccgacgacgcctggaacttgtgtgcgtgacattagttcgtcgtccgtacgtacctacgtatatgcatgtgtgcgtctcatagaatgaatataaaataatattttctccatctattttaagtgcagttgcgggtttccgtatataaaattaacgattttgctatatatttgtcgacaaattttctcctaaaaatttgacagatgtaattacagtacaatcgtagtataattacactgtaactttcatg

SEQ ID NO: 4940 - DNA, 15387 bp, Oryza sativa
  unsure (1)..(15387): unsure at all n locations
tgattctgtggataacaagtaccagcaaaaaagtactaggcccgggctggcttttttgcatgggggccccttgccgccctagggtttccgtgctccctctcccgtctgccgtcaccgcccgtccctcccccgtttgccacgtcagcttgccgccctagtggagggcggcatggtctatttttgtaattttttttgtgccgatggattatttctgtaaatattaaaagaaaaaaaaattaaaaatgaaaaaaaattcgaacctgcgtcgcctctccctgcgaaagcccaaactgttcacccgctgaacaacacgggccgtctctacagttcattcatccacactgcaacgcaagcacagccgtcgcgaaaacgccggaaagtacacgagtacgttacccccctccccctctctctcgccgcgacgccacacgacacgacacgcgacgacgcgacgcccaactcctcacgcttcccttcccttcccttcccccatccatcctctcctccgactccgacctcccgcaaccgcagcgccgcccgatccgccgccaccgccaccgccaccgccggcagctcgatcccccgcactcggtaagctccccgccgatccttccccgccactcgtgctagggcttcccggatggatcgccgtttcggttttggtcggacgaatcgaatccctaacttggtgccgtttctgctgctaccagggggggttttggaattggcgaatggtggcgaacgaggtggttgcggcggcggcggtggtggaagaaccggcgcccgcgtcggcgggggcggttgacccgatgaggctggcgtcgcggtggcggtcgccggcggagtggggggccgcggcggccgagatggaggcggagccggcgccgtccgagctcaacaccaccaacagctcgggcctcttcgccgtcgtctctaccgaccggatgtccgtcaggtacctcggcgtcaaccagcacggccacgacgtcggcgtcgtgcaggccaaccgccccgcccccacgcgccgcgccgtctactacttcgagatgggcgtcaagaacgccggccagaaggggcagacctccatcggcttcaccaccgagaatttcaagatgcgccgccagcccgggttagcatcccctctgcccttgctgtcgcttggttccgctgttagttcgtctacgatgttgttggcaatcagaaatgtgtatatcctcgttttgagaaaatgccacagttttatggtagcaaccgagttttagctggttgagtttcctgcctaagaacctaagataatgtgtggggatcacaaattcatttaaaattactacgaggaaacctaagtacatgtagtgcactggttgaattggactatttgttgcataggctaggtttatcatgctaaagaggtaggatgccatttcagtttgtttcaatgcatcgaagtttctaatattggccctattgaggaagatttcctggctaacttgtggtaatgttggctgaagttatcttaatttctataaattagccggataccctgacatttccacgggtaaatttacttcagtctaccttagtttttattctgaatcgtagttttgtagggatttacattgaaacttgtatggaatcaaatcgccagtttgattttatgttttaattgagatttaggtttttatatattgtattacacgtggactctttatcttatatctgtcactccaaatttcagttgtttcaaaatggtgtttttctgtagactcttttcttttagtccatgcctttaaaacccaaacccacaatataatcaacagtgtaaatatttttctttgtctcaaataccctgacacttgcacaggtacatttgcttcaggcaactttagttttattccgagttgtagttatatagggatttgacatttaacattggaatttgtatggaatcaaactatcagtttgattttatgtttcaatggagattcagtttttctagattgtatttcatatggactctttatcttatatttttcaatccaaatttcagttgtttctaaatggtgttttggtgtaggctcattattttagaccatgcctttataaaccaaacccatatagaatcaatggtgcagatctttttctttgtctgggaccaacgtggcactttctaggtttttggcaaacatggagactccttttcacctaattttaataatttaatagacagacattcagagaaatagttagcaaatagtatggcccaccatttctttctttgagtggacttcaaattttaccactaaagtatattattttttttccttttgatgacatttttaaatttatcatgtttgttctatattcattccagctgggagtctaacagctgtggatatcatggcgatgatggctatctttaccgtggtcctgggaaaagtgagtcatttggtcccaaattcacttctggtgacacaattggtgctggcatcaactatttctcacaagaatttttcttcacgtaagttctgtcattctttctaaattggcatggcagcgtctgcttctccgattagctattctatattagccttttagtcgtcatattttagactttcttaaagttcatagctttcatcctttgtcttgtgagtttttttcttgacttgagatgaatgctgtgctttgttgctgctttcattaatattttgaaattcgcaagagttgtcttcactacagctgttggctgttaaatattgaatttggaaatcagttgcatttgcatctgccactacgcctctggtactggcttaactttccatgtgcttgtttctttttctccttcagaagccttgaccatgcttattcatctcaggatatcattctgcactttaatctaattacatgtaccattttgcaggaaaaatggatctctagttggatcctttcaaaaagaaattaaaggcccactatatcctaccattgcagtccatagtcaagatgaagagtaagatacccgttcctaagacttagttcttttcttcaactccaaacttcaacttcctggttttccatttgcacgcttttcaaactgtcaaatgatgtatcttttacaaaaaaaaaattctatatagaagctgtttaaaaaattcaaatgaattcatttttcaagtttacaataattaatacttaattaatccatgctaatgagctttctcgttttgcgtgcgctgaaaaactctctccaacctaacagcaagaatgctgcctaagtgattatttcaatgaaaatagacattccaaatatggaaaattgcattttaaccaagacagttaaacctaagttgctgaaaaatggtgttaagtgaaattatttgcttgtgttaatatattatttaggcttggaattgcatgcgttatgtgccataactcataaattattatattaattttcagcttttcaatggatctgattgttcatttttgcaaatcagggtgacagtaaactttggaaaagaaccattctgttttgacattgaggtgagccaatagatctagatattcctattcacctattaaggacctcacacaaaaatgtaatattgtcatgatttccttatggagtattatttcaaattccatgttttccattccacagtttgctgcatcaattaaacatatatcataatgtcttatagattatccatcttagttttccaaattcagatgcattgcatcttaagcgcagctcctttcatataattgaaagaacttttggttgcatgcatccttttaggtagtaatcaggccaccaaaatatggtgtatggtgccataagaaccaattggttttcattatggaattatagcctacaattatcactcagctcattcttttcatgtatatttacctatttggtgtttagttcatgcacacatgatataacactaagtatgattcttattggcagggctatatttttgaagagaaaatgaagcaacaatctgtcagcgacaaattggatttgcaaccagacatcagtcattggtatgctttctcatgttaagaatccatcactgtttcatcttgagatcattctgtatcttgtgagataggttagcgagttatgtttgataatcactgacttgtgctgtcaattatttgtctgctcctgttatgtttatgtgaaatttaccatattacgtaatctacatttgataccatattcactccgcccttcattcctaccttgtctcaatctttaattgtacctatattgacattaaatcttttatactttgccgccttatgtacatgtactgtgcacttgtaacaggattgttcgttcatatctcctacattacggctaccaagatacattaaattcttttgatatggcaagtgaaactgatcctccatccaatcatcaaaatggttatggggaacctcctgaaatgtatggtcttagccacagaaaattgctgcgtcaggtgagctaaggaaaacttatttgaaactgaattgttattgctgttgaaccatttttctaatctactaataagcaacactggggagtcaattgttagtatttataagatttttacaagatcatacatattctcttgaaaccagggctttacagtagttaatcagttaaataccagttactacccactgatgattagagcatctttgtgccaagtatccatattgatttttgttgtggtcaccacctgtagactgtagtgttgtgagtggactaacctgacatttgttttcagtcttaaaggctccagctcacgtccactattttttagtgtttatgtttttttttagatttcattaaccttttgagatgttacgatttattaatgcaagcttcataggcagatatctttttccctgaagtaaaacaaggttttatcacagctcggctgtatttggactgcactgcacttaatctcttccatatttttggttgcacaccgttgtgtgcagctattccatttgtctgctatactgtgcagatactacataattcatagaattggcccctttcgattttccccccttttggtgtggtttctgccttctgaaaacagtttgtttgatttcgtgaagcttatcatgagtggagatattgattctgcattcaaaaaacttggagaatggtatccacaggtgataaaggtacagtcttctatctgataattaattattcatttactcattgcagtttccacaaacttctaatgtgaattgataggtgcagactccaatttcgtccctgaacttgcattttactttgtaatacaagtttatgaggtggctccactttcatccctgaacttgcattttactttgtaacacaagttttgggaggaaagttgtacgctttgcaagtttaataacctgcttgcattacgattagtcaaatactatgtttatcctagcattttcagttgccatgatgtactttccgcaaagagttagttcaccactaagaaatcatttcttttttgcaggatgaaacatcaattatttgcttcttactccattcccaaagattcattgaatttatcggggtaattatctgaactcctaacattcagctatttggttaaatatgtatattatactctagagatcgaagctacaaaattgcatgcaaataagcatatcatcaactgacaaactacttatacacacatgaaaaataatacactacgtactttaataaaataaaatacaacacacatgtaagattatgataaattgtccaatctaaaaaaaacagtagtaaatggagtttggctgatgcaccccaaaacacacatttgtttttgactggagggagcatatgtgagatcaacttattttgacatctggtcaaattggcatgtggttctgtttgatgttgcccacctagggctttcgtttgcatgctcactggtggtgatgggcacttggacatgttgcattattacactatatcctgtttcataatgatataatctcagtttctcttgcattaggctggacaactggaggatgctgtaaaatatgctcgctctaacctggccaacttcttgacacataaagcttttgatgggttgctaaaggtaatgcaatggctttttagatgttgatgggtcatttgtaatgcgtccaattttacttgcaatagcaaagtgttttaaggcttcacatctatataagctttgcaatttctgagctaaaaagtgaacaaatctacttgcaggagagcgtggccctgcttgcatatgaaaagcctgccgaatcgtgcattggatatctgctagactctccacagcgggaatttgtagcggatgcagtgaatgcagctgtcctgtcaacgaacccgaacatgaaggaccctgagagttgcctttactcatgtctcgagaaactactgaggcagctcacagtatgcagcttcgagcgacgtgcattcagcggagaccaaggggatgcattcttactacataaagaagtgcagtcctgcgatagatccaggtgttcctaggcatcaaagcattcaagttgcacctgcatctgagcagtgaactcagagatgagactttgtgcccctcttggaaggaaagggattcacctcggagcggagatgtagaccatgatccatgcgcaatcacagatactttgattcttgaagtttcgcagtatactctccacaaggtgaacgcctaactgctgggaaatttggcagcagctccttccctgtaatctgaaaacttacattcacacatggccttaaacatctctgtttccataaactcggaagctttgagctggtagacattctgaatgtgaaatgagaagagaaaaacaataagatttgtgtaaatgaaatcgagttgccctttaaccttgtggttcattctaattcattgatacattcaattgcaatgtcttggttgcgctcgagtatatgtttacttgaaatgataaaccatttgcaagaaccagtccatctctggagttaatggcactctgccctttctttgttttgaaatctcgtcctctgcttctgcctattggtgaattttcactcatggatcattcatgtattcctagtcaatctgtctgttttcggtcttaattgcttcattgtagttttagtaaatagtgaaaagaagctgctggagaataatgaatttattctaaaaaagaaaaaaaatcaaagcagcttcttttgaattttagatcattagagaagttaaccggctaagaaaaaaaggggtacgctagtgctactataactgtacgagaaattcacctgtatttttagggtctgtttggtctgaatggtttgaagtcaaattttaccttaccaattacttatttggtaacttcaatagtatacactagctatttggattgataccaatttttatcaaagtcaatagagttgatactactctttcctataaaaaggaaaaatgatagtactcaaacttgctcaaggtttgacactacaaatattttggtagtgctttcaaccaaacatgcccttagaaagggctactccgtactagctataggcttatagcaaatgcaatcctacatggcctgcaatttgcgtgggaaatactgctagaacgttttaaaccacatctatttcaccgcacctctttatggaactcttcatgaaaacaaaacaactaaaggggatgtagctcaaatggtagagcgctcgctttgcatgcgagaggcacggggttcgatcccccgcatctccacatatataatttgtgaattagttttggttctttcacaaacagtattttaaattccacttgaagtatttttggttctttcacaaacagtacttttaaattcaaggagatcactgcattccttttggaagaggagaggcagggagcattttcacaatcaaggcccagcccattcacaatcaagcccatacattcgatgggccccacatgtcggccactgtccctcgggcggtttaagtaggttttcattttcttcgcagcttcgattccctcctctcccctcctctccgcccgctcgccgccgccgccgcccgcgtcgactcgccggagctgagcccggtagggccacacgccgagccgacaggatgtggtacctctgcgtcttctaccacaggctcctcgactaccggcggcccgaggtgcagtccctcgccgagctcttcggcgggcctggcgccggggacgccgtcgagtggcgcatgccggagaaccaccacgtcgactcccccttccacctcgtccgcctcccgggcgacgagcgcctcgccgcgcagatcgccaaccgcagtaaaagcgcctcgcctgatcgattgattcaccaccattcgctggctaagcttcttcttgcgggttaatcttggggggcgccgcgacgccatgtgtgtgtttgtaggcttgctggtgaaggggatctacgagctgtgggggcaaggcaccacctacgaggagctggagagggtggtcatggcgtaccccgaggagaggaagctgccgtacctgacgccggagagcaccttcaagatcgtcgtcgacagcttcggcaaggtcatcagcttccaggagcagaacgacatcatgaagagcctcacctacatccccttcaaggtaaattcatttttgagccataataagttcaattttagcctccccagtttgtcccaaaataagttcatttttgagtaaccactgcatcggagtttatgaaaatagaagataaatatgttaggagtagataaagtgaggaataattgcgttgggatttgataaagtaggtattatagtcttttttatgttgtattggtattggattggtgaaaaatgaacttattttgggacgaagggagttcatggagtagttcggatcacgaatttgtggatgtcagatgcatttattttctcttgtgtgtaattggtgctgttcctcatttccagggccgtgttaatttgaagaagcccgatcataagttctttgtcatggagactgatgactatggctgcaacaatggcctcccgccggttgctcagaggacggtattctttggccgcgaggttggagcggcggataggcatctcctgccgacatatcagctgaagagcaggaagtatattggcccgaccgcaatggatgctgaaatggcatttcttatggcgaatcaagggctggcgcgccccgggaagctcgtatatgacccttttgttgggactgggagtattttggttgcagccgcgcattttggagccatgacaatggtttgtgcttattgcacggataacgaataattttcattctgcttgtgagtatgtcttactgataaaggcctttcagggtgcagatattgatataagggttgtgcgggacggtcgtggtccagattgcaatatttggagcaactttgagcaggtgattgattgaagttagctattattttttgcttagattcttccatcctgttgtgatctgcttgattctgtgtgagctgcaattctcttatgacagttagttcttaaacgctgttcttgcctagtttttgacttggtatcatatagcttatgcagattatgtgtactaactatagtgacatttcggcatttatcacttgttagtaaaacacccgaggttcgtgtgaagtactaattatattgtcttcttcagtacaaattgccggaaccattatgtatactaagagcggataacaacgtcccaccttggcgtccaggattgaaggaggtaatactctgttgtgcggtttatacattgttgtatttttttgaattttacagttttgacagtgtaagcttgtactatatgcgcgactaaaaactgaaacaaatgtgaggaacgcataaagtgattcctgtacattcatgcaatattttagttgtgcttgaaatcttggatttgttatttacattcttgcattgctttatttggttgacattgcttgagaaaatggttgatgctgaagtaattgaattctcacgtagctttttaactgatgaaatatttcctacaactgaatttccatatgaagctattgtagcctacaagcgcatgggccttaatttccatagcttttttttttaataaaactttccataaccattggcttgatatatcttctgcttgtatgctacaagatactctggaaagttactgatttactccgttgtttcaattttttcgacaagatatgataaacacactattgatgcttgcgatcaatcaggttttcgatgccatcatctgtgatccaccatacggagtccgggctggaggccgcaagtccggtggccggaagctcataaagggcaccgtcgctccgtacacggttccggacgagaagagggacagccacatcccatccaccgcgccgtacagcctcgcggagtgcgtccacgacctcctccacctcgccgcgaggatgctggtcatgggtggccggctggtcttcttcttccccgtcgtccgcgaggacggcgtcgccaacccggccaagtacccggagcacccctgcttcaggctgcttgcctcctgcgagcagatcctgagcatgaggtacagccgggtcctgctgaccatggtgaaggtcgggccctacaccgaggaggtcgagaaggcggcggaggagcggcgccgcgagttcagggagaaccaccataagtggatggaggaggggaacctccactccgccgtgttcagccccgccgatcaggccgccgccgccgccgacgggaagccggccatagacagggactccaagcctaagtacagaggcaagtatgtgtaggtgtaggcaggtgagagacgctgaactttttgtctgaaaatttttctgacgctgtaacgaacaattttgtcgatgtcatgtggtcgtgtatccttcagcttaagagagcccggaggctttggatcagccgatttttagagcataaattagtgcaggtgctgctgtactatgatgtaccatttctgagatgatacgaggctgctaattcatttggtcgatgatgaggatttgccctattgaattatctatctatttgtactagtagtgttttggtttatcagaactgagaatcgtgctaattgaactaaaattatatttttatatgatggtattgtagtagtcgttaaaaattatattttttatatgatggttggaaaaggatatataaactttacgataccactcacatcctaaggttgtttaagatagtggttttgcatatttgaaagcttaaatcagcaattttgaatggctaatatagcatgtttacatatcgtcgatcattgatcattaaattttaaattatactctagtgatgtcatattagtattataatattgtcaactgtttgtaaatgagagcaaaaatatgttgttaaaacgaaagatttaggtggagattttaacttatctaatgcatatgtcacctagcaaaacttattcaacatagataaaaaccactttgtaaaactatattaaggtgttatataaaaggtatgtttgggggttggatgtctgggcttcaaagttcagaggtgctagatgaactttcaatcaaagttttgggggtataccttttattgctatattataaaagaaattaacgatcaaagataacatgaagaccgtgtaaaagtctaatactctccatatcattctactccaggtaacacaaccatcagtttttaaaagcctggagtttagaaacatgtaaattatatgtaaattatatattataaaagtagtgctcatggtaaatctaaaaataaaatataaatcgtacgatgttaaattattgtaaaattataggaatcgatggtcaaagattaaaatgtttaacttggaacaaactagcaatttaaaacggactgagtatgttttatattttataatttagaagggatatcttagaactgatggatgctttaaaatgtagccacttaaaaaacttcagatgcaacatggacgagagcagatcattgactgcaatcaaacatggtgagcatgatacgatttatttactatatacatcttcaccactgattgacatggatcagttaaataaggttcccctactaactgtaaaaatctatgaaaacgaaacaagcgcaaaagtctaacgtgccagccacatctgcttattcattcggagatagaatttgtatgatccggtgtaatatttattacttctacttctggtcactgtatcgcatgatgccgtacacatcaacaatacccggaggaaacactggatcagttgctgctcttacagcgaccttcgccacggaggcaacactcactggaggggtcaacagtgggccaaccagcggcaatctcgtcaacggcttcgcactttggagaacctgcagtgcacagggagatcttcaaattaagtcttaaaaacaactttacatttggaataagagcaaaaataactgtgttgcaaggcttgcaaaaacagaatgaagagacttttaccatttgcataggagaaccaacaagtccaagaggtatttttacgctaccgacacggcgagttccatgaataaaaccaggcctcaaaatcactcctgaaaaatatgtaaaaaattgatataaaacttgggctagaaatacttattgagaggataattgtgtccaaagtcatctcaagtgccattgaattaaaatccaaattgaaatgataaataaacttctcacaaagtcacaattcttctggttatgccttctctttagtttttctactcttattacatgataataataatggaatagttggaatcagcagaattctcaaactacagaaccagccgctttcacacagggggaacaagattggagcaagggccctaagaatttagaagacaactcgagaaaaaggttttagaacccagtccctcatatatgtactccagttatccaaagtattccagcaatgtaagaccaacaaatacttgctccgtcccataatataaggaattttgggtggatgtgacacatgaatctggatagaccgtctgtccagattcattgtactaggatgtgtcacatccacctaaaatcccttatattacgggacggacataagtggctcacgagtaatggagtggtagctatgaacttgctcacactaatatagtgatttcaatacatgctgattcaaggctatcatcgcacatagcatcagaaataattttagcaaaatcaaattggtttttactggttactccaagtttggctatttgaagccaatattctaacacatttccattgatgtcctagtatggacatataatatgtacacataaccgattagcactggaaaccttctcaaaaacagtatagagaaaattaggtatattccatttcttatagacaagcaaactggaacaacccatggcttcaagcaatatatatgagagaaacactaaggcatgagacagttgcaatatatatgagagaaacactaaggcatgagacagttgcccattgcggtgtgcacagccaagttatctagcttacgccttgatattatggtcctgtcctttccactagaagggctgtaatggtgcttcctaatgtgcttgagggcgatgcatcacctgagtgtttaaagttaattagctgcaacaatcattggccattgttctcttgttgcgaagaaatttggtgatttgtcctctttatcgtggaatcgtgttgtcagctatgctgcaacaagaaccatggaatactggcaaccacttgaaatgatggagtataaaattgattgcagagatggagtatcaatggcaccatcaagaactatccacacaattggcagcctatatgcacctcatggcatagggtgcttgagcagcaatcaataagaatccaataaaaacaattaggagttgaggacaaggaaacacaggccccgcacgagcaggggccattgccagagcctctgaactggtatttctttgttaagtacagccatattgccgcttactccatggtatatgtggtgttatatcaggtccgatactggttactgatcacgaatttttgaaacttaagtttaagataaacctctacacctcccatttccaaatctgaatgtatttggctatttgcaattccgttatagctggtgctacagggcaatactgtcatgttgggaagagatcatggcgttgcaaagatttggccacgccactcgcaatgatgtggagcatggcagcaccaaatttctactcaaaaagggtacatagagaacattgtgtaaatgaagtgtgaagctattattcaattctaatggatgttctccaattgcttcaacttcagcctcaactccatttgccactctaatgcatctttctcctcttgttagcatcctcctcgtatggaatctctgtaatgaatttgcaacatgaatgatcgcacctgaatcaacccaccaagtggattttaaataacttatgtacagggattcatcttcaaatgtaataatgtcctcacccttctttatgagatgctttaggaaatcagggcaatctttctgatagtgccccttcttcttgcaccacttgcaagtgtccttgtccacttctacattgcttggtcgtgatgtggatcactttgtggtgccttaggagaggcagcattctggttgtagttgttcctcttcttgttgtgcttcacatagttggcggaatcaccacgagccttgggtctatcctcttcttgcacacatatggcaatgagcttctcaatgtcccagttttctagctgtgagttgtagttgacaacaaaagcctcaaaatctgaaagcaaggaggcaaaaataaggtgaactagaaacttatcagggagtaccaagtccatcttcttgagctttgaagtgatatcactcatcttcaaaatgtgctctctaacccctctgccagtgtatttaatggttactaagctcttaatgagggtgctggcataggcctttgaagaaccagtaaattgattctccactctctgaaggtactcagtgggtggtacaagctgagattgctccccttattgcctccacaatggagctcttaatcaccatcaagcacttgcggtttgatgactcccacttcgcacgacttcaatcttattgccgcatggtctagcattctctgtttgaagtcaccttcactctcaccttctgccctcactggagtaacaagctcagtgggacgaagctcggtgagagctacagcgcaagtgctatctctatcttctctcggcatgagccatagttgggtaccgagctcgnnttcgcctgtatatgaagtccaccctttgcag

SEQ ID NO: 4941 - DNA, 19109 bp, Oryza sativa
  unsure (1)..(19109): unsure at all n locations
tatcctcattaatgattaattaataacataattaatcaccaattaggataattaattactaaattattattagttaattgttaattaagtatttaatcactaatcaaattgagcctttggaccgtgtcgctatttgattccgaacggtctcgctcttctgttccgcgagaccgcgcggtctcgcgctttccccgcgcgataccgtccgcaacgtcacgcctatgtcattttcgtgtaatggttgtgcgagatcgacggtatatttctgtaaaaagttttgcatcccgaatatttctaagaaaaaattgaatgaatagtatatttttaaatttaattccatggtacaacaggtgtgtgtgtggtggggactggggagtgattggctgtctctctctgtgtccatttgctttactaaaatctaaatttgggaggaggagacttcacttctttcaggtcaaccccctgtcgcctcaagtgagcttccccttcgtccatttcagatttgcaggggagcagccgaagcagccggcttccatggccggaactgagctgagcgtgcgtgcgctgctgccgtacgtgtgcagccatgtcagccaggttagtcaatccactgtcaatttctcttggttctgaatttcagttctctcttttcctctgcatctcctgctcctttttgttttgagaccgatttgccctgccttttctgaacaaacgagtcagcttaggcaacggaaaaactgtttgccttactagatctggccatttgctttgacaaagatgtgctgtcgacgcggcccatagcctgatttgggaggaacaaattttcttacccatgtccttcttttcctgataaaagggcagcttgtgttgtcttccggtgcttcttccataatacaaaaacagtgtgtttctgcaacagtagtgttctgttcatgggcaacccaagaagggatacatgaaactttcttctgatacgagacatccgaatttgggcgtgtcctggtctcctggacacggcaaaaaaaatctgccacaccgtatctgaactctgaacagcacacgctctctcaactgctagtcctgcacatctgaacatgcctagagaaacaactgcttgaatggaaccaatccaaagtttagatgggccccaaatccggcctgcctatatgtgcaagcccaaaatttggactacaatcctataagaaatatactacacaaatctaccaaaaaaaacaccaatgagaaacttccgttaaatttgtatgcgaaaactttcgtagaaactctgacctacggcacaaaaagttcagccattctttttgcaccaatcaccattcccctccatttttcagataattcagcagtaggtttggtttctttcgtgcaactcttgcttcggcctcgtgccgacccttcaccctccccggattccaccctcccttcctctcctcttttgctgtagcctgtagtagcttcgtcccaagaaaccaaaccaaaccaaactgaagccgaaaccaccctccttcgtctcctcctctctcgagaaaccaaatcgatcgaatccgaccgaaaccatccatggcgagcgcccctacggccgccgcctgcttcgggttgctggtggcgatgtgggccatcggattggtctcctacctcgaccagttcttgggtgccctgatgagctccgctcgagctctgccgccgctcgacgttgctgtggaggtggtgatggcggtggcggcgatcggctccctcaacaccgccatggcgtccatctacttccgtgtctacaacggccgcgccgcagctgcgaacaggcggatgctggatggtgcgtgcttcgccgtgtgggcgtcggccagcgtcctcctccacctcatcttcttcctccagccgggcgccatggacggcgctgatcaagatctgctacctctcgccgccgccgtcgtccgcgccctccttccagcttctgcggcggtgacgttcttcgcctccatcatcctcatctacgcgtatctccgtagcggcggcgccggcgccggcaccggtacctccgtgaagctcctcaccaaggtgaccaactcggctgcgcttgtcacgattgttcttagcctcgtcgtcgctgccatcgttgtcttctactccgagtaaatttgcccaaagcttgtcgaaccaaccatcgatccaatcctataccgctgcagttcgttcgggtaagcgactttaatgtctcgagtgtgtgttcatgctttgtggtgtaataagaacatatttcgctgtcaatcgtatgcatccgagtactactcttttacgcataatctgattgtggatttgacgcaaaaacatgatctattacgggaactcaactcatccggttggagtcttggagatggcgcgacggtttggtcactttggtgcatgcagtgcagcagccgaggttttgagcgcccgcctgtcgaggcgggattaaggtggccgtgccatgccagtgccggcgcctacggcggctgtcgcggttggagaggtggtctagctcgcggcggcgcccgcgatgtcgctcggcggccggcggcggcatccactggtttccgtccatgtggggcctgccgggtgacggcctgaggctgattttggggttggttgggccgtacgtcgaggcgatggcctatgttcttagccacgaaataggtgggcacggacgcacgacggggggcacggcagccggcggcggcggcggctgcggcgagcttgccggaagaagcatcagctccgtccagtttcggtggaggattagcggcccaccgtcgccgacacatgtccttgtctggttcgcagcttctggtgtggattgtggagttgtgtcgctagtgcttaacctcgaggtctggttgctcattcgtcactttttgtctggggctttgacctttgttatgccgttgcgtttgaatattttcatttttgacgcgcactcacgtagatatatactgctcgcggcagaatgtttttgttatagcagtttggtttgcctctaattagcaaccgaaaaatggaagcaggggatcgatcgtgtggtctgaaaaaaaacagtacacaagcacctaccagtgaataataacgccagctggattttaacgccgttgatgagcaagtgtgttcatttttaacgtgatcatcagcctcaccgtttcgcttatgattatctgcacaatttaatactatctccattttttaatagatgacgccgttaactttttctcacatgtttgactattcgtcttattcaaaaaatttacgtaattataatttattttgttatgagttgttttatcactcatagtactttaagtgttttaagtgtgatttatatcttatacaattgcataaaatttttgaataagacgaatggtcaaacatgtgagaaaaagtcaacggcgtcatctattaaaaaacagagggagtagcaaataaaatataatacatggataaaacttttatatacatgtcattatcttgacgatgcaaacccttgatcccttgttcgttgtcttcttttttgccaccctatctatttagcacgagggattttgtggtacttgagaaaatacctataaatatcaaaatgttactcaagataagtagtaataggaagtattaatttttacaatagaaaatataaaatcttctaattctttctcaaagatagtaaagttacccatccgttctagtgaaagatggaaggggccaattctgcatgtttttttgttgattcacgcgccatgtcctcaactccccctccgctattctgagttgccgccaccgctgtccccacctgctgcctccctcgtccctgcccgttgttaccatcctcggctccccctctgctgtcctcgcccgccgtcacccactccaccgtcctcggctacccctccgccggctgctcgatgatggagagaaatgaagatgatgtgagggagaagagagaagaggattgagtagagagagagaggtgagggaaggagatggagagatgagactgacaggtggggcctgatgattaaaaaaagaagaagaattgctgatttgactgccacgtagaaccaaaaccactccggtttaagtcgagaggagggaggttaattaatttagccggtattaatagttgaggggtgaaggatgtctggtttttggatccgagggagtaattcgtactcacctaatacttaaggggtgtaattcggactgttctcttaaagcaatacgcaaggttgagagtttccattcctgaaatgactttttcctaagaaaaatatagcggggacgataaaataaatttaccctagctgcttgtccagttgtcttgttggaggataatttctgaactcattagttttcccacatgtacaagaaaaaaaatgcacagctcaacccatgtactccctcaattctgttatactgatttctgaagtactaaatttgtcacaaaatgtattgatttctagccgtatctatcattatttcataactcaagaagtttatctttttaataccccttatttaccacctaacaacactattctactatgaatgaaaggtacttcggtcttttttttactctactaaattttcttacgattctaacattatttagttcaactaaataataataataacattttcgacataaagcaaatatatcataataagaaaaataaattacaatggtgatttaataaaactaatcttgtgttatatatagaagttgctacatttttaaataaacctggtcaaattttaagagtagaaatttaacttatttggacagagggaatatttatttgagtaaaacatgcagccctgttactttaaaaacgaatactccctccgtcaaaaaaaaaaagacaaactctaggtttccgtgtccaactttgactattcgtcttatatgatttttttttataattcgtatttttattgttgttagatgataaaacatgattaatattttatgcgtgacttgtctttttaattttttttataatttttttaaataagacggacggtcaaacgttgggcacgaaaatcagagtttgtctttttttgacggaggaagtaggtcaaagaggataaatatggggatttgacatgttctgggcacggtacaaacttcctcacaagccacgccaagccacgcccttgcatgccaatgattactcgaaaacatctttagcagatctctataatagtaggatgtggattatttttataactatttaggtgacatgcacgaaatgaggggatattccttcgagtgatgaattctcctttatagtactccaatagtagtatatgacccatagtataaaaacctaatatgggatgggagattttatattactataaatttggacatactatctgtcaatattcgtagtattagaaaatatctaacccggttctagttttttatattttgagactgacggagtattaagccttcaattaactaattaatatcctgaagctgttggtccaagcacatgcgaaccttttcagaactggttaggaatgggcgctactatcccagtccggatccagccaactgcccccatccaacagagaacataccaacaatatgaacttggagaatttaatatggatatggatttgcttgcataaaaaaatcttattatttctccgcgataaaacagcaaagcaaagtgcgtggaaactcccgttaaatgatcctgcagaagcgccctcctcctcctcctccttcctcttcctccaatttccaaaccctaccaccgaccaccgataaaagtccccaaactctccactcgctcaaccgcacccctccagtttccccacacgcctctttcctatcccaagaaaccaaatctctcagtggtaccatggcaagccgcccttcggccgctgcctccctcgggctagcggcggctgtcgccgccgctgccgctgccggattcctcacccacgtcgaccggttcggtgaaaacaccttggttggagctcctccgtcgcgagacgccgctgtccagctgatgctcctgcggctgcttgtggcggcggcggcgatgggtgccttcaacaccgccgtcgcgctcatctacgcccgcctgtacaacgccggcggcggcggcgtgaacgggaggattacacggggcgtttacctcgtcctgtttgcgtcttccggcgtgctacatgtcttcttggttcctcagctagagccaggcgtcatcgtcgatggcgctcaagaacttctgcctcctctcgccgtcgccgttgcacatgtgcttcttccaactgctgcggcggcgacgttcttcctctccatgatgctcatctacgcgcatgtcggtgccggcggcggcgccgttggggacatgatggcgatcccgacgaccaccgtgaagctcctcaccaagctggtactcgctgctgcacttgtcactgtcgttcttaccctcaccgcgaccgcccttgcctcctacgccgactgatcagcatcagcatacgcatccatcgacgacgacatagacacggtctactggtaaggaatttgagcattttaatttaatttcgtgagacaggtgccggttatgcattggtaaatgtaagatggtgctcgccttgtgctgtaacaagatgatcaggctatgcatgctgtgactgtgagtgctgcttaatggttgtggatttgatgagagagctttagcagcacggccggttgtctcagcttgacgattgcactgcatgttttgggggatggttgggagttgggacgcgatggtctcggtaattaggcaatgtggtgcccttttatcggtttcttgcttcgctgtagcgcggcgacgacgacgagctggccaacttgatcgaggaagcagctggccgggaagatcctttgtagggatactttagattgaggggctacacctaggagtttcgaagagttttttctgttgtctaacaataacaacaactcaacagaaactagaattagcttgagtttgttggaatctttggtttactaggaataatatgcatggttttcagaagtaaattggtgtactctccactaacattacctttccaaaatgtttcaaattttatgcagtggaggaagctttttcggccggaagaggagagcaagctgaaaacaaaaggtggaacagatgaagcaaatgatgacaagattaagacctccaagagcaggagtgggatagttgtgatgtttgctttccctgtttatagttgctgtaggagttctactggttgtgtttagagcttgtgactgttgtcattggggtccttttgccgtttagagttatttagctaagtgtggtccctgtaattgaatataagtgcaatataactacaagttggatatacaataacacgaatcttaatgcaagattttatggatgaaaaagtgaaagataggtgccaaagatcttgtgaatgaaaagtgaaatggagtacaagaaaatacacgcgatttagaggtacacacaacaaatcgaaatgattagagctcaagatttccatgaaatatgccattttagagacccaattccatatgaattctagagacccaattatttattattgggttaattggatctataccaatacaaatatgacatttagataaatgacactactattcatgatatcgtctacgtgccgctagaatttggagaaattggaaccccgccgctccctccatatcattttttttttgctaatctaacaaatcatgacacgtttaacattcgacgtagcaacatgtggaccaaccgaagatgcaattgctcttttaccagtagtactccctccgtttctaaatatttgacaccgttaactttttagcacatgtttgaccgttcgtcttgttcaaaaacttttgtgagatatgtaaaactatatgtatacatacaagtatatttaacattgaatcaaatgataggaaaagaattaataattactcaaattttttgaataagacgaacgatcaaacatatttaaaaaagtcaacggcgtcaaatatttagaaacggggggagtatatgctaagactgtgttcggcagccagttttcccaaatcctctctctcatgtttcacatgcatgcttttcaaactgctaaatagtgtatttttttaaaacgtttctatgtgaaaactgcttaatattgatccatttttgaaaaaaatactagtacttaattaatcacgcgctaatgaattgctccggtttccatacacaagatattagttcctaactagtcctaacgaactcaacatgagtaaaaaacttactccctccatcccattttaagcacaaccatgagttttcatttccaactttaatcatccgttttatttgaattttttttatgctccactaatttcatcgttagaatgttaggaatagtcttcttgtttaaagaaggtggaagtatttgttttctttattgatctgctctcgaattaacgaacggcacatcatattcttgacttcttggcacaccctagctatcggccaccgtacacactgcatacacaagatcggtgcagtgcacgcgtgtaacaccctaaaaattcccgataataaaaatcactaaaattttaaactttttaaaacttttacatcatactggatgttatggttgttattgcttgccaaactgtaaatcgtctcaatagaaaaatcaaattaaaagatgcacatctaagtaataactaaagtttacgacaatatattgttaaccctataagtatttatgcacaagaacgcaaagccaaataaagcacaagccaattattagtttctataatgtagattacaaattgaatgttaaatacttgaaccatgttgacaagtgtcatgacatctaagtaactaggaaaatagtcgccactacaacgaccctatatataaaggagtgtttcactagaataattaaattaatatttatatgttcatcaagtctctcatgggatggattcactcatgtaaaataatttgtcatgcaaataaattgagctttatatataaaatgcgttctagattaatattgcaccaagtctcaatttaattttatggaataatagattaaacatgtccatgtaaaatacattgttatacaaataaacttgaccaatgtgctattgtattattaaaggtcacattagaatatttaattagtttttttaagaaatatcaaagcctatatgttatattggataatttaatggaaagcaaattcatttgggaactaatgaataaccaaataaatatttaaataaaacatttgaattctcaaaacccaaaatgtatagatgacatttcaattcaaacccaatcacattcacttttacagtttagccccaccctctccctctattccccttttctttcttttggcgcactattcattgtccgccaaccgttcgatctcggcccaacctcgcgcctctctcccgtgcgccgcgccgcccctccggtcgctgctatgccgcgtgcctgccttccctattcgtgcgccacattatgcgtgcccgtgcgccgcatcgcgtcacgccacgccgcgcgggcccgccgccgaccgagccgccgaaatcccgcgcaaaagctgcggctccacgcgcgcgcgtcatcgccgtcgccatcgcgcgtcgcctcggagcagatggataacggccactgcgccatcccgcgtcacccctagccctagccaactacctttggacaggagaaccgccctcaccaagccgccactctgccacagctcccatgtgcgcgcatcgccatggccacgtccgtcaccaatgatgtcccggcgcccttctttgtatccggtgggtaaaacgaagtccccttccccagctagggctaaaactcgcagactataggatatagggtgatgatggagccacaaaacctcaatgcccttatccgattgccattagggctctagctcagctattgtgtgttggcatccttatcctccatagttttcttacatcctaagccaagccaggccatcaaaaccccatccccctctgcctttctctagtcatgcatttcatcgaacaccttgctatcactctctcaccaccgctagagatcaccattgtgaggctccccggccagagctggaggttggagggagtgggggaggttccgtgctgccgccatcgccattgggggagcagaggaccgctggacaccgggaaccacgcgtcgaacactttcgggcgtcaccaacagctagccgcctctgcttcgtccgcaccgcaccacgcgtcaccgcccttcgccgtctctccatcccggggtaaaacctcgagcctatagcatcctctacacctctaatatctagcgtcggctccagtttgtaggattaatgcctatggctgtgctgccccagccgccgttccgccgccgacgagctcaccgtggacaggccatccccggtgctcttcctcccatctttctggagaaatagaacgcccgtacgccgtatatgctcacgcactcatcaatttggtcggaaacccttcctgtcgtcctagccacttgtagccgagctcggctatggcgcagccatggcggccatgcgccccgtccctccaagcgccgccgcagccggtgggtggtcgccggagcttctccgcacctcccctggccgccgccgggtcgccctcggccggccttccgtgcgcgccgtgttcccctgctgctcccgctcggtcgagaggaagaagacgaaggttaaagacgaccttcagccgagccactgacaagctgtcccccactcctcctatttcctttagaaacttaatcctgtgaaaaagaaaatcaaagctttgaccccacatgtcagcagcggttagggataaggatatattttagattaaaaataaatgaattatgaacagtagcttttcacaatttctcggattaattcgaaattgaatctttaaactagtataacttgctcattttaactcggatttgagtgaaacttgaacctaatttcatctaaattcataagctttccaatggtatataactcactatttaataaaatatatttataattattaaataattaatatcaaatgattagattatggtcaacttaaaattatgctaataaataaaattggtattatacagtagagtagatgtaataatatttgtttctagcatgttttgtcacagtagcaaccatgtaaattaagtacagtgatgtctcaaatgaacggatgtatagcaagacactagcactatttacactatttaatgttcaattaaatccatgacttataaattatttacataaaagtttagcctcacattttgtaactaaaatataaacacatatggatgaatatctttagcttgattaggaggaatataacagagctagtgtgactagttatgttgtcggttgcctatattcagtaaatggttcaatattaatatactgttgcatacacataaccttttagataacctactagttgcatatattaaactaggtaataaatgaagaaccagtatattagctaaatactagtgctagttataaatcttgaccacacataattttaattttagttcaaccacacctgaggattgttcattattaatttataaagttatacaataacataatcagtaactataatattattaaaccataaatctaaagtacagagcgcataattgtcaaccttttatgaaaacggataaaatccatatatatacatcatgtggataattcgaataatagcttcattgataaaataataatgtaggtgaatcatggtgatgatatggtttatccttaatctccccatcgacatagccatgctataaccttagggacctgaccattttaccttcataacagatctcttccataagccaatagctagactaaaccacagattagcaaaatgtgtatgtattgtgctagttagtaccaatagagccatcgggacaatataaaatactaagaaaccttggctcttagcttgattagaatccattagcaaacacgagtagtataagcagccctaggttcgacctcaacaattatattttgcttgtgcatatttgcttgttgttgaatattggtttttctcatgtattatagaaactgtatatcggttagtcgtgagggagcgtatacagcttccaggaggtgaaggttgatcaagattatatcaagaataagaactaccctgagcaggcaagtcatcaccccatcccttgagcatgttgatcccaatcgtgaaattgttttgtttacaaataaaattgcatgcagtgatgaatatcctacttgttattatgccatgcctttgattattgcttatctcattattcccgtgtacccataattacgtatgagtccctagtcacttatgacaaatgcttagtaatgctaatttagattcatgcattctcatatttatcaaatgctttatgcttgggcaactaccttggggaaggtagttgaggtactgcatgtggagacatgagcgccacattgccatgacattgatgagatgatttgtgaaagaaaattaaaactaaacaaatgttttcgactggggcggctggaggacttgggtggtgtccggaaaaggctagtggcgtccctagtcagttaaggaccgagccatgaagttaagcatgaaacgacccccgtacaaccgtacttctcgtgtgggtatagacctagcggagtaaatagccgagcggaggcggtacccaagccgtagtggttttcttgttgtgtgtgaggcagggcctacggtggggcagccattggtaggaccgcgaggggcgggtgcctacagtggtgtcgccattggtaggattgccatgtgcaaacctaaacttaactataacttaatgaatgtgtgagtctttccccctcaggagcgccagaactcctctcactgctagaaaccttggacgcctagagtgcatgaggactaaagttcatggagcgggtactgccaaagtgaggttattgaaaggctttgtcgtggcaagtctcattcgttgggacgtaggcttatgtgttgggcaagtcgcggagtatgggtaaagtgtacatccactacagtatgagtaaaccaatctattcgaatagccgtgctcgcggatattgagcaccgagatatgtattacacttggctagactctaatttcttaatctgattgggatgggatatgcatgatgattttgtattggtgaatcaacttttctcgagaggcgagaaggggtagaccccagaaaaccatgacgaccagtggcgggaagctatccttgggaacacaatggatggtggacagaaccgtcgctgtttaatgaataatggagataaaacttgatcggtttatgttaggtcttaggtttgtgaaatgatatttgaaaactcagctttatgcaaagtaaccatagccactccttgtattgtcctgtacattactgcattttgtgtggtggcttgctgagtacttttgtactcattgttactctatatatatcttttagtagagtgttgaagagaagcccttgtttgtacgcttgcgtacctaacaagatgatcggagtgcggttctaatctaggtctcgttccccagtcgactgcttgtggcatgtcaaccgggcccttgtattattttgtcttctgctgttgtcctctgatagttgttggcctgcctggctctaatgtaagcatttaactctcttagcctgaattcattcgtgatatgtttctcttagcctgaatttattcgtgatatttgtgattcggctatatatatgtaccgactactgatgggattggtactgataaacattaaaaattttcgatttctaaaatcggggtcgacaacgctgcacatgtacttcgtgcattgtaccgcgggagagtggggagaggaattctgcttgccagccagagtcaatcagcactctatagaatctgttgatctgttccttccaccccgtgctgaaaaacacgccgtccacatctgcctttgctaccttcgcccagaaggcacgggacgggacacatgatattatcaccagaagggaaaattcactcgactttttgccaatcgttatatatttgcagcgcattcataaaactaaattatcagcaatattaacaagtagtattataaacacacttagtacgctgtattatcaaatacatggatctggttaagatgcagtggctagtgtgcctacaaggtaagcaataacacgagtatcactggattcaaaatagatgacttaggtacattagtaaaatattatagcaatttactgtagcaaacaatttgaaccattagatcaataaaatagagggctcaaattgtgtacagtaacttattctgtagccatagtagcaaatgtactgcatctcaatcccaaaatacatgaacggtgtaggtgttaattgttcatcaagcactccatcttaatcaatgtgttgttagtttgtgactgcaccaagagaggaaaacaacaaaaatagcactagttaaagatggcacggaaatttttctacaatctgcaccgctagccctgacaagtaacggtggtatactggtatggaagatagctggtttgttacttcccccgttcataaatataagtattgttagagtttttaacaaaatttaaggatgagttacaattactttgatgcttacgagagtttacttaattagaaaaggtcccgagtattgatgcaactagtgaacatttatgaaaaataatactcctaaaatacttatacttgtgaataaatatcaaattctagaaatgtgtatatttgtgaatggagagagtagttgttcatgaggattaaggataaatgtgaaactaaaaggagatagttataattggttaagattaaagaatacggagaaattaagtagatatgattatgattggtttatatctcataaaaaaagtatgtgaatgagtatactttagaaacaaatttgaacgtcaccatctatctctctattttctacttcctccatcaaaaagtaacttcatttttcatcagttccacattaaacgaatacaaatacaaggatatagaaaaagactacaatgtccatcacttcaacaagcctcagtataattggccccatttttacaaacctcaatgtctgtgtccctcgtttccaaaaacttccatgaaatgattactcaaaatattaaattattttggaccaaatatgataatgaaaaataaagttattttgacatgaagagaatattttaagatgaaccattccaaaatatagcaacctaacaaaaaatactcaatgtgtagatttgttttactatattgtgtctaattaaatactctatccgtttcaaaataaatttatttttggctcttacggtttgtcctcaaataactttatttttagtaattattatatcagattttgtgaaattagaaaataattgtaactgggagtagataaagtaagcaataattatattagcatttgataaaagtgaggataatatagtatttttattttgtattgatatgtgtgggttggatgcaaaatgatattattttaggatagagagagagagcaacatgttgttatattttggccttgtttagttgggaaaattttttaaatttggttgtcacatcggatatacggatatacatttgaagtattaaacgtagcctaataacaaaacaaattacagattccaccagaaaactgtgagacaaatttattaagcctaattaattcatcgttagcaaatgcttactgtagcaccatattgtcaaatcatggcgtaattagacttaaaagattcgcctcataatttacacgtaatatgtgtaattattttttttacatttaatactctatacatatgttcaaatattcgatgggataagttgaaaatgtttggtttgcgaaccctttgtaattgtagtattgacgtttgagtgacgcggatgatattgagtcatctgtcactgcagcagtgacgtgtgacagcataatggggtcgaagttttttcttttttttgccccctcttttcaatcatggaatcattagcgcagatcctaggcagccaatggagacctcatctgatgatgtgacgagcacgaaccggatacaggatgacggccagctcccttcacattcatcttgtcgatttcacaaattaaatactccatccatccttaaaaaaaaaaagacaaatcttgagtttccaaccgtccgtcttatttaaaaaattataaaaaaaaatttaaaaagacaagtcacgtataaaatattaattatattttatcatctaacaacaataaaaatagtaattataaaaaaatttcatataagacagacagtcaaacgttggacatggaaactcagtgtttgtctttttttggacggagggagtacggtgtatgctactcccccgtttcgtaatacaaatggaggaaaatatatagagactcaaatactccgtatatatgtaaggccggggacactcttgtctgcaccatgtggattaaattcagtcttctgatcaccagaagtcgagaacacgattcaacaaagctgatcccgccggggttactaacaactactccctctatctcataatataagggattttgagtttttttattgtttgatcactcgtcttatttaaaaaatttatgtaaatataaaaaataaaaagttgtgcttaaagtactttggataataaagtaagtcacacaaaaataaaataataattccaaatattttttgaataagacgagtggtcaaacagtgtaagtaaaagcttaaaatctcttatattatgagatagagagagtatgatatgatgcgggtgtctcagctaaggcgtcgcattgtgacttgtgagtccctaatcgctgctaagaaattcttgtgaaaatgagatgttgtcggcagattacacacatccggccggtccaagcgtaaacagtagtacatcaagtgaacacaagtaggcaaataagggacagtactatatagacggtaagcagcgatatggacgggctccagtgcaaaagagaatatagcctagagattgcagtgaccaaaatagtatcctaaggttgtgaatttaaatcttcataggaacaaatttattatttgagggctaagttctaaatttaaaaaggtcacatatatccggttggatataaagaccaggtaaaaaaaaccttctctggaaaaaaatagcctggctctaatacatgacaaaacaatattagtttttgccatctcttgggttgttacatcatactcggtaacacggatatcattttcgaccggtggaagatgtacagctggtcatcctttgtcccataaatttagtaatacagctccttctcgaaatatatgacgttggttaatacatttttaactaaccaacaattatatttgaacctttcactagtggagaaaggactagtagagaaagggtttttacttccggttcgtaatcagaaatcctaacgcgcgggtgatcgcccccgcgctgccctagcgatcaccccacgcctccccctatgctcctctctcttcttcccctttctcctcctcttcttctcttcctattatagtacatcacaaaaaaaaattaaaaaaacaaaaagttagaaatatttatgtatagaaatactatatataaaaaatatttgaattcaaattcaaatttgaatcgggtacgtaaacttttgacttataaactttacgtctataaactttgggtgtatagaaatactatatatagaaaatatttgaattcaatttgaatcacatataattcaaattcaaatttgaaacgggtatataaactttaggtttataaacttttgacttataaactttatgtctgtaaacttttgacttataaactttaggtatataaactttaggtgtataaactttatatgtatagaaatactatatatgaaaaatatttgaattcaaattcaaatttgaatcggatatataaacttttaacttctaaactttgggtctctaaactttagatgtgtaaacttgaggtgtataaattttaggtgcataaatttactaaaataggaaagtaatgcggtgacaaaaaaggaaatcaggtagagggaggaagggagagggaggggggcgaattgatcgctacccccatctccaggcgagcgatcgcccattagggtcccccgttcgtaattccccttagttccgattttctaaccgggactacgaatccagaaactaaagatcgttatctttagtctcgggtgaaaaaaccgaaagtaaaaatccatttttagtcccggttggtaacactaacctggactaaagataaagcatttttagtcccggttagtgttatcaatcggaactaaagaggctagatccggttgctctttattcttttcttttcttcattgtttttaaatatattgatttcaccccatcctgtccccaaaatcccaaatcaaacatcctcaaattgcctccaaatccacaaatcgatcatctcaaatactcaagttcatcacaaaatcttaaaaaaaattacatcacaacttctacaaaattcatcacatattcacatcacacataagtcaaatacatcacacaacaatctcatatccaatcaaatacatcacacaccaatctcagattcttcaaaaaagaaataggaaaaaaccgaagccggttgctttcaataaagccgtcgaaccgtggggccggacggccggtcaaccgtgcacgtttgcctgggccggacggacactttaagccctggcttgccttaccagggtcttgtagttcaaaatatggagaggcaattgagatttcggggaatagtggtctaagtttggggggagggagttaaaaagcttgggaggagattaaggttaacgaaatgtcccaaaggtataacttataagggaaggtaggaatttcnctcaatccgaaaggcgccatcgccctacgaaatgggg

SEQ ID NO: 4942 - DNA, 52819 bp, Oryza sativa
  unsure (1)..(52819): unsure at all n locations
aattcctgcagccctgaagtctcctcctcccaaatttagattttagtaaagcaaatggacacagagagagacagccaatcactccccagtccccaccacacacacacctgttgtaccatggaattaaatttaaaaatatactattcattcaattttttcttagaaatattcgggatgcaaaactttttacagaaatataccgtcgatctcgcacaaccattacacgaaaatgacataggcgtgacgttgcggacggtatcgcgcggggaaagcgcgagaccgcgcggtctcgcggaacagaagagcgagaccgttcggaatcaaatagcgacacggtccaaaggctcaatttgattagtgattaaatacttaattaacaattaactaataataatttagtaattaattatcctaattggtgattaattatttattaattaatcattaatgaggataattaaccgctaattaaattgtcattgaacggtatcgctcatgcaatgagcgacagcgctcggtctcctttttcaatccgtgagaccacgcggtctcgcccttcccacacgcgatatcgtccgcgacgtcattgtcacgtcactttcgcgtaacgtttgtgcgagaccgatggtatatttatgtaaaaaattttacatccgaaatatttctgagaaaaaattgaatgaatagtatattttcaaatttaattcttgtaccatggcaccaccacaaaacatgacaacgcatgtgttacgaagtatagtaagtttggaaccttaatccgccctcaattgggtgaaacatgtcactggatttctacaggcaaacatgtcgtgctaggatgctagctaggagcagcagaaattggctttgggcacggtaaaaacatggtcaatggagacggttacccacaactccacaagagctatttttccttttcggtttcaaaagagaactatatttatttgctcgtctcacgcgacagtcacgcagtgacacagtggtgaattggtgatccttgctgatctgatcagcatgttgttcagttgttccaaatcctcacacacgatcccaaaaggaggaaatctgtcagttgtaatgactaatgacaggggaaagaaaacaagtactccctccgtcttaaaataagtgcagttttagcactgttcatgttcaacgtttgaccgttcgttctatttgaaaaaatattatgattagtatttttattgttattagatgataaaacatgaatagtactttatgtgtgactaatttttttaatattttttataaattttacaaataagacggatggtcaaaatgctaaacacgaatatctatggctacacttattttgggacggaggtagtaacaaaaagcattcgaaaggaagcacctttcacgagttgcaaacgtggtcaggaaacgcctttctgaattccgtcggcagatcaccgccgagttgcaaccagggcggcatctcatctccagaacctcgccgatgtattacggacatgctggtgctggtggaagagtaaaatctcaggccaacatgcagcaacaacaggcacgaataacacttgttcagaatgccactacgacagattctactccaacttcagtaggtacttattttcgtcggcaatagaccttcagaaagagcggcacgaggacatggcctgactagccttgttcatcaccagccatcatcaataataacatgggatacaaaaaaattatggagaaaatattcacttcacttgtgcctgtcgcttttcggctgcaccatcaatcatctgtgcactgtgctacatgcatactcctactacatgaaacaaaatgttgcaatcagggtttacaaaactggtagaaaccatccagttttgtgaaatctggaggttctaagatcacaatccactcggtaaatttacatttcaaaaaagaaaaaaacaatagagcacattttaaactggttaagttagaaaaaaatcaaactgaatatttaaattttgacataacttggttacatttgaacagtttttttttctgaaaaaggattgtcatctgtttcgtcaaccctaactacacgcttacactcatatgtagaggttgtttagatccagggggtgtaaagttttggcgtgtcatatcggatatacggacacacatttgaagtgttaaacatagactaataacaaaacaaattacagattccgcctataaattgcgagatgaatttattatgcctaattaatccgtcattaacacatatttattggagcaccattgttaaatcatggtctaattaggcttaaaaaatgagtctcgtaatttacatgcaaactgtgtaattagtttttttttgtctatgtttaatactccatacatgtgtctaaacgttcaatgtgacagggtgtaaaatgtttgcatggaactaaacaccggacatgttgttctgagcctgtgctggctgccactttccaacaatcaccacaattttggcaagctgaactgtgatagacgttaaaccacaatgaagctagtgatccaaactcccagagccttcaaatgtaagacacaaatttagtcctttgatgagatatctagcaaagaacaatggacaaaacgagtgcccaaagaaaaggctcgtggcctttccagtttccaactttccatcacagggggaaggttcgaaaggaaccgcacagagcagaagtagacgaaagactcacaccactccactgggcactagcagtagtagcgcaatgatagcaaagtacgaagatttcccaaagaaaaggttcccattccttcaacgagaagatgaccagttcagcccactgaccgagacactgctccaaagagagatgcgaacacgaacccaaatcacatttcacatatcgggttgtgtttagttcagcgcaaagtttatattttgattaaaattggagatgatatgactgaaaaattatgtgtgtatgacaggttgatgtgatagaaaagaactgaagtttggatccaaactttgaatctaaacacaacctcggttctcccagcacacgattaaaaatgcaaaggatgaaacgcacaccacttcacaactcagttactacgccctcaaagagaacagaaaaaaaaaaaaggaaaagaaagtactccgtagcactagtgtcaccagtgggcagtggtctgcacacgatgcactgcagcaggtggtaccgggtacacgggacacagggccccgggcatggtatgtgaggtcccgttcatttctccaccaagagttggatgaagataaaaaattttgtggtacgttttttaaactgttaaatggtgttttgtgcgaaaactttctatatgaaatttgctctaaatatcatattaattttaatttttttaaggttataataattaaaactcaatcaatcatacgttaatatcacctcgttttacgtaaaaaacttaatctccatcttcaggagaaaagaacgccaccgaatcttcatagtcaacaggcgcaggcgaaggcacaacgcagacacatcaggcagcggggggtgggacgacgaggaagaaagcaaaccgccgaggacgcaagggcctgtttagttcgcgaacgaaaatttttagcgtgtctcatcggacatatggacacacatttaaatgttaaacatagactaataacaaaacaaattacatattccgcctggaaactgcgagacgaatttattaagcctaattaatttgtcattagcaaatgtctactgtagcaccacattgttaaatcatggtacaattaggcttaaaagattcgtctcacaatttacacgtaatatgtgtagttttttttatctatatttaatactccatacacgtgtctaaacattagatgtgacaggttgaaaaaattttgttcgggaacaacacacaggctcaataatcacaaccatcctgtggaagcggtccgtggccgccctcggcagcgtccggccggtgccgcgccctgcggaagaaaaggcgagaagcgtggtgccgaccaccgtggcggcggcggcgacatccggtacgtacgtgctcatcatatcatcacaagaggtctccattggctgccgcagctaggatctgcgcctgcgctaacgactccatgattgaaaagagggaggaaagaaaaaccttcaacccgtttggctaccacacgtcactgctgcactggccgatgacgcaatacaaactgcgtcactccaaacgtcactactgcactactccctctgtttgaggaattttttatagggacacgattattaagaaattggataaaattaaatagggaaaatttatgattggacaaaaagtgaaggtgggtgaaaaaattaaatggtggagaattgtgattgggaaaagaacattggtgaaaaatttgtcatattacttgttggagcaggttgcagattgtagaaaaattatgtgccctcttaagtcttatttttgttgttgtcctctgtttagtgaagtcacaaacttgcaaatcacaatatagtaagatctctacttaaaaaataattttactgtacgggaacttcaaaatcgaccttcatttttgcatgtagctacttaagagatccgcatgcaaaaatttatttttactgtcgagtctcttaaggggccacatgcaaaaataagtatattttcacatgcaggcctcttacttagtccgcatgtgaaagtatcctgctcttcttcatagttttttcccctcctctctctttccctcaccacttcaatttttttccacctcgcatcctctctctccccctccgtctactgatgtctctctctctcctctcctctcctccgagtgggagcgggcggcagtgggcagcggctgggcagctcggcggcctcaggtggcgccgtcccgcgtggatccgacggcggggtggcccatcccagcgtggttctagtgccggcgacgatgacgggcggttgggatggagaatgcgatgttggtgacgagcgggcggtgggggtggcagatccagcgctttgatggagacgacaacagcaggcggcgggctagggtttggggttttttatttttatctttttttttgccgaatttattttcgcatgcggccggtataggtgacaacataagatgcgttgctcgcgtgcaaaagtccgattttcattggccgtatgtaaaattcacttttggtcgcatgtaaaaatgatttctgtagcagtggatggagtgattgatgagcaattaagacctccacaaatatgatttataactcagtaatagctgtgttttttaatatttgttgctgatactgtgtatctttacatttaataacgctcttcaataatcctcccttcgtgttaggttataagacgttttgactttggtcaaagtcaaactatttcaagtttgacaaatatggtaatatttataatactatgttagtttatcaactcaataattgaatatattttcataataaatttatcttgggttgaaaatgttattacttttttctataaatttagtcaaaattaaagcagtttaatttcgactaaagtcaaaacgtcttataacatgaacggataaagtataatatatattgattggtaaagtcgagtgatttttcccctctcgtgataataccctctgcctcgtgccttctgggcgaaggtatgccatgcaaatgtggacggctaaagagtcatcaaaattttagaacggcgttttttcagcacgggtggaacgggcttttcgcctgattctccagctcgcagtgctgagtgctgattggctctggttcctttcgattggggcaaccagaattcctctcccggtacaatgcacaaagtacaggtggctcgtgcactgcaccgatcttgtgtacgcagtgtgtacgtaactttgtggccgacaaggagtgccaagaagtcaagaatctgccgttcgttaactcgagagcggatatatataatccttatatcccaaaataaattaatcccatacagatatatcttatccacatacgagataaacttattctgaaacgaaaaaagtatataggaacaaaaaaataattttccatgtaaaaaaaagataagtattttactagcatactaaaaaaaggtaagggtaagggtatgtttggttcatccacatattgccacgtcgaaggttaaatatgttgcagtttattaagataggcatttagttgattattttagctgtgataagccctactttactcatcactagtatatcccgattcgtactactactccctccatcccaaaatataacaacttcttcactaatattctctttcttaccaatcacaaccctctaccattcacttttcccatctatctccactactcatccaatcacaaccctccaccattcacttctacctatttttttaataaccgtgtccaagcctaaaattttttatattctcggacggagaaagtatattactatattttagaataaatagtgtatttaaatttgtaccacacttatgaccatactttatgggctttgttacatctataataggttgaattagataaagttaggcatcaaccaaaaaaatcaacctaaaaccaacctgtagccagcatgcagcagaagacgaacaacacaggtcgagaaaacatgaacagaagatcaggactagcttttaggatccgacacatcttctgttgcgcactatatatatgtatttttaccactactgctactttcactcaagacggtatattttccgaggacggctgtccgttgctcatgactactccctccgtccccagaaaaaagggtaaaccttgatttccgtgtccaactttgactgtccgtcttatatgaaatttttttataattcgtattttcattattgttagatgataaaatatgattaatattttatacgtgacttgtctttttaatttttttcataattttttcaaataaaacgaacaattaaacattggacacggaaatcagggtttgtctttttttaggacggagggagtagtcttgttcatccccagtcaccgtaaagaaaatttcacttcactttgcacgttgccttttgggttaaaatcaaccgtgagaatgtgatgataacaggaaaaagaaaatgctgtgcggcaatcatatggcagtcaaaccggccgtgtgctgctatgagccagaatgtcttttgcaatgctgcccaaggccccaccaccatagactgtttttcattttaacttttaactagtgaccagtcgactgttatttttaatttttcacccggtgatgattataccacaatcaagctgatgatccaaactcaaagaggcccaaacgatagtggagtatctgtcaaagaatattagacaaaacgggcgccacaagaaaaggtaatggccaaagcttcggaagggaaataaaggtacacgtacacagaggttggaccgagatgcaaagagcagctcccacttttggctaaaatcgaacctttgcacaaaaagagagcacatcgttagagttgaatgatgtgtcacctagaaaatcgactttcaaatagaaatcgaacgcaagcaaataaaaatattttttttgtcaggttgcacgagggggaggcagacatggataagactgagcgaatcccacaaatcaatttctacactgtagcgattgaattgaaattttgttcgcttgaggcctggtttagttcccaacttttttaaaaaaacttttaacttttccatcacatcaaaatttttctacacacaaaaacttccaacttttccgttacatcgtttcaatttcaatcaaatttttaattttagtgcgaactaaagagtcaaccgaactaatcccaccaacactacaggtgtcctgaagagtgtcgtactccattccaccagtagatgtacttctccttccctccattccactgggggttgaagattgcttgtccaaatttataaccaggatttaagttttttttgactgagggagtattgatatacaataacagcatatgtcttactccctctgtaaaaaaaagataacctagtattaggatgtaacatacaacgaatatagacatctacatctactactacatatatttccgttcatgtgtgatgtcctttcccttaaaacgcttacaagaggttaccggaaaagtttatgaaacggcaatcgcagaaaaaaaatgtatattagaaaacctatacaataacgcagatcatcgtcgcaagacctctatgtagagttcgagtgaacggttactctgcaatgtccacaattagacattgtactagaatagttgcttccaagctcaccattacacatttaaccttcaaattcgggatcctaatatttacaccgagaaatgttggacatgtcataataccactttgtaaccatgacaaagcaaaaacaagtatactactctataaaaaaaaagactaatcctaacaacgaatctggacgcgcgcatggattggtcttattccaacttcaccgcacatcaaacacagaaacaagtacattgaacaattaagacacatatactttggtctttgtatttaaaagaaaaaacagagtccatttggagttccgtcgctccaagataggccaggacagttctatgagaggagaggacctgcggaagaagagagcgaaaaagctcataggagcagtacttgaccccctttttctccgtgaggaggattcgccgtttcgggctggctttcggcagtgtttcgctatcttggatgcggacggttggattggatagcgagtgggggtggatagatctgcgaggaagaacaacagatgctgttcgcggacaacaatggaggacagcatccgttgttgtttctcctcacggatgatcacatgaatatacaagagccatgtcaaacagtttccctgcaagaaaatgatgtcacacggtcgttttctgtaccctttctctgcacctgaatggcgcacacaactttgcgctatcaatctactatagccgtgattagttcctccttcaaattttttttaacgtatacggatgcacatttgaagtattaaatatagactaataacaaaacaaattatagatttcgcctgtaaattgcgagatgtatttattaagcctaattaatctgttattagcaaatgtttactgtagcaccacattgtcaaatcatgatgtaattagactcaaaagatccgtctcacaattttacatgcaaactgtgtaattggttttttatcaacattttaatgctttatgcatgtgtctaaatatttaatgtaacggaatttttgaaagtttgaagaaaagtaaacagaacttataatgtacttccacatgcagctagacgaaccatttccgacagacggttacattgcatttccctcacatttccacacgttcaaactggaccagacagctagacaaggattgggccttttttttttcttttctgagaacggattgggcgattgcccataacctctacgagataatccaaaaaataccattgacaaatatccaaatacaagaaatatcattgacaagcacccaaatacaagaaatgctatcgtacaagtgtgaggaatacaagaaatcccaagaaataccatcgtacaaacgatttttgtcctaaaaatactatcgttgttagggttccatccattttgcactgttaaatacattgtttatcctatagcacttaacgacgcggaatggacggaaccctgacggcgatggtatttttgggacaaaatcgtttgtacgattgtatttcttggagctcatatttgtcgatgatattttttggatttggatgcttgtcaatgacatattttagattatctctaactttatttgattgtcatcccgctgtctataacatgtgggccctcatgtgtctatgacatgtgggtccagtggtaaataatttagcactatttataagagtggcaaatagttaattattcgatggtagctaggtactagtaccgtactagcaatccggtgtgaacggcggcagggcacgagtatgagtatgagtatgagtacatgtttgaacggcatattttccgaatatgccacacgggttcctttcgcttgcgtggcccccgcccttcaaccggtgggctctgttgggcttttcgccgtgcccgagttgtccagccatgacccaatgccgcaaccgcaatgcgtgcactttgancnccatgagcaanganctntgtatgccttgagggtgtgtgtgcaaggagaatcccctctgctgtgcgacatggcgcttaaagtgcacgcattacgacgttccccagtgcacacaagatggataaaatacgagtaatgcatggttgtaacacgtgacatttgcttctctcttttttttttttttgaaactctagtgggacaaagattgtgatctccaaactatagtactgcaatacgaggccaacatgcagcaccagaaaagcaaaactgtatagtattgtagaaacggcatgggcacatgacaagaaactgtggctagccttgttcacaccaggcatcgtgataagaaaggacaaaactttcgttgagaaaatttcacttcacttcgcttttggcagaaaccatcctccatccaggaaacaagttgcaaaaatcatatggcaatcgaaccggccgtgttgctccgggcgagactctggtggctgtaactatagggtcttttttcttcgcgaaaagaaaatttttaggtgtcatatcggatgtttaacaaatgtcggaaggggttttcggacacgaatgaaaaaaattaattttataacttgtctaaaaaccacgagacgaatctgttaagtttaattaatccgtcattagcacatgagggttactgtagcacttatagctaatcatggactaattaggcccaaaagattcgtctcgcgatttctcccctaactgtacaattagtttttttaatctatatttattgctctatacatgtgtccaaaaatttgatacgatgtttttggaaaaaatttttagggaactaaaccatgcctatcaaacaatcactacaactttcgctaggctatgcctcttacgataacgagcccgaggagatgacagttgctgaaatgctgatggacggcaaaccacaatcaaggccctgtttatagcccaccccaaaattttacatcctattacatcgaacgtttaaacacatgtataaagtaataaatatagcttaaaaaataactaattgcacagattacgactagtctgcgagacgaatcttttaagcctaatttctccataatttgataatatggtgctacagtaaatatttactaatgatagattaagtaggcttaataaattcgtctcgcggtttactaacagattctgtaattagttattttattagtgcccgaacactttatagccctagatctaaacacccccaaagctgtgcgatccaaactcccagacccctcaaatatggtactgcaagtctgcaactaaagacaggaaaaaaaaataactcgaacattggataataacgagtgccaagacaaaaggctcgtggcctttccatcacaggcgaatgttggaaaggggaagagcgaagcagaaaaaagagtactcaacagccccaccccacttagtagaagtaccccatgatagcaaagtattccctccatctacttttgatagtcatattttatcttgtcacacagactaaggataagtaattctaattatcatccatttaaacatgctactagtcattcctcgtaaacaagcgattcattaatatttatatttctcaatacccatgtagccaatcgtgtgtggaagaatggatagttatgcattaaatccgagaaagtcattaagatgatagtttattgtattgaaatatgcctatcaaaaatatttttttcagatttggaaatatgactatcaacaatagatggagggagtactacgatagattttctgttatctgtgtgggccctttccaaaaggttgctttccaaaacatggctggagactgccctagcaattcacttcaacgagatgatgttcaagttcaacaaaagctttgtatttctcgatcacataaatttggcaaatgggatgaggcaaacacgacgaaccaaaaaggcatttatctagtgatagacactaaaccacaatcaagctagtgatccaaactcccagagccttcaaatgtaatatacaaattagtcctttgatgaggtatctagcaaagaacaatggacaaaacgagtgccaaaagaaaaggctcgtggcctttctagtttccaactttccatcacaggcgaaggttcgaaagggaccggacagagcagaagcagacgaaactccgggttgagtacttcctccgtctcattaaaaaccaatcagtatcagacgtgacacattatagtactacgaatctgaacatacatatgtccagattcatcgtacatgtcactttcggttctagattcgttttttatgggacggagggagtaggcactagcagtagtagcgcaatgatagcgaagaaaggtttcctttacgaaacatgggtgcatgcagaattcacgaatggtactggtctactagtactagcagtaaggccatcacagtgagtcatcaagttttgatgttccacaagaccacatacaagtagcttgtagtgggtcccaccaatactactttcccctcccccctctctctcccccactcttcctttccccaccgcaggagtcgggcggagacagaggtcgcggaggtcgggcggtccggccgggcggcggatcgtgggatcaaccttggacggcagcggcatgcgcggcggcgggcggcggcgtcggtcagcaccctcctcccctggccagctcgccgacgagtcctaccgcgccatcatccccggtcgccaaggtggtcggactcgctgtcacggctgccgcgggagtcggcgcctccgctgccgccgttctcaagagccctgccacgggagtcggcgcctccggcgccgtccttccctccccggtcgacgccctcctcccccggccgacgccttcctcccctggccggcgcgccgaggacgctgcctgccatagtcgacaccaaggcggcgagctcgatgaggccggcgacgtcctcaacttcttcagtcccctcccctccccctcgcttccggcggctgtcgagctcgcggcggcggggatcgacgtcggtgggcggatcgagcttgccggctccggaggtgtcctcgccgctaatggcgacccgtcgagctcgggtggtggcctcgccggcgacgaccaccaccacctagcatgggatgtgggagcatggcaggggaaccgccgccacggccggtggtgaggtggagtgaggtgtagacgctgctatgcacgatgattgaggaatcactgacaactttgatggaatcgctgacaactttgacgaggaacgtggagctttctttggctccgcgttcttcagtttctagcgtgagaagtgcacgtggctgggaatctctgatgttaaagggggaagccgaatgccatgtcacgcactgtgaacgccctaatatattccatttcttgcccattccttcaacgagatgatatccagttcagcccactgaccgagacactactccaaagagagaagcaaacacgaacccaaagcacattgtgtacatacaccaccgcactaccgagtaccgagtacgttctcccagcgtaaaatgcaaaaggatgaaacgcacaccactttagtattacgccctcaagaaaacagaaaaaaacaagtagcactcgaccactcgtgtcgccagtgcaggactcggtcacggcgatcgggcgatgtgaatcttcagagtcaacaggcgcagccgaagacacgacgcggacatgcgtcgacgacgacgacgagcgggacggcgaggaagaaggcaaccgccaaggccgtaaccatgaccatcttgtgggagcgttccgtggccggcgtcgtggcagcgtccggcgtcgcggccgcatgtttcgccttgcggaagcggaggacgaggatcgtggtgccgaccacggtggcagcggcgacgccgacgacgggcacggtggcgagcggagcaaggaggcgctgcgatggcgcgtcgaggatgccgaccgcgaggcgccaaggggcaacgaggacgaggcagatggcggcgagggacaccgaaagggtcggcttgataccgcgctccgtggcggtcgcggcaggggtggcgccggcgccggctccaccgtgcgcattcggaagaagcacgccgcggacgcgcgaggcgcaggcgcccacgacgagggcgactccggcgaaggcgagcgggacgaggtgcccggactggaacaatggcaggacgagcagggacgcggagacgaggaacgcgacggccagggaaaccaccagcgtcatctgcgcgaacgggtcatcagcgaccgccgcacccgctgcgccgcgcccggcacgggccgcgccgggcacagcgcgcggtttgcggaagaagcgcgcgagaagcatggtgccgagggcgggcgcggtgaccgcggcgatgacgaagacggcgatgaggatgtcgacgagggggctcttcccggcgaaggcaagcaggagacgcagcgcgtctggtccgcccagagcgcccgcgcccatggccacgacgatgatgttccgaataactcgagacattggggctcaccgcctcagaactctgctcttccttgtgctcgttggcctctctctgttttttcttttttttttttggcaccgttggcttctgtttgattcacgattctcgcctacaaccgcaataatatatagtatgtggaagggtatctgcttgtgcgtttcttttttctttctttctttttttttttacatgtgtgcttttgcgtttctggacacactcaccacacatcatcgccgccggcagaggctgggcgggtcgttatcatgccagcgtggtccccttggagatccaaacgattcgaccaatttcatgtatggacacgttgatatacgggtagtacaaagacggtgaggaccggaagtgatcgcgattcgcgagtttcctttgaatcgatccgtaacgtactccacagggccgaaaatgatcgtgattcggaattcgcaacagctcgttgcggtgacaaaccggactacataactgagttgccattgattgcgtattttgcgtcgtagatctctgtttcctcgcaattcgcaagataggtactctactccttacatccaaaaacttcttcatttctcattatctttatcctaaaatagtttcatctttcaaaagtcattccattgttgtttgtaaaggtgaaggataaatataccgaggctagataaaattgcattgagatttcttactttgatgataaacaaaattattttggttttaaaaaaaaataaacaaagctattttgaaatggaggtagtagcattgttgatgataaagcggtgacacaataggcagtaatatgttgctcctccactgtttcccgcgagagtgtgccattgtgcaagttatttaattacggatgacattttggacacgccatttttcttcatttccccccttctccctactgcactttacctgttaattgtaatgataaggagaaaaaggaaaagaaatcacagttatataggctctgtttagttgatggtaaagtttagattttagttgaaattggagatgatgtgactaaaaagttgtatatatatgacatgttaatatgatggaaaaagactgaagtttgaattcaaactttggatctaaacacaggcatagtcgagaatttggggatggcgtgttcacacttcacacgcccaagtaatttattcggtcagtgagctggagaaggaagcaaattacgtttggccatcccatctttccaatttcgatgaccgagaatctgagatgcaatcctgctactttcactcaagacggtatgttttccgaggacggctgtacgttgctgatgactagtcttgttcatcctcagtcgccgtaaaggaaatttcacttcactttgcacgttgctttttgggttaaaatcaaaccatgagaatttgatgataagagcaaggctaatagtgaaaagtagtagtcggcggtagtacatgttcaggtcatttaaagttaatactgtatattgtttatataaaagattggctctagagtctagatgtgctttacggaagcaagaataggtttaaagtcaagtgctatggtagatgtgactatcacctctaaatttatctattttattcaatcatgaactaagaggcaacccatacaatgtatcacctctagtacacaaataccaatatatctaatactctcacatctttcttgaaatttgtgtggaggttacctcttgatttaggggtggctcatcatctctctcctcacttctctcctccacatcatcacttaatccaatgtggcattcttagggataatatatgggtcattatagtacttgccctaattgttacatgtacaggtgatcaaaactaaactccatctctgtagcccatcctgcttcagcatgaaactaaactagtacttaaaatcacacagtatgcatatgcacataagatcaagtaactgaactatagacccaccaagcgaataaaatatttcatcttgcctaatttaccgtgctatcgtccggcgcttgcagaagcgctcgtttcgctctctctcatgctttctccctccacgtatgataatactgatgtggtggttcctagcgccagctgagttcagtactattagagcaagttcaatagtatagccaactactagctccaattcatctataccaatctaatagctcattcatacaatagttacatactacactattaatacctggtcccacctgtcatacacacactatgtcttggagtccgtgctacagctggctacaaatatgtagcccgttgcccttctctctcctcatttatctccttaaaatatgtttgcagctggcttatagcctgctattgtacctgctcttagggtatttacaatgcaagctatgggacccatagccttagcctcaaaacttggtccaaggacacccttcccacagtgcaagcacccatagtcagggtaccaagcctacagccggtgggccccacgaaaaggaatcgtcacattgagtactactcgcgcggaccgattcgtcctcctttcccgaacagccctcgcgcgcctcctcgagtactactcacgctgcctcgcctcctcctccctctccgcgacgccgatgggaagcggtggcgagagtcgtccccggcggaggcggctggcgcggcggtggcgagaggtgtccccggcggcttgcgcggcgttggtgggaggcgtccccggcggagacgactggcgcggtggcggcgggaggcatccccggcggcagcggcttgcgcggcgtcggcaggaggcatccccgacgaaggcggctggctgacgagacgggtaggaggaaggaggcaatggacgccgttcttttttttttgttcgtttttgttctttagattcttgatttgtttgcaccaccttgatttctttgggttctttatttgtttccccaccttgatttcttccggttcttgattaacaggcgtggatttgattggggaaatcttgcgatatcggtggagcggatgaatcggtggtgaatcgggagaggatttttgagggcgaatcggggatttcgcgatgggattcggcgcgagggtacgacacctctgggtcacgtgctccacagcgcacggagcttgctacgcgtggactcgctgcgagaaagttcctcgcgtctttacttggggccaaggggctcaactagggcgcgcgaccttgctccacgcaagcacaaatcctcgttggcgtggtatagcaccggtctatgtcactacactgtgagaggccttatacctgctctaacagggaaagaaaaaacctctgcggcaatcatatgcctgttgcaatgctacccacggccaccccaccatagactgtttttcgttttaaggtccactgttactatttttttttttacccggtgatgattataccacaatcaagctgatggtccaaactgaaagaggccccaacgatagtggagtatctgtcaagaattaatataagacaaaactggcgccacaagaaaagataagagttctcgaaaaaaaaccaagaaaaggtacacgaaaaaaaaaagaaaatataagtctccaaagcttcggaatggaaataaaggtacacgtacacgaaagttggaccgagatgcaaagagcagaagaagaatgatgcgaagtgttccaaataaaatcgacctttgcacaaaaagttccaaccgagcacatcgtagagttgaatgatgtgtcaccgagaaaaaaatcgacttacagatagaagttgagcacaagcaaataaaaaaaattgtcaagttgcacgagggggcggtggacacggatgagactaaggcggaaatgctaacgcccgcgctggccccttccatgtactattgccttcctcttcttccccttcctcctcccctttcactacaggacaccacacaatttttttaaaaaaacaaaagttagaaaaaatttatgtatagaaatactatatacaaaaattttaaattcaaattcaaatttgaattggtatgtaaacttttgacttataaactttgggtctataaactttagatgtataaacttttagatgaatagaaatattatatatagaaaatatttgaattcaaatttgaatcgggtatgtaaatttttgacttataaactttgggtctataaactttaggtgtataaactttagatgtatagaaatactatatgtcagggttatgtacaccacatacctaatagtagttgactaaatctcggcaggacccaccatataccatgtcctatacggaaacaacctgcagatataggaggagttccggataaggaaagacaaccagagttctacatggaaacgacaagaactactcggattgtatccatattggtttccctagttctacttggacaaggggacacctatcggtataaatacaagcccccctaggagtacagggggacaaccatgatgagacgatcaacacgatcaacacccaccatgacgagacaatcaacacccaacacaatcaacatagaagccacaacatacaagccaacatactctaagacaagacgccggatatcgacttcagagataggcatggctattcccctacggtgtctccggataccatcaggagagacgaaaacgctatctctgatctcgccgggcacggattcgaggaggaaggctaccctgttgtcgactacgagtcagatcttcagaccaatatgtcgacaacagttagataggctaccccacatattgtactggtgtgattatggtgaataaaagcaactccggctccggccaacagtatgtagggttattacctgacagctcaagggcccgaacctgtataaaaatcctcgtctccatctcttttacctcagtctcgtgtatatcctagcaccaacgatccccatactgtccaaataccgtagttgagacatcaaacgtcgacagtggcgtgccaggtaaggggattttggtgctctaggatttcaacgagataggttcaaaagacgaattctccgacaacaagctactcgatgacttcgctgtggggagatctaacccgaccaaaatatgtctcccgatgagatcagaaccatcgtcgtcaacaactcgatctctcgagatcgaccaaacttcaagacatcgctgccgcggagaacagtgacttgatattatcaactaggaggtctccgatctccatctcttcggaagcgacatcatcaactgatttttggtaacctcggtaatgccgctgcctgctcagaacaccggccatcgaggaaccaaaatcaacatctcgatctattcactggattcttttgggactcggatcattctcacaccccgattaggatccaaattttggacccctgacgcatactgagaacatccatcccgacatcatgtgttccaaggatcattgatcacggatatctaccaaggtatcgagaaaacaacaagacaaagatccaactaatatgcttgctcctgacatgtacacatgcatatgtatggactcagtacgtgcttaggtatgcatgcattagttggccgacgtgtacatgcaaagaagaccaacatggctgtctaaattgcaatgtgttgattattcagataaatcaacggccgcccgtgatcaggtatttagtagattgattttttaaaaatggtctactattttcgtagatacatccggcatgtatctacaaaggtacgcaatattttatctgcaatttatcgtacctatttttccaatttatacagcattgtcagatcaacaatttattatgtttacctagagcatgcttcttatacaatatccgttgtgcgagtactttcgacgataggccaactatggtctaacgctaggggctcactccgttctctcctgtataaatcatgcttgtttacggtttacataatgcctgatatttaatctgcttgttgtatcctgataatactagaagatctatgcaattttttgagtacatactcgatattatctgctatatattttgccttctagaaaatatttttcaggaacaattgagcactcgagtaggtaatggtcgagtacactccattatcgagaacattctcgacaaatgcggagttatcgcacccaacctgccaacaaagaccgacgacctatctcatagcacaggccatggctggactactcgagaaaaggttgttaacggataattcctcgcgaacgtcgtcggcttgatcactcgacatgattgcgaacggacatccggatatgctataagttgggtacgtgagtcatgctggccacatgagatacacttgcaataaaccaactctaccactttagatggtcaaggtacgactatcgcctggtcctcgaccagcaatgtagcgtttctccggctacttccaccttcagtggtcgagttacgactactgcctggtcctcgaccagcgatgtagcgtctctccgactacttccaccttaagtggtcgagttacgactactgcctggtcctcgaccagtgatgtagcgtctctccgactacttccattttaagtggtcgagttacaactactgcctggttctcgaccagcgatgtagcattactccggctacttcactttcagtggtctcctcgaccagcgatgtagcgtttctcccactatttccacttctagtggtcgagttacgactactgcctggtcctcgactagcggtgtagcgatttctcctactacttctacttcaacaaagttggaagcaggtacacaatatcgccaagtgttttacccagagatcccttaccacgatgacacctagcgttgaaacctatcctactgtccctttacgctgttctgacaaggcctccgaggaacctaagggatcttcggctggggacgcccagagccgataaggccttgtcggatcctatagagacgaaagaccatgtaagatctggtcgtgtaagagttctcgccgtgcgtattaaccaagccgtgtaatcggaaattaactttccaacttcacggctgggggctaggatcagtgcttattcaaccaaggcaggtcaagggtccaagagccttatcctccgagaagaattctccgacgacaaggctgggggctagggagagtgtatgactctacaaactgactgatcaaagttggtaagagagaagacgctcgtaaacaaaacattggttggtaaatttaattcattttcaatttaccatacatattataacatgtcaccctttgagcattcgctcgggggctctttctatctaatattcttttctgagtattgatttcaggaaaattctattcgacattatcgaagactccatgtctctatggttctacaccaaagatcgactaaggcgagtacgacaaatgtcgacaaagctccgtcgcagactctacgccttctcgatcgctcgagaacggttgctggatctcgaaaaggaatacggaatgaagaaattgtgtacccgccgagataaaatttcttgacttcaatccaaattctcgattacagcaagacgggagacttagtcgtacgctctatactttctcggtcgacatcagagattgacttagacaaaccctttcggtgcccgcacgaggctgacaaaggaagtccaacgttctctctaaactcaccgagaacggtcacatgacctcgataatagttactccaatgtctgcgcggttgagaatatgaattcgttcatttgcatcgaagtcgggggctactgtcagggttatgtataccacatacctaatagtagttgactaaatctcggcaagacccaccacataccatgtcctatacggaaacaatctgcggatataggaggagttccggataaggaaagacaaccagagttctacatagaaacgacaagaactactcggattgtatccatattggttttcctagttctacttggacaaggggacacctatcggtataaatacaagcccccctaggaggacagggggacaaccatgatgagacgatcaacacgatcaacacccaccatgacgagacaatcaacacccaacacaatcaacatagaagccacaacatacaagccaacatactccaagacaagacgccggatatcgacttcagggataggtatggctattcccctacagtgtctccggataccgtcaggagagacgaaaacgctatctctgatctcgccgggcacggattcgaggaggaaggctaccctgttgtcgactacgagtcagatcttcagaccgacatgtcgacaacagttagataggctaccccacatattgtactggtgtgattatggtgaaaaaaagcaacttcggctccggccaacaggatgtagggttattacctgactgctcagagacccgaacctgtataaaaatcctcgtctccatctcttttacctcagtctcgtgtatatcctagcaccaacgatccccatactgtccaaataccatagttgagacatcaaacgtcgacactatatataaaaaagatatttgaattcaaattcaaatttgaatcggatatataaacttttgacttataaacttttggtctctaaactttagatgtgtaaacttaaggtgtataaactttgaggtgtataaatttactaaaataggaaagtaatacggtgccaaaaaaggaaaccaggtggagggagggagggggaggggaatcgatcgctccccgatagccttggcgatcgatcgcccgttagaaccacccagactaagggccactttggattgatgccaaaatatgacatgccaattttttggtagtttgaatagtaaatatgatggtttggtttgaagccaaatgaatagtaatgcccatggttaatttggtacaattctagaactttctttaccataatataaaatttggcttccaagtggtattaatccaaacacattacctagtattctaccctaccaaattattaatagtgccaaaacatacctaggttttggcactaccgatgttttggtatgaccctaaaccaaacaagccctgagattttttttacgcgaattcccacaaatcaatttctacactgtagcgattgatttgagattttgttcgctcgagtcaatcgaaataggtcttgtttggaagattagtcccgggctaattttaagagctaatatttagtcttgaattggtaggctaaacattagtctgggacaatatctttggatccatgagctagtttagggctaaaagatggagagagaggagagagagggggggaggaagataggactgttttttttatggtccccacagaaaattagtcccattagcactctttggagaggctaatgttttgaggggggctaattcactttagccccaaattaacccacatgtttggatccttaggggctaattcagggctaaaaggtgggtggctaataattagcccatgaaactaaacagggccctaatcccaccaacactataggtgtcctaaagaatgccgtattcaatttcattagtagacgtagggtggtatttagattaggggtgttaagttttgatgtgtaacatcgggtattatatagtgtgttgtatgaggtgttcaggcactaataaaaacataattacagaatccgccagtaaacagcgagacggatttattaagcctagttaatccaccattagcaaatgtttactgtagcaccacattgtcaaatcatgaagcaattaagcttaaaagattagtctagcaaattagtcgcaatctatgtaattagtttttttagcttatatttaatatttcatacacgtgttcaaacgttcgttgtgacagggtataaaatttttgtgtgggaactaaacatggccgtactacctttgtctaaacaataaatctaatactagatatgatatattataggacaatgaatctgcataaagatatgtctagattcgtagtaataagatatatcacattcactattaggttggttttttatgggacgtgggagtactacagtctacacaatgacggcagatgtactccatctgttcatttatggtgtcgttttgaacctttccaaataaacatctacgtatattagcgttcatgtgtgatgtcctttcgcctgaaacgtttaccagaagtagtagatggcaatcgcagaaaaaaaatgtatattagaaaacctataggatgactcagattaccacaattggacattggactagaatagttttgcttccaagctcactattacacatttaaccttcaaattctggatcctaatatttacacagagaaatattggatgcgtaataataccactcggtaaccatgatatagcaaaaaataagtatactaaataaaaaagagtaccatttaagaatggacctgttccaacttcatatactttggtctttgtatttttttaataaaaaaaacagagtccatttgaagttccgttactccaagatagaacaggataatcttaggagatgacatgcggaagaagagggcgaaaaagctcataggagcagtacgtcttgaccccttttctccgtgaggaggattcgccgttgcgggttttagctttcggcagcgtttcgctatcatatggatgcggacagttggattggattggatagcgagtgtgggtgagtttttttttttttttttgagaaccagtgtgggatggtagatctgcttcgaggaagaacaacggatgctgctcgtggacaacaactgaggacatgatcacatgaattcctcacatgaatatacaagagccaagtcaaacagtttccctagaaggaaatgatgtcacacggtcattttctgttccctttctctccactgagtagcgcacacaactttgcgctatcaatcgactataatgtacttccacatgcagctaaatgaaccacatcactcgccaggggcgcttactctacaatttcgccacatttccgccacgttcaaactggaccagacggctataggcaattgcccataactttatttgcttgccacaacatccgtcggacacacttttttcatgtagagatcaggaggattattgccgtcttatggcagctagatactactctggtgtgaacggcggcaaggcacgagtattcaactgtttgaacggcatattttccgtatatgccacacgggttcctttcgctcgcgtggcctctgcccttcgaccttcggcctgttgggcttttcgccgtgcccggttgtgttgtgtatgccttgatggcgtgtgtgcaacagtgcaaggagaaaaaaaatccctttccgtgtgagacgtggcgctcaaatacgaaggagaaaatacgtttcccagtgcacacatgaaggagaaaatacgagtaatgcatggttgcagcgcgtcacaattggccggcgatccttctgatctcaaaaaaagaaactatagtgggacaaagactctgatctccaaactctagtacaatccgaggccaacataaagcaccaaaagaaactatggaaaatttaaaccatgccacacaaattttcaaaatttgtgatatgtcaccctaacccacatatcattgactcatgtgggtcctacatgtcattgagatacgggtggcatatctcaaattttgcaaaattaaggtggcatggttccaacaaacccaagaaactaactgcaggttcattatgtcactacatattctttttttttcttaaggccgtgtttagtttcaaagtttttcttcaaacttccaactttttcatcgcatcaaaactttcctacacacacaaacttttaatttttccgtcacatcgttacaatttcaaccaaactttcaattttaacatgaattaaacacaacctaagttaagtatagtattttagaaaggataattggcgttcagagaaaacggcatgggcacatgggctggctagccttgttcacaccaggcatcgtgataagaaaggacaaaactttcgttgagaaaatttcacttcacttcgcttttggcagaaaccatcctccatccaggaaacaagttgcaaaaatcatatggcaatcgaaccggccgtgttgctccgggcgagactctggtggctgccacttcctaacaatcaccacaactttcgctaggctgcgcctcgtacgataacgagcccgaggagatgacagttgctgaaatgctgatggacggcaaaccacaatcaaagctgtgcgatccacactcccagatccctcaaatgtggtaactcgtatttatatcaaagaacattggataataacgagtgccaagacaaaaggctcgtggcgtttccatcacaggcgaatgttggaaagggaaagagcaaagcagaaaaaagatgatagcaaagtactcccatggtcccaccccactagttgatgtacccgatgatagcaaagtactacgaaatattttccgttatctgtgcgggcctttctaaaacacggctggagactgcagtagcaattcactaaactagttctgttaatacttcacgtcgattactcacttcaacgagatgatgatattcaagttcaacccgaataaggcaacgaaaactcgtatttctaaatcacataaatatagcaaatgggacgaggcaaacacgaaccaaaaagacatttctcttcccgattacacgaaagataacatatagcatatgtacatacaccaccgtactcatacgagggattacgttttttttcaaccaccggtgcccagcacgctgcaccggcaccgcaccacctatgaacaaaggaagaagatgacgacgaagggcgtaaccatcaccaagatcatcttgtggttgtggaagagcgccatggccatcgccgttggggcggcggcggcggcggcatccgcatttttcgccttgcggaagaacaaggtgacaactgtggcgccgatgatggtggctgtggcgacgcagacggccacggtggcgggtgggttcttgaaggcgaaggcaaggaggcgctgcgcaggcgcgtcgaggatgccgaccgcgatgcaaaggacgaggagggagaagacggcggcgagggacaccatcagggtcgccttggcgaagcgctcggtggcgggggcgccgccgtgggcattcgcaagaagcacgccgcgcgcgcgcgcggcgcaggcgcccacgacgagcgcggctccggcgaaggcgagcgcgccgaggcccccggactggaacagcggcaggaggatcagggtggcggagacgaggacggccacggccagggacaccgccagcgtcatcttggcgaacgggtcatcgaccgccgcacccgttccgccggccccagcgcgcggcttgcggaagaaacgcgcgagaagaatggtgccgagggcgggcgcggtgaccgcggcgatgacgaagacgacgacgaggatgtcgacgagggggctccgcccggcgaacccgagcaagagcctcagcgcgtccggtccgcccagagccccggcgcccatggcgacaacgatggtattccgaagaattgcggccatgggggatggggctcaacagctgagaacactctcaccttccgtgcttactcaggctaagctgccgatcgatctccttcgcggctctgctcttctcgccgtggctgaacccctcgaccggcttaatttataggtgttgattaacggcatattcttggcagcagcaggggcccagggggcattgctgatttgccgagcggccgtgctgatgcatactagcacatcttttccaccctgtggtcccagtatagaagatgtgaagattcggtactggagctggagctacgcgattgcaagtaaaaaaaaatggattgcaagtatccacataatacgctagcctcgtaggtttgcaagtatatatttggcagacccctaccaaaagttgaagatgtagaaatggattgctgatttgggttctcgatgtacacagagtgagagagatacataaggctctgtttctcctggattcatgtagttcgataggttcgaaggatcaaccgaaataatcgcgtaactcgttgccgatcacggagcggatgacaacgaagtccaaggatggatggcacgaattgaagagcgattgattgtgctgcatgtttcagtccaagctaggcgccacagaacggacaaaagtaagaaaatcgctacgtacaactcacgtctgaccagcacttagctgctaattgccctagccacatggagagaagttggtctgcgtgaagcgtaacgattggcagataaagttggattggatgggaatcggacgagggagtcgaacgtatagcaacactccagaagtaaagcagtaaaccgaaaaagttttgctatcacttgtatgaccgtctccacaagtggcgactggcacgacatggccactcgacagaaccgcacaacaaatgctgatcctttgcccctattccatgcgaagttgcgacttgcgagtctttgggcagggcatgcactactgacaagatgaaagaagaaaatcaaccgtaattcgggcgtgcactgctgcagaatagtccttgtgatcatgtccatgtgaccatgttcgttacgttctgaggcgtcgatagcgagcgatgctggtaatcgtgaccaatctcgttcacgtccaccttgttgacgcgcacgtacgtcgctatatatgacaacgtcctgctacatatagccttgctcactttcggactttgacgtatgtgaagagagcacgactaggagccactaatcatatggtttggtacatgagaggatatgcatgtttcactttgcacccaacatgtactgtactcatctagtcatcctactagtattttccatcggtgtccctttctcctgtgatctctcgctttgcacacaaacctcgcaacaaaacggtctcgctgtcgcctttcagcgcttcggcaaaggattggtcggttcatgaggctcgcttgcccatctcctttgctcttcctgtcgcctctctagtctctaatgtgcgattctcgccgaaccagcgacacgttttataggtgtttactcgatcaaggtgatttttttttcacccgatgtaggggcagagtgtgagtgtggttcagtcagcatatctccttttccagcgctttccctgtatttatcaacccaaacaatcgaacaattttcatatgatcgtgtgtacaaagagagacttaaaactctgtttactactctacttgtacttggattcctgtagttcgacttagatctcgatcgaaatgattggctgatcgcttagctcggtgccatattgcagaacggaagacaaaagatggaggccaagaatggcactttggcacgggcaccagttgaactgcgttgcagatttcagatggattgcattgcatcagtcccagctaggcaccacaagactgacatgtaaagcgaaacacaacgacctacccgtacgcaacaggtggctttcagtggatccgagccaagttgagttcggtcgaggtaggatggtgacgtggtgtggatcgatccggcaggacgatcgacagcctctccttttcccgttgaaacttggcaaagctgcgcttggactacgggtactaccagagtactctactctccggcaaagctgaacttgcaggaagaatgtacttagcgccaggagtggtacgtttgtttgcacacacgaaatatgcaagtctgacggcattttcgaccgatcgagtattcgatatttcgagtggctcgctaaatggtgccgcccgttctggtggcgtgcgtcgactcgtctctgaaaatccgttccacccgacttcttccaactcataccgagaaacacatcggcagataaatccaactgaccggttttgtgattattattggtgcaccatctgcgttatattcttgcggcggaccaggtcaatagtcagggcggcgcggcgcggtccttttcgttcttcgctgcctattctttggtgggggtcgcgagcgtgaaagtccgattatctttatcttccgtcgggttgggtggaattttttaggatgggtccagactccagaccatgtgtgattgtgaactgagcgacgaccgctcggactaacttttaaagtttctatatacgcggacagttatgaggattgaggaggacatgattgtagatcaaagtggttaatcacgagaattaggaaaagaaataccgcacgatcgtttctgaaactaggaaaggtagcccgcgcattcgcgcgggcatgtgtattagttttttttaaacagatataacaaattgtgaaagtaagatatactattttttaattcattgtgcattatatcttttttttcttaagaaacttcaagaaatttatatcgccgatgaatgttttatttttaccatcaagtgcttaatttaattggttcacatgcacgcaatttgctatatgcttgcatatgaattaataaatttgttgtatgcatgtattgaagaaatatgcaaatagtggacatggtttttctgaaatatgtgggacccttatggtatttttttaaagaaaaatataggcaatatgagtcttaaaatataaatttaataggaagaaataacttttatcatgatatggaataccacatattttgagctgcttgtatatacaagatgtggagaaacccatgaagctaccacaaagacatgaatgaaatgactttatggatttgttattgaccttcgtctcttgatatgtatcaaaccaaaacataactttatactttacttgtatatataaagagaaacatagaaatgaaaaaaaaagagaaaaatataagtaggacttcaaaaaaaaaattttatagttaaactgattcaatattagcttgtggccggttaaaactctattaaatagatctctaggagcaaaaccattacaaaatctatttccataaagtggccaatgagggtgaggcaaccccgggttcattataaactatcttgttattatttttcatatatatatagatgttagcttaggggagagacggggtcagaggggtcactcctaatctcctgtttatgtacgagagaaaatacatatgtacaatttatccataaaaataaagatatacataagtatgataaaaaagataaatacaaaaaatttacatctgtatgaccgtatgattgaaagaaacaatcacagccaagattaattataaaacaaccagaccggccgaccagccaagattaattccaacgaccatgcaccatctgctcacggctcaagcacgtatatgcaccatggggagggagtttttctggtttttctttttttttttagctgagaagggggaggtagttggtacataagtgggtaccttttattttccttccgaatcgtatatacgttggaatatattggaaggagggcatggctacgtacatgatttgttttcttgagataagaactgatatttaaattaataatttaatggttaaaatattgtgtctacctatttcaatgaaaatagatggtccatttttttctcataatgccacgtggtggcctagtagcatttgtaaaacggaaatgctatataccggtatactgtcgggaagggtatcgacgggatacccttcgtccacctttcccatccaaataggaacgacgctgagcgcctaagctgtgaggaggaggtggccgtcggtgactccggcgcagggaagaagtcccgcttggggagagaaggacgcggccaccggagacgcggccgccggtgacgtggtcgccggatttgccgcctggtgctccatccgcgtggccggctggtgcgccctccgccagcgccccaactccgtcaccggtgacgtggctgtcgatgatgtggtcgccggattgccgccgagagctccagcaccgctgcctgccatccacggcgccgccgttaacgcccaccctcggctccatctgcgtggccggccggtgcgccctccaccggcgccccaactccgtcgcgggccctctccggtcggctccttcgtcgccggccgtcgatcccgctgcgagtccgggccttcatcctatccatctgctactttgggggagcaaagagacaagatggtgtgcaaagaacttgttaacttggtcatggctggctgtggagtgtggtagaatcatcttctacgtggtaagagtcgtatgatacatgataggtatcatattctacgtggtaagaatcgcatgatacctgataagtatcatcttctatgttgtaagaatcgcatgatacttgataggtattatctgattcctctcaagtatcacctgatatatagtagaatcacatgatacctggtaggtatcacctgataccggttagatatcaggacctgaaacatcacaagcatcacccaccacgtggtaagaatcgcatgatacctgataggtatcatttgatacctcgcaagtatcatctgatatgtggtagaaacgcaagtatcacacgatcctactaaagtatcatctttaaaacccataggatcttgttactagacatgatacctaagtagggtcatgtggtactgcataggtaccacacataatgatactttgatgagtatcatgtgatccttctaagatatcatttgtgaaacctgatgataccagacaagatacagataaggatcatgatacctctcaggtatcacatgatcctcccaaagtatcacctatgaaacctggtgaaactggacatgatactaaggaggatcatgctacctcccagatttatgatcctactcgagtatcacttgatacctcgcaactacgcaactatcatcttctatgtggtaagaatcgtatgataccttacaggtatcacctgataagtagctagtatcgggtgatacctatcaggtatcatgcgattctaccatgtatcaggtatcagacgattcctatcacgtatcaggtgatactcgtgaggtatcatgtgatacctatcaggtatcgtgcgatttctacgacgtatcggggtgatacttgtgaggtatcatattcatatgatacctactagataccaggagctaggcgtcgaggtgtcgaggcatcgtcgccggcggccgcgtcctcccccgtccacgctccacactgaacccgaacctcgtcgccggcagccgcatcctcccccgtccatggtccacatcggaactcatcgccgacgaccgcgtcctccgtcgggagctcgtcaccggcagtcacgtccgtcgtccacgcctcagctggcagctgcgtcctccacgctggagctcgtctccggcgccgccgccatcaccacgcaggatcctccgccgtccacgccccacgccggagctcgtcgccggcgtcgtctctgtcaccacgcagatcctccgccgtccatgcgaccatgccccacgccggagctcgccggcggccgcgtcctccatgccggagctcgtcgccggcggccgcgtcctccacgccggaggtcgtcggcgccggccgcggccgcgccaccggcgttagccgcatctgtgctgctcccacggtggcctacactctcgcgtctgagggaagtggacagggagcgatcccgttgggatactatcccaacgcgataccggtatataaagtgtcatgcatgtgtcgacttagaagtatttgtaggaagtttaatgggcttttactatataatagatttatttttaatttatcagatgtgccatgtggtaggttagtagcactgtagaggatgtttaatggagcttattatagattgatctacatgatgtttaatggatctttattacacaatgggtatttgtctatttgatcgattaaatctttagattttgaaacttcaccttaaatatgtagctttgtgaaatttactttttattgtgtatataatgatttgcttgctactcctacaaaatagcgaggagaaagtgagcaagcagagagataagagatcacatatatgttattatattttaataatatttaattgctcattatttgccatgtaaaagataggagtttttttttcaaattatatattcttatatatccaaacatgcccaatatagataaataaaatatattataaaaattacaatcattagttatctaacgtttgattttgtttacatattaaattttgttaggcagaaaattggaagatgaaaggaaggataggagagggagagacgtatctacgtatatgaggggagaggaggtcacgtacgtacacataaggggacaacccaggaggtggtgggtatggtgggaggtgataattaatggattgggctttaggaattctttttaaatagatctaatggtgaaaaataatgggtccactatgttatgtgaaaattaacggtttggtgttttgtttttttctcagaatttcttggatttccctaatttattagaccgtcacatgtcggcttaggagcgtttataggaagtttaatagacttttagtatataatagatagatagtttggtttgttgcccagatatgctagtattaaaattttggtagcaccgacagtaccagccaaccatttgtgttgttgctgaagcactggagtggagtgcagccgttcgtacaatcggaggatgacatgaaggcggtgtgaaacgacggtcgaaacactgtccctttcagttaccacagttcgcgacgcacacgcgctgcaaatccgccacacgggcacgaccatcgtcgttgtgttcttcgtctgcgattagtcagtgctcgtccgacgtggtcacgtggctgacagagcgaggcgactagccgaatgttttcatcaccctatccctgtggcttgtcgacgatggcaaacattttttttgtttggattagtacaagctttcatttgcttattccagcgtttcaccgggcaacacactctatgtgcatatgtttcggagtgcagccgttcgtattggtaaataccattattatagagagttttgcccggtgatttgtttgcctggcgaaaaaaggtagtataatgttttatcttgagagaaaaagttgtactacatggtagtagtatatctctcggctgcagattgacacgaacattacaacattgagtgaaaaaaaaaacccaacatctacagctacttcctctgcatgaggtgcgtgtgcaaggagagcttgattaaccgctaaagttcaccacagggacatgttcaccagacaccaagttcaccactccacagggacatgttccgcaggacgaacagggtcgcgtggcgcgtcaggcagcgccggagccggggtcgcggctggcggagtgggcggaggaggggacgacgaggatgaggcaggcggcgacgacgagggcgacggcgagcgccaccgcaacagtcacccgcgcgaagggatccacggcgggagcatgaggcgcagccgccgcggcggcggcgcctcgaacgacgcggacgtagcgcgcgagaagcatgttcccgaggactggcgcggtgacggcgcccaagacgaagacgcaaatggcgacgtcgtcgacgaggctccggccggagaggccgagcaggacgcggagcacctcggggccgcccaccacggcgcagccgagggagagaacaatcgccatcgcaacatcagaagccatggcgatcaagaagagcacgcacggaaaagatcaaaacaaaaattcgcaagaataccaaaagagaaagcagagtcctctgaaaagcctctcctctctctctctctctgccttgctcaccctgttcactgttaccagtagatcaggcaagaagtagagaagaacagaggaggaagaggttgtgcactggtgtgtgttgctaggtgtagcatttgctccgggtaatataggcgattcggcacctggtttgggcatggttaggtggtgacgcctcgttccagccaagtcggcacggcgcgacgggtcatctcggcagcgaaagaaaaaggtggattggagtgtggaggccattaaggactaatccgatctttgactgatttgatgtgcctgtccgtgtcactgtgttagatctccctatccatgtggttttgccatcatcttggcttaatccctatgctttcgaatactttgttggcaaaattttggcatggagatatgttcagctataagataatggtgagagtaaagttgatcgtagcaacaagctgaatccgtcgtataatgcgtattctgtcgtttgttttcttactcctcccttactttggacgaaaggcattacgccaagcttttactaaaaagaatacgagttcattacagactaagaaacaaaaaaacgacagaaagtaaagaaaggtagcatgctggggaacaccagctaactcctcccctactttgtctcccctaataacaacaaccaaatcaatatgcccagtgccaagaggttaactacttgaggataagacacggagaaaaataacgacaaggttgtggcttctcagctgaaccccatcgatttgttgactaggctgtgagattttcagccgaattacgtgggccaggtaatagctgccaatatgttggtagaggctgatcctgtgacccccagtacgaacacacacacacacacaaaaagaaatacacgaggagggctacgaactaccaattcatagaagatcgtttaatcataacctgcccagcggtagaaatgcttccgctgaaaaatctgaaatcaaaaggacaagttcggtggataagccgaagcatagcgatggagcccgtagggaaaaggaagatcttccatgatcaggtgggaatctatatttttgaaggcagccaattgcttttggagccgtgagccgtcgactaggaaactgatgcctctgacctgcacatcccacatgtgcacgcgcacgatgggtgtggtgacgacgagcaaatgcgacgttcccctccaacctgataaaaccgggatctgatgggcaggcagaccctacatccggacaggagtaatagagtatccatgccggccattttgccagtttgcaggtatctgagcgcgagcaacaacggcaattgaacacaccacatctgcattttttgctgcaaattaacccagctcctgatcgtggtcctagcaggtggccgtcagggagtgcggttgtccattgacatggaaagccaccaagtcgaggagaccttgacgtgtaccgtcggcgatttctctcgacccgacttttgaaattcttctccgtaaattgtgtgatgtaagggatgacgctggggtagccttgtgcactctcggacagtacgtgagacttcctcgtgtacacacaaacatgtccgcgttgctggcttgctgcctcaactgtcacgattcacgaatgcatcaacttgtgctccccttttttttgcacacacaaacattgcacattgcactctttttttgttcgatttcatgttgagacggtgacacggcgacagcgaccgaccgtccaatcacattttctctctcggtgtatggccacgacttctgccctttttctttcgcagctgtcgtcattgacccgtgatgagagcttttaccttttacagtgctcgggaggcatcctgttattacacatcaaccgttgatttgttaaagggtactttagagatagaaaataacatacagggtagtttagtaattgtcaattttttttatcaattatcaactgaaacttctcatggccaactgtttgttgctcgcccttgatgatctatccatagcaatctgccgttagtcctctgcaataaaacgttggtaaaattgtttgtgcctttgggacgtggcacaacccaacgtgtcgagacctcgcagtgcaaacgcctccatcgtgctcctggaacgggaaagagggggaagctctctaggctagaacctgtccaaaacatatgtgtctgtatatcatctcgcagaaagccagaaacacaggcgttagagcttttgcataagcgtgagaagacacgagacacagagatggcttgcccaacaactcttcttttttttgtttacatttgttcctctccctcgatcggcatggacgcacggtggttacctgttgatacgtcactatcaaagtatatccaaatgctgaagcgtacggaaccaaagagagatccaacagagataacattgaacaaaccaaacacgaatacggggcgccttttttcggattcgtcaagaaaaggaaatcatcctaggatgtactatggtgtatcacaagctctgttcgaattggttcgacacattcaaaattcagctctgatctcagaagatcaatcgctttcgccaattaacatcacatagctgcgagataaacagtagaaaaccacacaggtgatggagtaaaagctgtaaacttgtcgagagacgagagctgagcaatcacacacacactgacaaacacccacagggaagtgaagaacagcctcgtatcaagcgcgggcgaacgtggcggagggaacggtggggacggcgaggaggcaggcagcgacgaggagcgcgacggcgacggccaccgtcagagtcacccgcgcgaagcgctccgtggttgggtcaggggcattgcccgcgacgcggatgaagcggaccaggagcatagccccgagcacggtggcggccgtgacggcgcagatgacgccgacgatgacgacgacgccggcgatggggctgctctgcccggcgaggtccagcaagaggcggagcgcctccggggcgcccaccatggcgcagcccagggagagaacagtggccatcgcaagatcacctgccatggcgatcaacaagaacaaatctctcaagaacaccaaaaagacgagctctcgctggcagcaagaacaagaaatccctttcttctcccggtgctctctctctagctcgccttctctcctcttcgctatgtgtagaacagaggggaaggaagtggatggtcatataagcagcggattggatcgatcactgataggggaaattcggacaagaaatattgggacggggacagatgctagtttggtcagaacctgcggcgtccgaggcgctgtgacgctgtctgctgacgtcatcgtggacgaggacggaaagttcgccatttcctaatggaatggaacgtggagggtcaaatgccaatcgaaaagatccgcagagcacttcggttggttagttcgttactgtagtaacgtcgacggtagtgcacagcaaatcagcaatgttcagaacagtagaaaggtaagtccatacagacactggtcactgctctggtactacactgttcatggtgatgacagactaacgttacacggcgagatgggacgacgcgtcgtacatgtttcgttgccgcttgccgcttgccacactgagagcgacgcccgcgtacacggcgtaccacctgcaactgaacagccgaatcaaacgacgtgctattccttagcattatttcccacatagcttcagttcgcgtcgtgatgagtcgtatactcgtatggtcgctatcaccgtgcttccatcagagccgagaagatcgctctcgaataagatcgttgaaaaggtcaggctctcagggcctatccctgtgttatgttatccgatcttattattcagagttctaacttaagggatgtggaagcttttcttcaacatctcctcttttttatttctctttatgcccttgcccacaatgccacttgagctgagtgcgaggcgagtacgaatcatcatcgtagttccgtttctttccctttgtcatatttgtgtcaaaccaaagaaagtgtccctcggtgtggtggaactgcatgtgatagatactccagtcactaatagtagatgtacatgtacccaatgatagtaaagtacgaagatttccattcatctgtgctgccctttccaaaaggttcctttccctaaaaaaaaatggttcccttccaaaacgtggctggagaatgcacaagcaattcacgagtggtagtgtatttccctccgttattgaggccctgtttagatcctgtcaaaaattttataccatgtcacatcaaaaatttaaatatctgcatgaagtattatatatagacaaaaaaataactaattgtacagattgcgactaatttgcaagacgaatcttttaaacctaattgctccatgatttgacaatgtgatactacagtaaacatttgctaataacggattaattaggcttaataaatttatctcatagtttactgacggattctgtaattagtttttttattagtgcccaaacaccctatacaacaccctatataatatccaatgtgacacgccaaaactttacacccctggatctaaacacctccccccccccaatacgaaacgaacacgaaccaaaaaagcaccactcttcctgattacaccaaagatacctatgtacaagtgccaccgtaggaataagttcactagagatccctcagtttaatagcgaggtttttttaggacccttaaccataaaatcagaaaatgtgtacccctaaactcactcaaaggagctcccatgacagtattgacttaatttttacccggttttgctgatgtggcatcctagtcagcaaaaaataaaaataataaatgtgggacccacatgtaagtgaggaaaaatatggggttaacaatcctagtcaacagtttcctctttttctttttctcttctactctttcggttttatctttgctgcagatggggtggcagcggtgcgcggccggaggcaggcggagcggccgcatcggcgggcgagcgaggctgcggagtgtcggcagcggcaagcggcgggcgagcgcgacggcagcgggcgagtggcgcctctgggtcgggaggtgcagaggggcttgggacatggggtcatggggggggcgagcagcggctccgggatcgggaggagcatcagctgcggcaggcggcggctccgggcgcgggaggagtatgtgaaaatggaatattcagattcattgatctaagttatgtcccatacctatgttttttagacgaagagagtactcactcggttaaaaaataataattttaatttattcttagaattggatttgttttactaaaaaaagtactccattctatgaggtaccgaggtgatccactaacttgacgtcgctgctgacatgctgtacaactaggtcccgccgccggcgatatcttgcgtgaaaccgaccctttggaattccgaatttctgatcaatcatccaaaatttcacgtatccaaatgttgtgcgctttcggactttgatgtaccaccagttcccgtacgcgaagagagcaccgctatataagccactaatcacagggtttggtacagcatgtttcactttgaaacggaagcaatataatgtttcactttacacacaacatggtcatgctattctccatcggtatccccttcgccaattcgattgcgatctcgctttgcacacaacttgcaacaaagcaagcagtgatcgacaagggttggtcggtgcacgtccgacgtgggcacattgctgatgcctgacggggcaaagtgaacaagtgggacgtttccggtccatgaggttacgtgcgggcatggtcaatttgggaacccggtccaatagcaaatatatatgtggtcattcgccgtgcttactgttactgaggtttgcctgttcaatctccttcgctcttcctgttgcctcttgtctaatctataaacacagtgacagagctagaaattttctaagcctaaaactcgagtagagctcaactaataagatattagttttctaaagaaaaatatatggtgatttaaaaggattgaggcatatttatggaggcatgtctagggctcaagtccaagctaccctaggtttgtctccgcccctgtataaacgtgtagggtagtgtggttcactcaacacctttctctttccagcatttcccctgtttttagagatcacaaccaatttttatgtgattatgtacaaagagaaacttaaaagtatgtttactacttcaattggattcctgtagctggacttggaacgatcgaaatgattggctgatcgcatagctcggtgccatattgcagaacggaagacagagatggagggcaagaatggcactttggcacacggcacgtgttgaagcgagataggttgcgttgcagatttcagatggattgccattgcatcagtcccaggtccccagccaggcgccacaagactgacatgtaaagcgaagacgcactaacgccacttgtatatacgatcgtctccacgcgcgacctaaacgcaacgactcttcggcacgatcgatcgcgccctgccctggactttctcgcgagctgctgcaaaccgtccttttgtgatggatgtcccgcactctttgaattccctggttggctggtcgtgccagtgggtgatcgtatcctgccgtttgggcgtcgcgagccgcggatcgtcagtaccccgcaccgaagctggctttcagtcggtccgagcaaagttgagttcagtcgaggtaggacgatggtgacattggtgtcatggtgtggatcgatcgatcgacagcctctcctttttcccgttgaaacttggtaggagcacgtcggaaaatacagaacttggttggactagtcgttatttccgtcaaatttgggcttggactacggtagtagtacgtacagtcccagagtaaatctacgtacgttgtcgatctctcagcttgcaggaagaatgtacttagcgccaggtgtagtacttttgcttgcacgcacgaactacgcacttttcacagcatttttcgacccatcgagtatttggtatttcgagtggctcgcgaatggtgtcgcccgttctggtggcgtgaatcgactcgtacgtctctgacaatccgttcacccgacttctcccaactggaatcgagaaactcatcgggagataaatccaactggccagttttcaggcgattactggtgcatctgcattagtatattcttgatgatcaggtcaaggtcaataggcagggcggcgcccgtggggtgggccagggcggcgcggtcccttttgttcttcggtggggatcgcggccacgaaattttaggtcgggttgggtggaattttggaggatgcgtccagcacgtgtgattgtgaactgatcgacgaccggtcggtcaggatggcaatggtaaagttggtaccatatacgcggagaattatgaggattgaggagggttcgttcatcactggaattataggaaaagaaatgccgaacaatcagtttttggtagcaccgatagtaacaggatgaacaatcagtttcagggtttctcaaatagtttggtttattacccagatatgctagtgctactaaatttttggtagcaccgatagtacatgcaggcatccatttgtattgttgctgagtgcagccgttggtatagtcggaggatgccatgatcacaagtatatactcctagaacatacattttttttaaaaaaaaagaatgtctttacgaacaaatgaagtttatccgtttattctccaacgttataactaactcccacgattctaaggggaaaaaagtatgtcaaattgttgagagagcataagtaaactccggtgtgaaatgacggtcgaagcactgtctctttccgctatcacagttcacagatcatcgcacgtcgcacgcgcagcatatccaccacacgggcacgaccatcgtcgttgtgttcttcgtctgcgattagtcagtgctcgtccgacgtggtcacgtggctgacagagcgaggcgactagccgaatgttttcatcaccctatccctaaggattgtgaggattcggatcaggtgcagtcactactgcaactttagcagtatccatcatccaaccatccagcacataagggatggtctagattcgttgcttaatttcccccagcttttcacctactctctgactcgagcaaatgtgttttggagggaaaagtctgagagggaagtaagaattggcgccaattttaccatgggaagcatactttacctcctaccgctgcacatcacacgcaattaatttggatattatctttttttccctagggttctattaatgttgaagatgtcatcttatcttaaaatttcatttgaagaggtcaatagaacttagaaggcatcgtgctgattttggaagcagatgatgatctacttttggatcatgaaaacttttgtaactgggttaatctagcagtagcatagctagttgattttgaaagcttttgtgtcagtggatgcatgacacctaattttagcgaaaatagttagggtatgtttagttcacgaaaagaaaatttttgagtgtcatatcggacgtttgaccagatgtcggaagggttttcggacacgaatgaaaaaactaatttcataactcacctggaaaccgcgagacggatttattaagcctaattaatccgtgattagcatatatgggttactgtagcacttatagctatcatgtactccatccggttccatattatttgacgttttagataaggttgaggccaaacttttataaatttgaccatcaataattttaaaaatatttagtttaaaggacaacatatatagatttgtctttcaaagcaccataataaaagtaaatatatatttatttattttatatattataatagaaaaataaggtcaaaagatatatttttgtataccgtgtcattaaaatgaaaccggagggagtactaattaggctcaaaagattcgtctcgcaatttctatgcaaattgtgcaactactttttttatttatctatatttaatgcgtcatatatgtttccaaagattcgatgtgacatttttggaaaaaatattttgggaactaaacaagggcttaaactcagctcattttgtcaattatgcgtgcaagatattatgaagttcaatataatgaaatgaagtatgtgtctacttttctttaacaatatttgggttttcttaaagttcaagaaaatctattatattattaagacagcttgaaaagaaggcaccacgttcgctgtggaggctagaaattcccacattaatcggagaaaaagaaaaaaaagagtccaagtagaaatacaatctgaaaaataactgaaattcggaattaaaaataaacaatattgaaagaggagaccatataagaacccaatacgtgattaattaaaattcagaataataaataaataaattgctgaaattagaaaaaaagaaaaaaaaagagttcgagtaggaatacaaatttgaaattactaaaagaataatggtctagatttaccgtataaaatataatcatatcaatctaattatagatcatacaatccgcactaggagtccttgtccgtttagaaaaatcaattgcagaactgtatagtatagagttatgattctaaaccaacatacattgccgcacatatatagggtggagataccagtccagcacgcttaggctgcagcaacagaaaaataatatagtgccctcatttcatacaagtccatatattagaacccaatacgagattaattaaaattcaaaataaaaagtaaaataaaatccgaaattagaaataagaaaataaaagaagagttcaacttggaatgcaatttaaaaataacttaaattcgtaataaaaaataaagactatttaaagaatacaccatctggaacccataacgagattaattaaaattccaaataagtaataaaataaattctgaaaatagaataaaacaactaggaatatagtttataaataaaatctatcggaatgaaaaatatgaaaatttcaaaaaaaaatcatctagaacacaacgatgataaatgacaataaatatcgaagaagtaacggggctgtaaaggagtagggtggtgacagccagggtttaccaaaccgccggggccggggttaccgcgccccggcggtaagcacggttaccgcgcggtaactgcggtaaccgtgaaaaccgtacaaaaccatgcaaaattcatcaaaaattcaaattattttttaaatttatttgagtttaaggaggttactgcggtatttatattatcgtacccccgcggtaagcccggtaaccgcgcggttaccggcggtatggtgaaccctggtgacagttgatggaacatctaaaaactattaacaaaaccccaaatagaatcccaatgacaattaaaaggagtgacgacggacatgccgttaagcagcacggtcacgacggttggcgggatttctaaaaaagtaaaaaataaacctcaatgataatcacattcgattttaaaatctcaaatataataaagagtgggaagaagcggggcgagccgtagaggagttcagacggtttggtgggactctataaagtaaaaattgaactcaaatgataattatgttcaatttttaaaatcccaatgacaataaagagaggaagcagcggatgggccgtagagaagtatattgacagcttttaatgggacttctaaaaataaaaaaataaaacccaatgagacaataaactcaaaaaaaactataagatccaatttttaaaggttaaaaggagaattaatataagccatggtagatcgagaaagcaaataaagaaaagggtgacaaaaaaaagcaaggggtagcaactgatgtgatttttataaaagttacaaaattagaaatatggggatgatatggtttggtctttcaaagtcttaaaacaatgaaatatctattgaataaattataaataaaatcatattaaaaatatataattttgtatcggtgctagccgcgcaattgcgcgggccacccagctagttcagatcaaaaggagagaaattgcaggcaaaatctgaactgaagctgttctatgcttgttcaaatagctaaaatgatgcatgacacggttaaatctgggccatccctcgtgtgctggatggctggatgattgggtactgccaaagttatagtcacagtcgtgactgcacctgatccgaatccggattgtggacgatggcaaactatcttattttgtttggattagtacaggctttcatttgcttaaccctgcgtttcaccgggcaacactctggatttgtacatatttcggactgcaccgttcgtattggtaaggaccgttattatcatccggtagtacaagagcaccacgaaacatttacagagttttgcccggtgatctgtttgcctggtgaaaaggtagtcttttatctcgagagaaaaaaaaatacattcatagtatttctctcggctgcagattgacacgaacactacaagtctacaacctatcgacgaatggtaagattgtataggtggaatgacaaaataaaaaaccagcagctgcttcctctgcatgagctgcgtacaaggagagcttgattaaccgctaaaaagaccgcgcaatccagacaccacaaaggcacaaacataacatgtgacctacaccgcgtacgaacgggatagaagccgcggtacgcgcaccggcactacccaccaccgcaccacgtgtcgtcgtgtccacgtcgacggcgcgcggcgcggcgcgtcaggcagcgcagccggggtcgcggccggcggaggggacgacgaggaggcaggcggcgacgatgaagacgacggcgagcgccaccgcgacagtcacccgcgcgaagggatccacggcgggcgcgggggcgcctccaacgccgtccgctttgcccgcggcgcggaagtagcgcgcgagaagcacggtgccgaggactggcgcggtggcggcgcagatgaggaagacgcaaatggcgatgtcggcgacgggactccggccggagaggccgagcagtatgcggagcgcctcggggccgcccgccacggcgcagccaagagagagaacaattgccatcacaagatcagaagccatgggaatcaaaaacggcacgcacggaagggatcaagggaacgggttgagccaaaacaaaaaaaaaatcgcaagaaataccaaagagaaaacagagaaaattctctcctctctctgcctcgctcaccctgttcactgtctagtagaaaaggtagaagtagaagaacagaggaggaggaggaagaaccgaagaacgtttgctccgggtaatatagccgatagatgcgcatttggagctcaggtttcggcacccggtttgggcatggctagttggccgtgcaggacacctcgttccacgtcggcacggtgcgtcggtcatctgggcagcgaaagcgaaaggcgggttggcattcatatttcatttcgtgggtgtggaagcaattacggactacttcgatcttgacggctgattttctctacctgtatgtgttggatctccgtatcggcgtatccatatcccataatattaggccgagtttagttccaaaatttttcttcgaacttctaacttttctatcacatcgaaactttcctacacacataaactttcaacttttccgtcacttcgtttcaattttaaccaaactttcaattttggcgtgaactaaatacacctattagtttactgtatgtttagtttggagaaaagatgaaatgggttagactcatctttattttttatggaattgccccattatctgtttggtcttgctcttttatgatggaggggttgtggcccgcatgtcagtgatagagaggaagtgtgttggattgattcaacagcgactcgtcttggtgttctaggctaagaggggtgacgatcagcagaggctctggggtttagtaggggtgacaattcccctacaggatcgaaagcaggtcgagatttcaacccatataagtgctacagtaacccacatatgctaatgacggattaattaggctcaaaagattcgtcctgcgatttcccggcgagttatgaaattagttttttcattcgtgtccgaaaagcctttccaacatccggtcaaacatccgatgtgatccctaaaaattttcttttcgcgatctaaacaggccgtccatttgtgaagatatcctctgcctttagcttgaaggcagcaggcagcaacatgatgtgaatgcgctgttcaagtctcaacgggggcataaacgctcgtggcatatgccgaaacggcacagcgacacgagctcctttcaatggttacacgagtgatgaatcgcctcgtcacgcctcgccgccgatctgaccgtcctgggacgactaattgtccctttttaaagtagactgatgtgctgattggctagaccagctgcttctcctgttgggtacaagcagaactgccgtcttggtacaatgtacagataccgacgtggcgtgtcttaaattcccctactgtatggcgtggcaataatccacctctggagataaatcacgacgggaaaattatgcggcaaaatgttcagtccaggagagaacaatacttccttcatccttcaaaaaaacaacttagtactataaatttaagcatatctatttccaaattcattgcaatagaatgtattacatctaattccagttagttttaccaaactccgcttttggtgtcccttttttctttgaaggaaggcccttttatttatgcaaacatgcacatggcgacctgaaactattgaaaatgcattttcagttcgcttttactatgagcgagatagcgaccgtctgtccaattgtttctctgggcgtaccgcgtacgccccccactaccaccgttctctgacgcagttggtgagatggatggacccatgctaccagtggtagccgtcctcctctgcaacatggaacaaatcgttgctgaaatcgtgcctttgagacgtgccagtgccaagcttatcgacacctcgctgctcaaacacttccatcctgatctcatctgcacaatcagccaccgcaacgagagagtcagagatcgaggccgagaagctcactaggctagaaccggatactgacctgtccagaacgtacgtgtcggggtacaaaatttttagagtaccatacgatcgatataagtgtttgacggcacgtgcatgagacggtttgtccaacaacccttttgttctagtataacctttgttcctctgatcctctccctcaagctggttaactggtgatacgtcacaatcaaatcggcataactaaatgcgcgaaacatatggaccaaaaagagagaatccgaaactccaaacccaacagagatagtaacataaagatatgtgcatatggcattagggaaagaactaaaacagacgcatcaggagatgaaatcatccagggacattccgtgatgaatatgaatatctccagtttcactgtctccgatatgttcacccaagtccccaaatcggaccggcaagaaagatcacaaaatcctataactctgttccaattgattgagcttattcaagaatcatatcaagtgatctcagaatatcactcacattcgcaaattaacatcacaagactaccacagaaaaacagcaaaaaaaaaaacacacacacacacagatgatggagccgtagtaaaacgtcgagtagtaccactgtaccaggctaccagcaccggggctcgccgcgcacggcgcaccacaggtcggcggcgcgggcagcttctcgacttctcgtagttgcagccgcgcccgaatccgccgggcggccgagcgcgcgccccccgcgcgtcaggcggagctggcgaacttgtcggcggcgggggcggcgaggaggcagccggcgacgaggaagatggcagcgaaggccaccgtcagggtcacccgcgcgaagcgctccgtggcccggtcaggagcgtcgcccgcgacgcggatgaagcgcaccaggagcatggcgccgagcacggcggaggtgacggcgcagatggcgccgacgatgatggcgacgtcggcggcggggttcttcccggcgacgtcctgcaacaggcggagcgcctccgggccgcccagcaccgcggcggccagcgcgaaaacaatggccgtcacaatatcacctgccatgacggggatcaagaaatggcgcggaagagaagaggaatcgcacgtaggtaaggaaggaagaagatgagctctcgctgaagccccccctttcttccccttttcggctttgttttttcgtcgcccacttgccgctttgcacaagattttaaaagcgatggccgtgtaccgcgtactccgcgtaccgctggcacgatcccatgtaggagtagctcctgttgtttttctcccatgtgtgctcctgttcggggtcgtgatgcttcaggttcgctgtgcccgtttttttcatcagaaactgaaaaggtcgtcaggctcttaggggcctaccgaaagttcaaggtgttatgtgggggtagctttcagagtttttattaagggatgtggacgtttagatgaacatgtccaaaacttttatgttttgttatttatctttatttattatgcccttgccacataagctaatcgcgagacgggtatgtataatcatcagtgtttcaccccggccttcaccagccaccgcgtcacaaacacagtcacacgctcgagggaggcgcacaggaccatattgggcttaattgggtcctatcttgcctgttttgggccacactgggttgtgctgggtcgaatagttaattttagggtgaccctcaaatgtgatcgaaatctaaaccatgaccctaaactacaaaaccggatatctcgacccccaaactccaaaaacggtgcaatttgactccctgggcggttttgggaggcggttttgctgacgtggcgccacgtggcgtctacgtggcaatattgaccgagtctttgctacatgtggcgttgacgtggcacctacgtggcagtagaaataaaaaaatatgcgtgggacccgtttgtcattcacacataaaaaaattgtggggcccactgacatgtggatcccacatgtcatccttcttcct

SEQ ID NO: 4943 - DNA, 47687 bp, Oryza sativa
  unsure (1)..(47687): unsure at all n locations
atgtctagattcattaacatctatatgaatgtgggcaatgctagaaagtcttataatctgaaacggaggaagtaattaagatgagtaacatatatagaccactaacataactttaattgaactttttttgtcaagtgtccccattcacttacatatatattaaacttcatcatgactgtttagttattttaaaaagtaataacatgcatctgaagtgatgagtgggcaaattaacaactccccctcgtacatgcattagtcatatatcatagcatttccaagagtaaacttctcaatttgtcaaaaacttttcagtataaagttactcaataggcactgtcccactattaatgtcctaaagccgtccattaggcaatagatcaatcagggttgaaaactctagcagggtccacctacatgataaccggggctggcaagtttgatgagttcatctgagcgcgatttccacacaagcatgcatgatttccattgacagcatagatggccatatgatcgcgtaagctccacccaccttccttttttctttgtggtgatagaacacaatgtccatacagatgcgaagatagtttgatgtagcaagcaactacacaagcttataaatagttatatttctagatttgtatataccacaagctgcatgaagtgcatgctttgattatattaaaattttgaatgcttcatgagccaaagtagaccaccatatgcgagaaacgagaaaaaaaaactcatctttttagaagcgacttgtgcttcacacatatgccacagttgtctgacacaagcccaacatactcgttgggggataactaattacatggtaattatctaggatggactggattgggttcaatgcctcccagaccatttaattattcataatgcaacagattatgtatagatatcatcaacataacccggccatagctaatcaaatggtttgataggcataggacctactgtcagctctaacgagtactgacttagctaggttctatatttctatttattcggcaaacttacttcatcgtagtcatctagtgacaaaaacacctcatctaagcatgaaagctcggtgccctcaccgtggaagctcacttgtgaaccgcagctcgattcgaacactcggcacagcacccagttgttggactcctgtaatgatcatgcataaattttagtattttgtgctccagttactccttatacgcaatttactgaactgttgactgctgatcgagcagcaagatagagaggatatgcatcacttaccatgcttgagtggcctctcttcctatgagacctcctgttagagctcgagctagtcaagttgctgctaccgccagcgacgcaatccccgtctagcagatggtactcatgcatgatccagttggttctgatgccttcagagggctctccaatggagaatagcagcgttttcttcaagccaacattgcggccgccgcttcttactgtttcatcaactccaatggggctccagtgcccattggatgaggtcctactttgtgttagatggcagaagaagtaccactggttcccagcttgcagtgctttgccttaaaattgcaatttctatcagcactcagcatgacttgtaagagaacaaattagtgaaatcatattgatcaatgcagttgcagacttaccattcagctcccatggattgtaccgatgcggaagcagcgtcgggatgatgtcagggtggcatgggaggagggagaccttgcgacggaggaaatggacgacgagctcttcatccgaggggaagaagtggaaacctggaggtaagtttgtagctcctcccatgctacaactacaagtgcaacttacaaactgcagtcaaatgcaacttggctgggatattgatgaatttgaaatgggaagcttgctgatcttggtgagcgagtgctacttatagggagcatatgtgtgtgattgtgtgaaagagtgagatgtagagagagagagagagagagagagagagagagagagacgtgcaagtcaaggagtgctgagtgctgatccgtaggaggatggcagccaagcgagggcgacattttgcgatgcttatattctatatatttctcttttcttctttggagggaaataatgatactatgaggagacatttgttggatcatggattcatgatgcactgctatgtacccgttggctgcagtagtgtgcagagatatatattagtttttcagaggggggcagaaataataattgaatcattccatagtacatgcatgataaaagtgttcatccagcagcctgtgatataattgatggccttaaggattgttggcttatattagatctcagctggtaggtatcagtacttttttgttgattagtcattacctcattgaattggattttctatcagcaatttctttaagcctgtattaattacttactgtatagattattatatcaagtgtttgaagttttatcaagtgataaggttttcacatgagctgattactacattgtgacaggcactccttaatgtacattccccaaaacctcagaacaaggtaatgtgacaggcaacatctctagtgcagtatttcttttcatgatcattgcgtatactatttgtttcccccctgaccattgcattcttgctcatgtcatgcaggcgtcacccttctcaagccatatgcaccttgaccacagccagccattatatacacgagtgccagcaagcaagttgcacattttttctggacctgtgtggcaaaagtacaagggcatcacttgaagaagaagcaacccagatgttgtcctcctgttgtatacattgctgcgtcagaggggtacactaatcattccaaattattcatgaatcaactggggaaaattcttatctgccttggcaggcacaataattatcaggagaggatcacctcacctgagagtgattaactagaaaaatgcccagttggtgaaaggactccatgccatcaagttgcatcgatctcaagtggtaagagtataagaccccccccccccccccctccatctttcttggtagaaagtttaacaatctcatgatgaccacttgtgaagagatccatcaaaggaaactgtggttcgattcaatcccgattggtttcagatgcaagaagatgcttatctcgataagattaaccaaaatgagatcatgatggccgaatcttccaggaactctcacacaactcctctgtgctgctcccaggaaaagatcatggtggcctcatcattccaatggtgcggaggcagccccccctcgctgtcgctcgcacggtttctcttgagcctctatctttctagctcttggatctctttagtttttttttggctttggctttatcttttgggatcatatgcatgctgtgcttctttgtggcagggcatgtccgccactggaagccggtgctctgctgctgctgctgccggggggaatcaatggaacgccattgccgttgccagcacacgtgaggcaaaacctaacatctcctgagtcctgaggggggtggtgggccccacctgtcatgcagagcgtgggtgacccggccccaccacagcacctggtgctggtggtgatgacgtcgtgctgatgcagttcggtcgaggcgcgcacattggccgatgctgtgggggaggagaatgatggagatcctcattcttgttggcacatgctcaggtgcgcatgcaggcgtagtgtactgcctgcggttggttgtggcatgtatcatttgatcatcccaactctctagccttgtagcctcgaggtgatgttcttgacttcaaaaacccaacccaacctcgttctgctgattagtttcgcagatgtgaacatgatgacgatgatctattgatctagtgtgtgttaaagtaacatttggttggtgttttgcaggacgcagtagttcttctgtctgaatgagcaagattgcactgcactgttcattggtcaatatcagatttgcaattaccatcagattgatcaagtgggagtaaaaaggtggctggcacaccttggatgcttactgctggtggtgaaggatgagaaagaggagggcatacgaggccacattctgccaatggcacctgagctatgcaaaatatgccgctcgtgggcaatgtgaggcacacattttgcatcccgcattcctgcctcatcggatagggcggaacggaagggatagaaatggttggatggatggataataccttgtggcagtcagtgttgctgctgcagcagcagcagccttcctccacttccaccaccggcgccacaagaaaagacgacgacgaccgacgccgacgccgacgcgtgcggcaccagccgacgatcgacgaggtgataccgagcttggtgcggtggtgatggcgaattgggtggagaacgaacgaacgaacgggagagacccaaccacgaggatagtaactactactactgtctttcacctgttgccttgcagggtaaaaaaggggctcttcatccgttggctagtttctccagctactgcgtgtctacatcaccagtgacgcatgccaatgcagtgcactccagtagtctcctacgctgctcttgtgcaaacttatttgctgctgctacgacggaccacatcggtttgcagatttccttgaattgaagtactcgactagcgcatccatcatctcgacgttgtggcgaatcgaatgaatggagttagctcctcttcaactattgctttagccggttgctgtgttcttgtttttcttgtctcttgcgtgcatcggtgcatggtgttcttgcatcatcagatcatctccatagtgtttgctatgctagcttgttccggctgcttcaaatggttccaatactccaatccactggcctcaccaccacccaatggtaaagctgctctgcccactcgctgagttttcttttttttttaaccattttgcaacgcacgcgcaaaatgtaccaagcacattattgttatctgctcaaatggaccatcctcatacggcgcttgacattcagcactctcaggcacattattgttccatcagattttccttttgtcgccttcttcaaatgccttgtgaagctgtgatggacgaagtaaagtagaacgagtactccaaaattcttttgcaaatcctcctaataaaaaaggcattaaatgtaacatgggcgtaatcttcccaagttgcatgccattgatagactgaactagacatatatatatatgccttcatgcttgtcaattgccaattgacgacaacatattcttcaactccgatctgaatcatccactgcaaaattcagtcaaacttcgcacacaaaaattatattatatatgtactctgaacgttcaataacaaagactacaaattacaaagagtggaaagctgaagacttctatcctaccaccttcccaaatccaaatatacgatcatcgtggcaaagattggaaatcaacacctctattgcagaggggggaaaatgagtaaatgactcagtagttgattcttcaaactcacaaattgagctggatcaggcaattgtaaagctctgccgaggcaatggcccaaagttctggactctgaatttgtcctgtcagttgtcatcttcaagtgaaaaattgatccttcaggatgccaagttccaaacgaatcaaaatcgtacgagtttatttgtgattgcaatctcaaagaaacacaataaccacattttggactctgacgctcctttgcagcatccttgaaacacaccaccaatctgccataccaaggatgctgaaggcaaatcagtgggcttcatccctcatgcctgagaccaatggccttgttcttgcaatgctaaagcaattgtttcattccagaggatgtatctttcagcacaaaacaaaattgccatgcttgtcctcaacattaccccgagcacgtgatgaaaaagcttgtccagcatctcatatatttcatttgcgtcacagtgagatgtgttagcagcgacaaacaagtgtttttctctctgcacctctatccaactataagctcctcaacattaccccctataatgaacatgtgatgaaaaagcttgtccagcatctcatatatttcattcgcctcatggtgagatgtgtcatcggcgacgaacatgtgttttgctctctgcacctctatccaactataagcttggtccttcctcaatcctttccccttcatgagagccctgacctggcgggcatcgtcccactgtcctgctgctgagtatatgtttgacaacatgacataccgaccactgttctcaggctccaactggaacagggcctcggcaacttcttccgcgatctcaatattgccatgaacatgacatgcaccaaggagggccccccatgacccagttgtacccagaccgatcttggaggacaagcctttgatgaactcacttgcttcttccagctggcgattccgaccaagagcatcaatgaaagcggcgtagtgttcagctcttggttcaacaccatggtcctgcattgattcaagaatccggcggccatcagagactagaccagcatggctgcaagctgtgaggacagcgagaaaagtgacataggttggttgtacttcatctttaagcatcctctcaaacactgcaagtgactgctttccctggccattgtgcgagaaccctgtcaccatggagttccaagagatgatgtccctctcaagcatcctgtcaaacaccgccatggccgctaccatgtcgccacacttggaatacatgtcaataagggcattgtggatgaaaacgttgaaagggtctgaaccgatgctcctgcgcaagatgaagccatgcacttccttccctcgggcgacaagaccaaccttggcgcacgcacccagacatgacacgagggcaaagggggttggcactaccccctcacctgtcatcctttcaaaaagctcgagagcgatctcctcctccccattctgctcatgcccagagatgagtgctgtccatgctatggcgtcctgcgctggcatcatgtcgaatacttgcacagcatcgtcaagcatgcttgcccggcaataccctgcaatcatcgatgtccaagaaaccgagtcacggatggtcatctggtcgaataccccccgtgcatcctccaccctcccggccttgctgtaggcgtccaccattgcgttggccatgatgacagtcacctccatacccgacaccaccaccgcgccatgcaactcgcggaggtgcctcgcatcccggagccccgcgcacgcgctcgcggcgctgaccaccgtgaaccggtcgatggccacctgctgctgccccaggcccctgtccctggccagctgggcgaacacgcggagcgcctcagactcgcggccgtgacgcgcgagcgacgagatgacggtgttgtaggagacgacgttgcgggaggcgggcggcattccgtcgagcaggcggagggcgtcggggagggtgccgcggccccgggccagcgccgccagaagggagttgtacgagtgcgcgttcttgtgcgggaggtcgtcgaaggcggcgagcgatgccgccggggtggggagcagcgcgtagagcgcgacgaggcggttggagaggagggtgtggtgggtgagcgccgtcttgacgaggagcgcgtgcaccgccgcgccgaggcggcgcacgtcccccgcggagatcgcgcgctccagcagggccagcaccgcctctactgtgacggcggaggcggcggcggcgctggccggagcagccgccgccgccgccggccatggcggagtgagaaggcggcgcatgcgcttgcaacgagcagccgcgacgacccagaaaagagctaaagcccaccactgtgccgttgtccgtgggcctcgagctgtgggctctgggccgtgggccgtcaaagcaatcgaagagtttatattttgtgggccaagtaaagccgtctcgtcttgctgttctagaagatttctcttcgcgtcgccggcgctgacaccgccgccgccaccgccatctccggcgaaaaccctacctgcacccgtccagcgagcgccaggaggtaggctctagccgggcggaggatggtgttcgggcaggtggtgatcgggccgccgggctccggcaagacgacctactgcaacgggatgtcccagttcctctccctcgtcggcaggtgagtagctcgtgcttctgctgctccaaccctcgcaagctactcccttcgtgctcgcggttccggtgctaggtgtttgtttgtttgtttgttccaaatttctggtcggccttgcgttctgttggttgcagaagcgtattgcttacctcctgggcatggactcgctatgcagttcgggtaggaatttgtggaaagcaagaactaggtcgcttgattcagatagtaggtagatttcgaattgagtatgccggctttatgccgatagagagagaaggttgggagagtgaggggagatgggcaattttctcccatggaggcagggagcttgctcatggaaggtttccccaacttgcaaatttgcaattatgctaaatgttttgacttatgtgcttcactgttgcgttgcaggaaagttgcggttatcaatctcgatcctgcgaatgatgtgttgccgtatcctctgcactttgagctctgaaatgctccatttgccatattatcttgtttcacttgttggattgttgttctgcagttaaacctgaaatgtatccttgacagcggtgattaagatatgaatgcgccataaacattgaggacctcataaaactgagtgatgtcatgtctgagcattcgcttggtccaaatggaggtttggcccagagccccagacttcaggaatcaaacctgttatttcttttgtatgttcgcttatggtatgctgttgaaatttgtgtcaggccttgtgtattgcatggattacttggagaagaatatcgactggcttgaggaaaagttgaaacctcttattgaaggtcggtataggctggctttctttattaaaaccatatccatgagctgcagcctggaagatctataaaatggagatcttctatagaagtcatgatctcatcgatattgttcgcacagctgataaaaaaattgttgttatggtgcattcagagaaaaatgtaatatttggtcaatttcaattatttccttttcaaaatggtttactcacaactgtttgtttggtctgaagtcttaactttttgcagttctagaaaagtaggacccaattaaagttatagattttgaacaattagagctcctgggttccattattctgaggattgtgtttcagtttgttcacaagtacaccttttgtttgttgagctagttctgaaagatcatagtaggggttactaaaatacctatacagatactgctttattgtcatgatttcctatgtgatttgctcaatggtggtgatgatttctgcagatcactatctgttatttgatttcccgggtcaagtggaacttttctttctacactcaaatgcgaggagtattatttacaaacttatcaaaaagctaaacttgcgggtacaactgtgttaaatcctatccagagttcattgattatgtaatgaattgcgttgcccacaatatttcttggtattctacagctgactgccgtgcaccttattgatgctcatttgtgctgtgatcctgggaagtatgtgagtgcattgcttctttcactgtcaacaatgctacacatggagctgccacacatcaatgttttgtcaaagattgacctcattgagaactatggaaacttaggtactgctttacctgcagcagaatttagttgattattacatgtttctatttactcatcttttttgttggcagcattcaacctcaacttctacactgatgtcgaggatctgtcttatttgcaacgccatctagatcaagatcctcgttctgccaagtacaggtaaaacataaaaatccaagcagcaaatacataactttactgcctcaaaaagtcatgcatatgcagtccagcatacttgcatagttacattgcacttattgaaaccttgttacttgatcaaattagatgtaattaagcaggcatttccagttctcttgggaatattgtgaaatgtgtgtgcagtagcagtacccttttgtccatttctttgtttattgagaaaccaaaggttgcaactaatatatttgtgcaaaaaatccgatgctcaacctgtttaagattaagaatatgtacttgggtaaagttgaaaaaccaaacacaggagttgtgaatgcatctattgtttttgcttcttggggattgatagacgatcatcctaaatcaatgtctgttaacatagcagtgtgacctgttatgaagtgagatgcagtaaccctgggaatcatttaattattcaaatcaaaatctctgataatgttgctcttatgcttggatttcacctttgtaattatttttattgcttgggttatttataatatttttgttccatctgcttaaggaaacttactaaggagctgtgcgatgtgattgacgattttggcttggtcaattttacaactttggacatccaggtacttacttgaaagattcagttatttcaattaagatccctgtgaacttggtcttacaagttgtttttgcctctaggacaaggaaagcgtcggcaatcttgtgaaattgattgacaaaagcaatggctatatattttcatctatagacagcagtgtcgttgagttcagtaaaattgcagcagcgccacttgactgggattactacagatatcctttactgtctcttctagcacctagcttattcaaacaaatatctttactctcataccttaagttattttcagtgttctagaagcactctattcaaatcacccctctggcacgtacaggcataaattattacaatatggaacaacactagaatggaacagcactagaccaccttacatagcaaatttatggctgtgcaacttgccaattttcacatggagcctgtagtatttgtggcaatgttggtattccagactggtatttggatttactagtgcttacccttgaaggcaattcgcatgcctgctgtatgatccttggatgctgctttactgttttttttttctttctcttgtccatgaaatacatcactattatagcccccttgcacctttccacatttccttttgttccttgacatgtgactacaacagcagaggtgcaggagaagtacatgaaagacgacgaattcgtgcagaagacaagcaagacgcgatgaaactgaatttgtttgtaatgcttgacatgtgaccttgctatgcttgaatgagagctccatttgcccccatgccgctcaggtagggatgtaacatgttgtgacatgcaaactggaactgagaaatgtactctctccattttaaaatgtttgacaccattgactttttagcacatgtttgaccgttcgtcttattcaaaaaattttgtgaaatatgtaaaactatatgtgtacacaaaagtatatttaacaatgaatcaaatgatatgaaaagaataaataattacttaaattttttaaataagatgaatggtcaaacatgtactaaaaagtcaacggtgtcaaacattttgaaacggagggagtattttaccataacaacgatacttgtagtttcaacccatgtatcccagctgtagatgtctcgtgctagctgctagatgtgctatgtgtaggacagtaggagtacaactctgaacatgctatgctaattcgatctaggcctgcctagttcttaattttttcttcaaacttataacttttccatcacattaaaacttttctacacacaaattttcaacttttctgtcacatcgttctaatttcaatcaaactttcaattttagcgtgaactaaacacaccactagtaagtcggatctggtcttgccaccccaccagtttccaccagggtttgtatttcggacgacaaccgatcaaaaaccacgaaagtagatacccagtgaaatttcaagtggtttttgataattcaattttgaaacagtaaattttagctaaattttcgatcaatactgggtgttagagatctcacctggttaccacaaagtatcataaagcacacaagattacaggcagtttttgcaatggtataaacaagagtacaagacaagattacaagcaggcagtttttgcaaggttttttgcaatggtataaacgagacaagattacaagcagtttttgcaaagatttaaacaaggggatcatgatccccaatcttcaaagtcatgtaactttatcattgacatgtggatccgatgaaccattgactcatatgtcaataactttaaatatagaggatcttaatccattggatccacatgtcataacaaaagcatagtaactttaaatgtagaggatctaaattcatcggatccacatgcaaaagcatagtaactttaaacgtagaggatctaaattcatcggatccacatgcagtaacaaaagcgatctaaatccatcggatccacatgtcagtaacaaaagcacagtgactttaaacgtacaggatcttaatccggaacaaagtggcacagctattttgtctgctctgatccggagcttctgacctgtgctcaccaccagagttttaaaatggaaagcttgcatcaggccacgtggcgttgacaaagaaccaatcccaatgtggccacgagccccggccacgccgccgccgccgccatggccatcaaaacctagtgccgcctcgcgcagcgcgctgcgtcgtttggatctcgacgacggccggcgccaaggcacggagggagaagaaaaccacgcgcctcttctgtgttctccggcgatggcgagctccacggcatttgcagcggcatttgcgctgctgctgctagcgtcgtcggcggcggcggagggggaggcggtgctgacgctggacgccggcaacttcacggaggtggtgggggcgcacgacttcatcgtcgtcgagttctacgccccatggtacgtacattgtacaggcaaaccccattcctcgccgccggctcggcgccatggcgccttgctgattttgaccttgagctcagctgaccaaatcctcttcgccgccgccgcaggtgtggccactgcaaccagcttgctccggagtacgaggcggccgccgccgccctgcgctcgcacgacccgccggtcgtcctcgccaaggtcgacgccagcgccgacctgaaccggggcctcgccggcgagcacggcgtgcagggctaccccaccatcaggatcctccgggaccgcggcgccaggtcgcacaactacgccgggccccgggacgccgccggcatcgtcgcctacctcaagaggcaggccggcccggcctccgtcgagatcgctgcctccgcctcgccgccagcggccgactccatcgccaacgacggcgtggtcgtcgtgagtttgacctcctcttctctctgcatcagctgtttatgcttatacttacaagctaaaggctctcattggatggcctaaatagtcaaagaataagtcaaattttaaattttcaaacttaaatttaagattgattttaagatatttttaacgtaatttcttttttaatattggcttttaagtcatcaagaacatatatatatatatgaaagttttatctataaatttatttttatcccctaataagctgttttggcttattagggaaagagccaaacgatgggagactaaaatttaattttacatttgaatttttggttttttattataaatagcatttacttttttaagtacatttgattttttgttttttaattataaatagcatttacttttttatatgtatatataaaagttttactcacaaataatatttttatttacaaataaagtgattcggataaacatacaaataagcgaaacaatgacccgatgcatcagtcaaatactcttgctgatgcaggtcggagttttccccgaacttagcggcagcgagttcgagagtttcatggcggtggcggagaagatgagggccgactacgatttccggcacacgacggacgccggcgtcctcccacggggtgatcggacggtgagggggcctctcgtccgcctcttcaagcccttcgacgagctcttcgttgactcgcaggtacactagctgaaaattaatgctacagagatactctgctctgttttgatccctccaggggaggggtatctctgtattcttgtttgcttaaaatcatccaagtagttatgattcatgaaaatttctgtaaaaagttgacagcgttcgtacaaatacatataccacctctaaaaaaatgtaagatccaaactcaacttacacattgatatataaaaaacataaattcggtatatgaataatagggtagtggtagtgtccatacccgaatttatctttttttttcaaggtgcatgtcaaatttaaacttaatttctggtgaatcgataaatatcattatactttatattgccaattttttcaaaaaaatttacagctatttacaataaatttggaacaaaaatatacacgaggggatatgaatatcctccaagggattagctagtagtagctcacattttggataagaaatggacagaaatttggattgcttcttgtttttatttttcaggattttgatagagatgcgttggagaagtttatcgagtcttctggtttccctacagtggttacctttgacactagtccggcaaaccagaaataccttctgaaatacttcgacaatgccggcaccaaagtaaggacagacaattggttgacttctcactctgtttgcctacactggactgtttagcttgttgtttaggccatgattgcctcttatcatgtgcacacgattttcactgtctctcatgttttatttcaatgtgctgctggaatccataattgagaatgcaactcttgtctcacttggtctgatcatctgttctttctgaacctgattttgagcgtgcaggcgatgcttttcctgagcttcagtgatgacagagcagaggaattcagaactcagttccatgaagctgcaaatcaatacagcgcaaacaacataagctttctgattggtgatgtcactgcctctcagggtgctttccaggtaatcttttgccttcttttttccataacaatctttattagtacattgctttgccccaacatttcgtataaaaacaatgtccaagagttgaaaatgcctgctgtctgaccatttttgaatgcacaatgttccagtattttgggcttaaagagagtgaagtgcccctcgttttcatactagcatcgaagtcgaagtatatcaaaccaactgtggagcctgatcagatcttgccctacctgaaggaatttacagtaagccaatttctgaactgacgctattatcctcttcctcgtttactaattccctgatatatattctgtgggttctttaagtcgcttgcgtgatatttagtctcactattttatactagggactatgaaggttacttattattagtactacctctttttttaatttctgatgctgttaaatttttgggataagtttgaccatcgtcttattcaaaaaatttatgtaattattatttatttttattatgacttgatttatcatcaaatgttctttatgcatgatttaaatgttttcatatttgcataaaaaaatttaaataaaacgaatggtcaaacattgataaaaggttaattacgtcatacattaaaaaccggagaaagtttcgctacgtgcttagtcagtttgccttgattttctttatgcaggaaggaacattggcaccccatgttaaatcagaacccattccggaggttaacgatcagcctgttaagaccgttgttgctgacaatcttcgagaggtggttttcaactccggcaaaaacggtatgttcttggctacttgcttgaagaacttgtattaattaccactcgacctgttacagaatgcaagatgttttggtttttgttacaagcaattttttttcaagtttaaccgagtacatagaaaatgtagcaacatttataacaccacattaatttcattaaatctagcgttgaatatatttttgtaatatatttttttagtgctgaaaatgatgttacgtttttcttaaacctggtcaaactttgacttggataaaatcaaaacaccttatattaaagtggaggaggtagatatttgtttaagttatgccctgcatgcctgatgcctgcttcgtcgtcaacatcttaaccattttgttaatttgtttgctcaagctgtcaaaacataagttcggtctctgttttttttttttcaaattccttttgcagttctgctcgagttctatgctccatggtgtggacattgtcagaagctggccccgatcttggaagaggttgcagtttcattgaaagatgatgaagacgtcgtcatagcaaagatggtaatctaccctacctatgagctctctccattgcttggtccatgctggccttgtcaaagatatgattgaaaaatgccttcatagcatgcatccataaaccatctgatctatttatttcttaaaaaaacaaaacaaaacaatcagactgattcattttattttttttagaaaaaaagcaaccatcaaattcacatgtcatgcctggggaaaaaaaagactcaagtttgacattttttttgcctcaaattcaacaaaccagattattatcagaacacgcgcgtttctcaccgttcacctcttgaccaattcgtttgccctgaattgcaggatggtactgccaacgatgtaccgtcagatttcgcggtggaggggtacccaagcatgtacttctactcgtctggggggaacctcctgccctacgacgggaggacagccgaggagatcatcgatttcatcaccaagaacaagggctccaggcctggggaagcaaccacgactgaatctgtcaaggatgaactgtgatggccacttggtcagtgattcagcgactccaagttttttttttttgtttctttaccaaaagagagctgcattttgcaaaacactgatttattcaggatgaattgcaatctaaaatcatctttgtattattttttgtagggggagtggggagcttcaggttaggaggtgcagtgcagctgacagcttgaggacatagctcagtactgaatttaatcttgtattcgagttccaggtttccaagtacatgtagcattaccaatggtttcatacatacatgtccccccccttttttttttttgcaccgctgaaatctgttattgtaacatcattacactacatcgaataatccccattttagcttgccaaacgagtaactaaaatccctgtgtttctgaaccgaataatcttaccaaactgaaccaaaaaaaaaaaaggacagcatcaaatgtccctgcctttctgaatctctgctgctccagagtggttggcgttagataagctctctcgttacagccatcctgtcctaacaaagtaattaagcatgtaaactttgttcctttcttctttttttttttgtgtgtgtgtgtgtgttgtcaaaagctatcatcctaacataatgtgaggtcccatggatgatgattgtccacaaggttggtggcgatcgatgctgcactgcaatttgcaaagccgtgagagagatgagatgagagaatcaaagccgtacgcgcggctccgctgttgcaatcaggttggtcgttggctgtccctctcctttttctctcctctctctctctgctgatctgctgccttttggacagtgcatctctgcatgcgagctcagcactagcagcagagcagcaaggctttgcacttgcaagctttttttttttttttgggagaacttgcacttgcaagctgctctccctttctatctccactacttctcactttccaaatttccatatcaatgtgaatgatagtaataataactaattgcattgtctggttgagctatctgccacctaatttaatgaccaaatggtccgctttattaatcgactgcgagtacactgttgcactgtcgcactgttacatatatatatccagatttttaacattagtaacttttgttagtggtaaggtactaaggtcttgccttttattattatttttttctttctcttcagttaattcgattttatattcctagtctttagatatgtgatctggtatgtggaaaatgccacttgaaggatgtaaacaaacatgtacatactgctagcgtgcaacttacaaatggggaaacaaaagcaataattttcctcttacccagaaaaaacaaaaccaagaactcctcaacatttataactgaatttaaatcctaatgttgactgtacgatcgattatgcatacatggtgtgcatttaattttgaaaaggaaaaaaaaaacactgagctgagctccagaagatgcttttaattacacacagtaggttaattaattactttgccgcgaatgtatgtgcggcgagagaatagtaattaagagtaagctagcgctaatcatggcacgtagatgctcccgtggcggcgatggtggtggcggcacggcggcgccggcgacggcgacgacttgtcgacggcgaacagcttccggaagagcctcagcagcagctcccaccccgtcgtcgccctgctcccgccgccgccgccacggcggccgccgtagaactggcccacggcgcccgcccgcgacgacgccctcagcatcgtcggcgcgcacccgtacagccctcctcctcctcccggtggggacgacgacggcgtctcctcgtcgtcgtcgtcgtcggccgccgccgcgggtgacggtgacggtgacggcggcgtcccggccgccgcgcgctgctgctggcggcgccggagctgaagcaggagctcgtcgttgaagtcctcccacagcaggtccatcctctcctcgtcgccggcgcgcgcgtcgcggtcgcgctcccacagctggtccatccgctcctcctcctcctcctcgtcgacgcgccgtgctgctgctaccggcgccgtcgccgccaccgcctggccgcccgacgccgcgtcgtcgtcgtccgccgtagccatcgtggatgagaatggccagaggaggccgccctggctgctcggtgccagcgacgacgtcgccgccgccgccaccgccgtcgccgtcgccgtcgccgccggcgcggggaacgtgaagtcgtcgtcgtcgtcctccatggacgaggcgaggcgaggcgatcgagctgctactgttgcgctctgacactagacactgctaagtctcgcgctgggtttgtgtattgaagtgatgataaggttagagagtggaatagtacgtggacgcgattgggtacccttgccttgtgttgttgtggagttgggcaggtgacaggtagctagcgccagtaatgctagatttggattgtagttagggagagaatatatgtatacgtatgggtggtattaattactcccccgtatctaaatatttgcgttgatttttttaaacatatttaatcgttcgttttatttaaaaacttttgtaaaatatgtaaaactatatgtataaataaaagtatattaaacaataaatcaaatgataggaaaggaattgataattacttaaaatttttaaataatatgaacggtcaaacatattttaaaaaaagtcaacgacgtcaaatatttaaggacggagggagtataatacagattttatttcatttttcgtgttttcgttagcaactttaatttttttttcaaacttttaaattgtatgtttcgtatgaaagattttttaataaaaattaatttaaaatatcaaataaatttatttttaaagtttttaataattaaaatttagctttcttgttttatgtgttacaacattattttcatcttactagcaaaaatacttgtgtgcaacacgtgaagacaattttcacgattgataaaaactctatcaatttaaatgacaaatcctaacgagacgaacaaaataatggtaaaacaaaatcagaaatcatatattatagcattgaacccggctgtatttatagcattgaacccggttgttgcgcttgcttcatacgtcatcacacgaataatctcttacgtacagctttccataacctcacaaatcaatcgggtggccattccataaatcgatacctgggtattttactatgcctcatcgaccatatattgaaatttttattatttagttagtgaaagtttttttactgtagattgaaagcatttataaagtaacaaacttgccacatatacaccttaaacaatgataactttaagaaaaatattgatgagaagagaattttgaaagagaaaaggaaaggaaaaaaagagaaaaggatgagaaaacagaagagggggaggagagggagaggttcatgatgatggagaaaagaaaaggagaaaaagaaaaaaaagagagaaaaaaacgtcgatcgaggcaggggtgcacggaacggggtgccggtgggatggtgtgggacggttgggttgggctaggaggaggaggggatgtacaatagttgttctacttatgtcgaattaggtacgggtgatgtacaaccaactcaaaaattaactcaagcacggattacgtaccaaaattctgacaaaaacgtcatcaatttctataatactagaaaaaaaatactcgtgtgttgcaacaggtgaagtctattttaatcttattattgttatatggtttagttaagatgaaattcacgatcttaaaaaccgactcaaatacggatatgtatttccaaaagcaatcaaacttaaaaaccgacccatacacgaatgacgtaccaaaataccggtaaaaacatcttcatttttataatagtagagaagagatatagattaaaaccaaaacataaaattaaaaccgactcaaacacggatgatgaactacggaaatatcttcaatttttataaccggctcaaacacggatgacggaccacgaaaatatacttaatttttataatagtagagatttgaaaagaagaagacgaccatactatagcaccaacagtatatgatatatcgagagggctatttgcgcttgacggagcgtggggctcctcaccgggagaccgcgcaggccccctttgccggttcggccgggggcgctaagtgaggttcttcgccctcgatctgaggaacgtccgcgagagaggaaatgcacaagacacgggcgacgtagacaggttcgggccgctgagaagcgtaacaccctactcctgtgttctggtggatctgtgcgtgaaggaatacagagagccggagagcgagagagagttcaggctctagcaccccttcgccagagtcccaaacctccttcctcttttctctcctctccctttctctcctaggcctgggcctcctttttatctggtcaggggtcaccacaagggcctacagctacctaagaaaggaaacatgctttttacaatgagggctagtctacagccggaagtgacctctgacaagcagagcacacgcctcctgccccgctcgcccgcttttccggtggacgcccatttcaaccttcatttaatggccagcgacttccttgccatacttgcgctgaagcctggaatggatctgaccgggactgacataccaactccaggagttagcacgccggctccggctagggacgagagccaggaagctctcattattccgacgggacggggcgaggcgtgtgacaggccgcctgttgccacctaacccgcgatctgaccggtctgcgaccggtcacacaccgcgaccggtctcggaccggataagcgcgcgctgcgccgcattaaatgcggcgtggcgcgctcgtccaacctgctataaatgcggttaggtgagcccgctgtgctcacctaacccacacacgtggcgccaaaaccacagggggtcggggcgccccagccctcggggccgaaacgggagcggtccgacccctcggggagacagagggaggggtggccacgtcatcctcgggcccgacccccccccccccgagggggtcaggccacgtgggtgaccgcggctacccaagcctctagtcacgatacccccggccccatgtcaccgacagcgctattggcacactcttcccttcctttgtggacgaaatgttttccttttcagatgaaagtttcaagttttatgccaaagcacacaatatataatactgcagcacgacaaccattgttctgccaagattacctatataatacttggttttgcatatcatatactccctccgtcccataatgttgcaaccgaggatgggtactaggtctacgaatctgtccagtccaggacagattcgtagtcctaggatggttgcaacattatgggacggagggagtataaacagaagaagtctagagtggatctcgatctacgcacgtctactcttggccctcgtgtcttctcttggttcgggatttaacgcacggaaggcagttcataccattccgctcccatgatgaaaccaacagcaacagatgcaacggtgacaagtatggtcatcacattctcttttctgatcttgtcgaggtgctccctatcaaaaggatgtttgcgtatactcactccttcctaaatgtttggcgccgttgacttttttaaacacgtttgaccgttcatcttattcaaaaacttttgtgaaatatataaaactatatgtatgcataaaaataaatcaagcgatagaaaaataattaataattacttaaattttttaaataagactaacgggtcaaacatttttaaaaaaagtcaacggcgtcaaacattttgggatggagggagtataatgcatgaatgttaggatcgttttcatttgagtaaaaattaatgaaataaatcgtagcgcctccaaattaattaattacctcgccagcttcatctctaattctagctatcccatcatcaataatactagctatcttgccatctatctccactcccttattttctaattttgccaacagatgatcaacctccttcgtcttcctggcaacatcagctctagctcctttggcggatccaccctgctagtaggattaattagagaaatatatatagttagttgaaatggtaatgcataagctaaaaacagctagccatgcatgttagtggatgctaatgatcagagagcaatggctgcaattggctaacggtggtcctttcagagattgtactactaaacttacaaaagtttgacgaccagcatatgtccgactatatgaaatttatattactatacttgtttttggaaatgctttaataacagtacaatatagaaaataattgatatagaagcactaaaacggataccctcatctcaatcgggcggtaagccccatctcaatcgggcacggcgtccgtcacaggctagaagtcactgatgtgaagagttatctcaatcgggcaaacggccgtcacggatgaacccgccaccgatagctttgacccagacgaccagtcaaactatagcccatcacagatgacctatctcaatcgggccacaactagcgcccgtcacagatgactactaacctcaatcgggcctacactagagcacatcacagatgatactcatctcaatcgggtctaaactagagcccgtcacagatgactacttacctcaatcgggcctaaactagaacccgtcacagatgatactcatctcaatcgggcattaagtacggcccgtcacagatgaccatcatctcaatcgggcatttagttatgtcccgtcacagatgactataatgcacaaaaaaataaattttgttttttggctagcctcaggcctttgctagccatgccagctgcaaaaataacagaaacaaacatagatatacaatatgcagtcgtttggacaagcgtgaattctacggacttctaaccccagtggacacagaacctattttgcttcgtatgtcgtctcgggcaatgtgttctcagcaagaagcatagccttcaaaatttctaaaagatctgtgaaactcttgtctgtctatccattacttgtcttcaacttcattaggtccaaggtaactgacaacttagtgtgctttgctttgcatccagcgtacagaggcgtctcggaatcactgaccaacctactgaacttcatggaatctctctcattctgggctgggtcctcaacgtcatgtaacatgtcttgcagcagatcgtgatccacatcaaacatttcaccgcctaatggagaaggtataaacatgtcatgctcatcttcatcttcctaattatgcgcaccacttctgtctgctgctgctccacttcctgattcttgcttccatgtttcacccaatatgtatagcccttcatgaatcctcgttgtatcagatgaccgtgtacatcctctccgctatcaaacatattctcattcttacaatctgcacatggacaacacatgtaatcgttgtttcttcttttcctatcctcctccgcatcgttcataaaatttattacaccatttctgtactccggaaaatgatgtttcacaatttcgcatacatccaacttcgatcaattgctacaaaataaaaaaaataaattagaggcacatcttataagatcagtattgttaaagtaagacgtgatgaaattgctcaattaatgattaatattactcacttgattgctccattttgatcacttttgggaattttctgttttccttggaaaaaagacaaagaatcgccccctacagcctcctaccaaaatagtgaacagtgggatacagttacactaggtggtggagggtatttatactgtgcaacaaatatctgtaacggtcctaaaacaatcaaccatgacgggcatacaagtaatctctatcgggccttaataaaagcccataaaaaaagagtgtcatctgtgacgggcattaaacttatcttaatcgagtctttagttggagcccgtcacagatgaccctcatatgtgacaggcttcttttagggcccgattgagatatggcaccctcatctcaatcgggcctcaactatggcccgtcacagataagtgtcatccgtgacgggctctagttttatgccgatctaccatggctgtgcgaccatatctcaatcagacgaaactttggactgattgagattacttccttgtgacggcccgcaaattccaatcttgttaggggtcgtcacagatggaaggatctggactagtgaagctatatataaagtagtggcaaagttatgtttcgagaaacacaaaaatcacaaaggccttattcggtttagaagggattgaggaagaataatttcacattataataggtgtggaataaatttcctctaattcctccctcatagggattaaccgaaccaggcttgagaaaaaaaaataaaatatggggatagaatactcttctttgcccccaccatatccacgtgtactcaatgcggactacactacaaattgattaagaaaaaaactgattgtcaccgctttctttcaagcaaaagtaacaagtttagcacatatctttgcatagacctcctctgcaatctggcacttattgtgcatatttaattaattggcaatattcatcattagcggtcaaattacagaactcctctgataacaagggtctgaattgaactaggtaattgcatcaaacccctatatttgttattgtctcggggaagataacaaaaaacagttaatttgatcgtggcctgcaggttaattcgctgatagactcgtcagaaccagggagtcgacagctagctagctatagtaggtagatggatcgaacaagagcggaactagtacctgatcaggggtgggatcaggaagggagttcgccggcggcgaatcatgagagtgcatcgccatgacaccgagacgccggaggaatctggaggaggggggcgcgccggttagggtttgggttctctcaacttaatttgttgcctttgcctgtccgagactgagagatccatgggctaggccatccggcctcttggacctgcgtgacccccaacgacagacgaccaacagcggaataagttcattggaggtcccttaacttgtcgacgaatccgattttcgtaagtccttcaattgaaaaaccagatacaacaggtccctcaactgtcaaaaccgatgcaaaataagctgacgtggctaatttgaatcaatcatcattggatgtggcgcttacgtggcaatttaatttggaaaataataaaaactgtgggcccacatgccagttccacaaaaaaaattaaaaatggtgggggccacgtgggccccacatgtcattatcaccccctcctcttattcctcctctctccctatctcccctctcttcatctctctcccctactcccctctcctctatccaggcatggcagggaagcagccggtgggaaaaggaggggtgcgcggtggccgggagcggcgcacggtggcaggggaggccgctacggcgaaggtgaccatgacgacagtggtgaaggcggctatggtgggggcaaccgcgtctatggcgtctgtggcgtgggaggtggccacaggtgccgtgccgccaccgccgaacctcgtcccttgctgccatggtaggggaggttgaggaggtggtagtggtggtgcctccctctgtcccttgtaggctgttttcgtcgtcatgccaccggagagggagtttgatgctgacataggagcggagagggatgaggagggaaggatgactgttgcgcatcgatgttgaaagtggtgacgacgatgtggttgagcattggggtgcgaccatggccactgtatgtctgccccgtggcagtgaagacgatgaagcgttgctccctactacccatctccgttctcccccgcagcggtgaagacgatgagatgggtgctgctagatccagcaagcagcaggtcggcagagaggagaaggatggtgccggagaggatgaagaggacaccataaactccaaatcaacgcgacagaggcttgttgcgccgatgatccctccgatttcttgaccacagccatcgtcgcttccactcccacaatccgccggtttgcatcgccgtcggggagttggcagcccgccacgctgatctgccccaccccgtgccatgcaaaatcgaggccgtcggtgccaagtgctattccaccagccgccgctctggtctaaaaatgtggttattttttatgtttgcttatgtggtcacatcagcaccccatcagctaaaaccaccttcaatattgagactacatttgcatcgtttaggaagatgagggatgtgttataccccggttttgtggttgaagaatgtaattaagtcaaactcgacgtctagatgaagaacctaaagtgaacttattccacgaacagcacactacaacaatgtgggcctgagtgttcagaagcccacaacgcaacataagccgaaaatcctacccatcttccgcagaaagctacccgtccatcccacaagcaaacctacaactgaattgactaacatgaatttgtttaactcggttgctatacatacgacatccaatgcatctcgtactattatcagggcatgcggctatgggcaagggattaatctacgttggagatgcatcgtcgtacgtctcagtcggatgaagcggtcgtttgtgtagtgtaattcatgtccaatctaatagtaagttgctcctatattttatgcctgagtgagtaactatggttgacacgttttccgatcaccatgatgaatcaccgaaagccctacgatgttaaccggagtcgtcaaccatcttgatctagaaaactctaaaccaatatgggtttagaagaatgaaaaccaactagcataaatagcacaacaattatcagacaacataaatagattttgcataccatagttagcttagaatgttttaccaagattactaacttggtcgtacataccataaacagagttgacctacaagccctaggctatttaaccaaaaaagattttcttgcacactgccgcacggagggcacatttgcaccattctgctcccaagacgaaaccaccactaatacatgtaagagcgtgcactatcgtcttcacattctctcttgtgttattgacgtgccccctatcaaaaggatgtgcgtaatgcatgaatgttaggatcgtttcatttgatcagtaaaaatgaaataagttgtagcgcctccaagtaattaattacctcgatgcttcagcttgaattctagctacctaatcttcaataatactagctatcttgccatttatctccactccctcattttctaattttgccaatagatgatcaacctccttcatcttcctagcaacatcagctctagctccattgccagatccaccctgctaggattaattagagaaatatagttggaatggtaatgcataagctaattaaaacagctattcatgcatgttagtggatgctaatgagagagcatggctgcaattagctaaaggtagtcctttgagaaattatacgaccaaacttacaaaagtttgaccaccagtatgtctgactgtatgaaatttatatttactatacttgtttttggatatgctttaataacagtacaatatagaaaaatcattgttatataagctacaaagtagtggcaaaattatatttcgagaaacacaaaaggtcactaagggaaaaaaaataaaatgaggatagaatactcttcttcgccccaagtaaatcaaacgcccatatatcatggaattaggctgcattccaaagtgttgcgtggagtatcagaaataatctaaattactgcagccgcatgtcagggcttgcagcagctgcacactttgaaaaattgaatagcggctgatgacggttgccgttggagctgagggacggcgactgttggacctgatggatggctgtcgcaggcacggcgtcacgtatggaggagataacggtggggaaaagaaaattaaagctagaagcacacgcgcattgcacttagaaattaatgctgcagattaggattagctaacggcctggcgaaatttgagttttttttttctgctgacaaagcacaacaattaaagtgaaacaaatattgcacataaatgcgtccgatacataaatagttttcgatggaaggaaggagacataaatagtaggatacatatccatttcgaaaatggatgttaaaataaatattgaacatacacttctacccgtggtacatctgattcgcaatagtctcacgataagtcgacatagcttcctcgctgttggggggagtcgtaccaactgcggaggggtggcgcctgtggcacacgggggtacccgttgtacaaagggttctgtgtcatgaagtgggggtcattactatcagtcataaagttgtggagagcaaaagtagcaactataatcttcgtctgagcagcttcctctccatataaaggaattccccgcaggactctccactgactcttgatcaccccaaaatctctttcaactgtattacgcatggcagagtgcatgtagttgaaagtctcttcctttccaaccggtggtggagcttcgttgccttcgaaatcatcaacatggtatctaacatttgtttacggtggtaggaaaccgtacctactgggatagccagagtcaacaagcagatatttccctgaaatataaataattggaagtgttactagtcgacacaaatgaaaatttgtaattatgaaaactataacacaagcttagttagatcactgtactaaccccatggcaaccgtggaaaagcaaatggatagcggcgaactgcctccgatagaactctttggtcgtgtactgaaccaggccaaccaacatctacaaacataactcgttcgtcccaaccaatgatggttagcacatttctagaagtttcattgtggcggttcctatgtggaattgaattatctctacgcacaagaagcggtacgtgcgtcccatctattgctcctacaacaccagcaaagggaaggaatgcatcatcttgggcaagccggtaatgctgcgggaagttgtttggatcaacttgtttgatgatgtcggctgccatctcattgacagcattcaacaccctgtgaaaatatctattcatagtagcgttgcaacgaaccatcctattgttgacgctcctcacggaatgaccacctgccatggcgtacaaaaacattccaattgcttccataggacatacctcataggtaccatgcaagtggtacctacctgctcacaaggagattgtagagagcgtgaatctggtccgctctcatccgaaacatgttatggcactgctctgggttgttcattgtttccataacccattgcatgcccgactgctgaggtacccgtcttggtgctcgtgtgcttacattcctttgaaaagcatcagccaacaactccataattgtttcatcctcctcgcttgtgtatccatctttagaccctgaagtgttccctgaggtggtgctcatcttggtaggtcatgaaatggaaagttgttgtagcatgtacaaaaaaaatcatatctctgatgttcataacataaacagtgtaatacaagtgcaaactgagataatgttgtcgttagtgtatgtgaaaggaacaaaaaatgcacaatatgaaaataaaagttagataataatctgagaggtgcagtgactgtacaataaatgaaacacaagtttataacttaacaaaaaatattgcacattagcagtgagtgtaaaataaattattccattagaacaaccaacttagattaatacgcaacgtgtgccgaattgttcttacatcaatacaaatcaacctgcatataacataactatgttcgatttaaaaatcgaacacattatttcactaacataacgatggaataaaaaggcagagcaaccaacttcagcttcagtcgcaccagcagcagcaaaacttagcagcagtcactcagtagcaactcacagaggcacacacagcacggccataacacacagctagcacacaacagcacacaatagcactagcagaagcaccatacccactcaacacactgcagctccgtcggctcccccagcaccatcatccccagggtccccccatcacccccatcaaaccgtgtaccaccaggtggaaaccaaccccctgagcaagatggtggagggaaaaatcctccaccattaggaaacttcatggcatagtggaacctaatgtagtactcacgcatctccggggtaatggcatcacctaggaagaactcgcaaaagtatgggtcactaaagagcaaaacccccatgtggtaaacatctgagctaaataagtgcccatcagacttgaccaactcaatgcatgcacgagcactcatagcctcacgttctcgctgcttttgtgccttactctcactagacttaaccctcagatcagcgagcctatgcaaagcctcaccggtggagtcactgcgggtccttttggaacccctagacccactagccggtgttgccacccttttgcccctacccctggttggccttgaccgtgatggtggatcaggtgactgtggcgcatctggcacgtcgacaaggtcctcaacatcgaggagttctgcgttggctggctgcaactgctgttccagttcagtgcctgggacacttgaacggttgccgacaacacacctccccctgaagacagcatggtgctcagcaatgaatctgagaggtgcattcctgaaagacctagcacattttctcatctgcatttcagcaaaagagaaacaaactagagtgaacaagaagtacacatgcatatatgtattgcataaagtacagaagctaccaaactacaagcacacaggcatatatgtattgcataaagtacagtacgatgcacacagcaagcacacatggaatggctgcaacctaactgcccataatattagcaacaacatagcttatcaagtggttgcaattattatcaagtggtaagttaaataacaagccgacattttcagataattacgattgctattgcaatattaataaaacaacatcagcagggaagtattaatttcaatttgcttcagcttcatgtaaatatgcaaatgtcatgtgttatccaggcagtagtactactccacaagcactcaccacagctgtgaacaagtctcatatgattcactaaattataccacatgtcatacattcacaacactgaatataactactgcaaagtccatttagctgccaaattaatatggaaaatgctttcagagtatttaaaacatcaaagtgtgcatatgcatattacagatttgaccaaatattgcttagcgcaaagtattgtaaaatcagcaaggacaatataactgagtatttgggtataacaatcaatttttttggtggtaagcaaatgtagttgttacagccattgttttatttcactaaggtggtacttaacattatacatgcagtgagaagtgaaggtggtgttcagttaatgagatgaaagtagaggtatgtactattgaaatatattagcaacttttggaatgttgttaacaacacttgtactctagttggtactactatatcatctttcattttataaattaccaaaggtatcatcaaagggatgtctaagttcttaacaatataattgctcactacaaattatgtcctgacagaatcccaagcatgcatatgtgaatccatttgatgtgcactagggttcctgatcttccgaaaggttctgataaacaacgatttgggtggagtcgcgacacaaatcgatccggcttcttgaacgcgcacgctcttgagccccgcaatcgcagcaccacatctcctctggttatcacccttgtcgaaacgcggatgacctcaccgagaaggctaatccctgtttgccaatcgaagaacacaaacaagaacgagatagaaaacaaccaaaattgcatatgaatgattaagctcacgagttggggtcttacaaaccgatctaacagcgaaactgctctcgacagaataatctaagcaaaacccaaaaacctaaagatggcggcggtactgatatatagagtttagggtcgtgcaaccccctctcgatacaaccctaatgggttccaacacgatacatggcccaaaggcccaaatacggtgacgcagcaccgggacagattctggacgtcaacttgttcggtcgattcccattgactcggaaagaatttgggcgtgggaccagaaccattggaaatgttatcttcttagctttccatccatataaagaacgccccaatgcgagcacgtatgcgacctgggcgcctgttttagtgcagactggtcctggactccgaattgcacccgaggtcaaattggtttgggcctccaccttgacttggacgtcctcgtgttgacgaaaaaatcgaacacaccggcctgggagatctgcttaactcctgtgcatgtccaaagattgatgagatgcgagcgtgccagttagtttgatcctgcaactgacaagatatgcaaatagtagatcaaaatagccgatcggctgacaagccgatggagtagttccagccgatagccgataatagccgatgccgataccagccgatagcgatagggattaagcaattggctatatgtccaatgtggataatgatatattggcaatctgccgatgatgatataataaaataacaatataatccagtataaaccaatcggctagcaatgatatgataaataagtatcgatccgaaggttaaagcacacatcggctggaggtccgatgtcatgaaatccacaagattagattaaacagtgaaacctttgttgtcatcggctaaatccaacttatatgtatatgcaatccttatgagccgatgcaacgtccagataactcaccggctaaaaccccgatgaaacccttattggcaatcaagaagcaggctagagattatggttctaagcacgacttagtagatcaaacttaactgatgcagcactaagtatgaaaagaaacataatatctagacaatcaagccgttgactgagttttcagggtggtagatgtctaagctaatctaatctagcaatgtgatttaaccgataccggcagaaaccctaaaacgagaagcagccgatagagctaaattgatatgctaagactagattaacaaagacatatgataaataggtaggcaaatatatcatccaaaccagagcaatccaagaggtcgaatgtactgatgcagccttgaacgacaccgacgtaaacgatataattacctgggccgacggaacattggacttaccccttagccagagatcgaacaccgatgcagccccgcatcaggtgccaagtcccttcggacgataaaataaagtagaaaaggtaaaaggtggcgatgcgccgaattgtattgatcgtgaagatagattacatagaccccgagtgtacatatttatacctatgggttgatacaagtccttgtcggacaagaaagaaactttcctaaagataaaaggaaaagataaagtccttataggacactaaacacactttcctaaagataaaagaaaactaacaaactattcctaattaatagataacttgtcatgccgcattctctttgaactcggtctcttctggataagcttcctttagtagatcaatttccttaaccgaatatagcaagaatccgacaactgacgacttgacaactctcatcggctaatctcaggacttcgaagccgatgctgactctaagccgatgactactccaggcttaccaaatttcactgtgaacacctcgataatcctccatggctctaagtctttctccaagtgtctccttgtcccctccattgttactaatcacaatataatcattcggtagcaatctattcttgaattcatacaaagaagaacataggaacgagctcacctctaaatttaattgtcgcgcacgagctcttgatatcggtttttgaatgaccgttggaggattgttgtatgtatccgaggtagtgatgtccacatcaccatttgtacttatcaacatgatgacccagctaaaaaatggtaaataagaaataatcccttttgcaatgattctaacacattgtgaggttaccaattaaatggatgtaatacacttgacaactgacatgtttgtgtacttatcattgcaatctccatgtgtacttctcattggaaaaaggcacatttgtacagcacacttgctaacttaacaaattgacaagcttacatctgaaatattgaatacagctatttaaaatatctatgtgactatgtaacttgcaaaactaagttgccatgtacataatactaggtttgaacatttgcatctaaaactaagttggcatgtgcatctaatgctaaaatctgaacatttgcatctcaaagcaagtttcaaaactaagttgccatgtgcatgtaatactaagatctaaatatttacatgtcaaactaagttaacatttgcagcactatttgttctgaaactaagtctgaacacatggtttcggtaaagcaaaaaggaagagaaagggaggactaaccccttccattgcttcccaccactctggggaggcgtcaatgctgccggtgtacgggtttgttcccagccctgtagccatcgattccaaccatgtccaggtctggaaacggcggcgacaagcaccccagaagttcttcacttgctgcttgctgacatgcttccctgccttggacagcatcttggcctgcaagttggcatacccctgagtcttggggcatgacgaagtgatgttgcgagcttctatttcctccatgcagctttccaagaacgcatggagttcgtcctcagtccagtgagtgtgacctccgccggccatctaagcacacaaattgagcataccaaaataatcatgaggaaacacaaatagagcaaggtattacctttcttagtttgtccgattcgaggaggtcctagtccagcgagcgtgcaaccttctccggggtgaggcggcggatgaactgccggacggcttcgggggacttcgcagctacggaggagagtgcacgagtgacaagctccacatcgtcttgtgcagtggctccggatgcagcgtcgaagaggtaagatttggtcgaatcttcgctcaattccagctccacggactcctctcccagcttaccgacgtcgatgggcgacgccgaagaaggggaggagcagatcagaggttcagcggcctcaaatttcctcttggttcctcttgcagccatttgcgaccgaggggtctctaaaataggaggcctcggctcttcaatggcgcattttcgaaatgaatgtggccgtcgtcgatgcagacccactgtattgcatgagatcgatgcagcgattgatcaaatcatcctgcaaggcttcacgagcgcagcaggaatcgatgcctcgatgcccaatgcctcgtcgatgcagactgtcttccacgagatcgacgcagcgattgatcaaaacaaccttcaaggctgcatgaccgcagcaggaatcaatgccgcgtagcccggacgcggctggaatcgctgccgcctactgcgcacgccgcgcccctttgcactcgatgcggtatccgattcccctcgatgcggtctccaagagcctgctcacgagttgtcgatgtcgatcggctgtacggcacctatggcaaggagcagcggccgctgctccgcacggcacgccgatgctctcctcctccgcctcgacgactgccggtccgtgctgtgcactcttacgggaaagggaatggggtgaactgctggacaatggggtgagctgccccttgcgtcgacttcacaacatagggaggaaggagaagaccggtgacggacggctgccgtaaggttcacatcaacaacggcgtcaaactcccacacctacatctacaggaagcattgagcccaagacaacattagtctagagtgacgactccagtagcccatccaagcccattgaactatgcactttagaacgcagccttatccgttcatcgtatccgcgtgtagtcaatgtgcgcggtggaggctgtcacatcctgaaaaattcaaaatatataaattgttgtttaattggaatttttagaaatgattttaaaagcctagaagagaagatctaattttaattaataaattccaatataaaatggggccagataaaatttcattaaatactttgcttaattctataattcctagatttttctgggatttatttgagctaaggaagtatttttaataaatggaattgcatttcatgaataatttaaattgaaaaaggttttaaaaagtctcttttggctttgggccgaaagtcggcccaaacctcttctctctctcctcggcccaagccggcccagtccgccgccgcgcgcgcgcgcgtccgcctgctgacaggtggggcccgtctgtcagtcttcgtcttcctcgcgtcggccgccgcccgaaaccctaaccgagcgccgccgccgtttccttccaaatccggccgctcctttccttctccggccgaattgatagaggggaaatgatcctagggatctcctctaccttttcccctttggaaacatcggctaattcgttttggaagttcgtggaatcgagttcgattcggatcggcctctttccttcgaaccccgaagtttccttctcgtcgccggccgccgtgggccttcgtcgccgcctccgagcccctttaaaaggttccccgagctctcctctacccgccgccaccctcgccttcgcctctcgtcgtccgtagtgctctagcgccgtgtgacctagcgccgtcgttgccgccgtcgctccagccgtgcgctgccgccgttccggtcatcgccgttgctcgggaagaccgccgtcatggtcgccaagtcgccgccgtccttgtctgccgcttcgccgtcgccgaagatcgtcggagcaccgccgtcaccgtcgacccgaagaccgccgccgcttcaacctcgtcgccgtcgccgtccgttggtcttccgccgctcctttggtcaccggtgagttcgccgcgtcgcgctctacccgttggtgccttccgttcgcgccgccgtgccgtcgttcgccggcgagcatgcgcgcccaagccgccgagccgccgccgccggtggtgacgtcatcgctgacgtcatcgtcgccctctcccgtgagccgccgtggacccgatcgatctcgaccgtccgttttggatggattgatctcggccgtccgttcacgtgaaccgtcgcccgtgcgcccggtccaccgaaaccctagccgctgacgcaataaatcccctttttcttttcaaaaataattcattattgcgtcataattcaattaaaatccatataagtgttttaatccgatttaatcttcaaaaattcataactaattcatcttagctcggatttagttggtccaagtctctaaatttttctaaaattgagatctacatgttaaaaatatccacatgtactgttcatgcttgtttatgtgctgttttggtgtttttgctcttttctgtttagattccgacatttccggagagtccgttttcgcagcagaagaatttgaagagttccaaggccagcaaggcaagtcacacagattccaaacaaccctttgagcatgttgatcctatttaaagctattgtttctattcaactattgcatttattttcgaatgtcattgggtggaattaacctattctttgttatagcccttttgttcttgattactttattccttgataccttgggttattataatttgactagttgagctctatatgttggttcaactagatgtattagatataattgcttagccctgcttagaaacattagcacattattgggataacttatgactcactattatttcatgatggcttaatgataattcacgatggtcaatcgtgattggttaattaattaatgtgccaactaaaacctgataatggtgggttgtgagcacatggttttgagagtcgtgctcatgacaattaaggaccggttcacgagtttcggttgtgaaacattaaccgtgccaaccacaagccagcatgggcaacggctttatcttttatatagcatggttcattgcggggcaccagactgagaagtggcggagataagcccacgggggtcgctggggagtccataccttgtttataagggggtgattatgatccaggaaaggtgcgctgtagtggattgtgttatgcaaggggtattgtcacaactcctttccgaggtaccgtggtggtgttgaggcacatggtgacatgatgtggggttgtgtcttgtgggtacagtggtacacctctgatcagagtaaaactattcgaatagccgtgcccgcggttatgggcgggtctaacaatgtctttcgtgattagtctcacacttctcaccataataaaaggtgctttaattggtaataatttgattagctcctggtttggaatggtacattcctagtttggagatagaactgttcagccgggatggttgttcagaatggttgggcctatgcaacagagtatgttgtatagtgttggattaatattgattaattatttactccactgtttttcttctcttaaatgtttgctaaacgctgcttttgcaaatgagccctatactatgccattctttggtatccttgtgcacttgcatatttgctgcgtgacttgctgagtatgtcatatactcaccttgcaatcattcatcagaggaagagttctacagtgaagctgatggtgtggaggattaggtgtagccttggtcaagctgcctgtggagtggagccgtctgcgccgtttatcttattttccgctgcttagatatttattgattgagaggaactatctacctctgtaatgacattttattcgcttattaattagagtaataattgtactctattatcaatttgttattgtgtgcctcggctgattcctggacgagggttcacacacatgtaagcgtttggaattttggatagaaattccgggcgtgacagaggcagggattatggcccctacaccccactagacaacaagttgcttcagtaaaaattacttcctccgtttcacaatgtaagtcattccaccattttctacattcatattgatgttaatgaatctagatcgatatatgtttagatttattaacatcaatattaatgtaaaaaatgctagaatgacttacattgtgaaacggagtgagtaattgtcaccacttattttctttcgagcaatagtaacaaggttagcacatatctttacgtatacctcctctacaatctagcacttattgtgcattttttttgggagtagctatacttatggcgctatatttttcaccaaaaaatagtcaccatgtatttacattgtaagtccctaaattacatatgtaattttagtgtacttacaatgtaagtttcaaaattacatatgtaagtttctaaattacatatgtaagtttaatgtaattacaatgtaagtgcaagacaacgtctatattttgcattgtagattacatatatttatatactatgcagatacatatgagtagaaccatcaaaagcttaaactaatgaagcatgttaagttttaattaattgtgtaatgacagccgagaaatactaaggacctgagtggactgaacaacatctgacggtcagaaattcgactgtaatcagccataaaatatggcgacatcattttagcaaatccgttttttgtttgcgttgcgagttgagctatagcgctggctttgcctctatgtgagcctgtcatgggcctcttgggcctgcgtgactccaaaacagcacgctttttgtttgcaaaaggaataagttcactggaggtctctcaacttaacaacgagattttttttcccttaaccacgaaaccagaaatgtatacccctaaactcacacaaaccgttcaataccacgagaagagtgggagagagaagagggaagagtggggaaggatttttttttttacatgtgggtgccaaatagacctcacattacccaaaaccggtttcaatactagggcatcagcaatgtgctcgcaaaccgggtagtaagcaataaatacactcttactacctggtattaagcattgtggggctagtacataactacaaccgggtcatacccctactgccggaagcaaggaaatagaatatgcatgtacacagtgttttctgacagcaaaagcattgcttctcccaaccgttgcatgcatgctctgtccttgctacgatttttattaccccatggaccccaccttactgccaactcacagatataagcaatgtggagcacgtctccctctattaccgcctgtcatctgggcccacgctaataccgatgtggatagcaaacattgctgatgcccttaggactagggatgcctcgtacgcggttttgcggttaagggatgcgattggaacttgaggatgcaaatttcccccagttccctgatcaatgatgggctgcttcaagtgggccgagcccatccggcccatacagctccctccctctatcccccttggctggctggcatacacagctacacacggaaacggccgccgaacaaagcgaacaactactagtcgtctcgtcgtgctgcgcactcgccccatcgacgagagatcgcctccgcctcgcacccgccggcgccggcgccgcctcctcctcctcctnctnctnctnctncccgccgtccaccggcgcgcctctttcccgccccgatcggctgccgccgccgcagctgctcgccgcctcgtttccgactcccaaggtgcgccgcgaagccgactccctccccctcgatctcctcccggaacgagccacacacggtctctcgtccttagatatggatcggacgccgcgagttcgtgattggccgccgatttcggtgcgcgcgcgcgcgtcgggttttttagaagccaccgccgccgccgcccgcttttccttttcgtttcccgtggcagtgagcgagctgtgcctacccttttttgtttgggagcaaaaggaagctgaattttcgcaaattttttgccgtaatgcgtccccttttaagtaatactgtttctggctactgtaatttctgcgatttgtcagttagctcgattcccagcttgcgcgatcctcatctgatctctctttctcccaaatcgtcaacctataggagcagtatccaggcattcggatccctcatggcccccgagatctccgctctgatgctagccgcagcttagggggtccgatggctgcctgtgctgctcctccatctacaggccgccttcgatccgcgcttccgcctcgcgaggagcctcgtttcggtggctggatgcagggctgcaggagatctccctctttaagtttcccgcagaatcatgtttccaccggtgcccccaacgatcttttgccctgcaccattacgcgcagcttgtttagccaccaatgcggccgtagccatctcgcagtcatgagggctgaaggttcacattatatattttttatttccatgaaggatgttagcctggagcttatttctataatttctttccataaaaattgtttgttatctatctctggttatttctaatgtctagggacatataagctgtgggtgtggctaatatgtttatcccttgtcatcccagtatcttgacactatccataatacatattatatagatcaaagccattaacctattagtttctggccctttgatttttcattacacttcagtttgctaattctattattatttatatcagggcattcctccatgggtggggcaaatgactcaagtccatcctctaaacttcacacaagactgagactatgggagttcccagaccgctatgtatttgagccgattgatggtcttgctgacttgtatctgtcagctaaccgttctgatggttcaatgaatctagttgaagagttgccaccacgtgactcttctacaaaaccaaaatgtcaaacagtgtatggtgtgataggagttctcaagctttcagttggatcatattttttagtgataacaggccgtgattgtgtgggatcctacttgggacatgcaatttttaaagtgacaggactaaaagttctcccctgcagtaactcacgtagcacttctggcaatcaggtcaagcaatacttatgccttcacagttttatatagcttccatctatttttcaattagtgatttgagtaagctgttggcagagtaaaatggaaacagaattttcagaactcctgcatgctgcagagaagactataggcctgtacttctcatatgatatcaacttaacacttacgtgagtatccttcttgtcaaacatagtcacattctagtgtcttatagtcaaagcttacaacctcttgttgcatacttgcattgaggatttccagcatagtatgcaattctatgcatggggttcttctattttagtagatggcattctctatttatttttacagtccacctgtgctatcatctttcatttaattctcttcttctgtttttggcttattgcaacagcatgcttatctatgtttccttctattgcagtttgcagaggctacataatcttggtgatgagttcaaatcacttccgctttggagacaggtttgctgccttcaccatttggaaccttttagttctagagtttgtttatacccatagggtctgagctttctccattgttcttgtaatccctgatcttttgctgcctatactttactgctgtggtgccaaaagctacttcttgttcacttcatctttagctatcagtttacacatctgatgtagaaatatggacataaactaaaccagtctgatttttaattccaattcccagacacaatttgtaatggttgattattttgacatttatgaaaaagggaaattaattaacaaagaagtcagaagaggttgcatattggccacttgtatttatgtgttttgccatcatggttcaagaaggcgctaggcactagagggtcagcagggcgcgccctaggcgtcacttagctagcatctaggtccaacatgacttgtgaaatccaagcaattagccagcatattacatataaatgttagacagtaggacattaaattagcagctaaaggagcccacatggatggttagccgcccaaggccactcccaatgggagtttcattctcactaaatagagtgccatgtcaatattttttatgatgtggcaaggaattgatgaagagattaagggcctgtttgggggagctttagattctgagaagcagctgtttggtagccagcttctgcgaatctggaaaagctctgaaacccagcttctccagcttctggcttcttagctcatttttcagaatctgtaactacagattctcagaagctgtggactgtttggggcagcttttaggaaaagctgcagctgggacaagctcccccaaacagggcctaagagagaggtggaatgggtttcatcaagatgaaactatgtgtacactatgtccaatatctgttgtctcttgcatttattgcctaggaaacaacaaaatgaaaaaaatgcatcgtatgggctgtttccaccatcaactaagggtatgtttggatgctcaggtaagtttagctatagctcgaatgggcaaactagctcattttagctatgctcatttcaactagctcatttcagctattgctgctcttgcccaagcaccatatttggtttccttgcttttaccccacgttgagaaacggctatcagtttttcccctcacgtatgcacttcttgccgatgagagagagccaattcggttctcatggctgagcaaggtttttcttgcccatcaaggctagcttgtccctcaaagctagcttgtccctcaaagctaggatatttcatcggtaccaaacaccaagcctggctaggctaggctagaaaatctttagccaaggatccaaacacgggggatgctagtgcgcgcgtgcgcgccagggaaaggagccggcgcgtgcgccagctgcgtccctacacgtttcttttttttttctagatctcctattttaacgtcacttttttgtttccttttttaaaccgcttctttttttctagatttttttaatcgcttctttcttttccacactcgcgcatgatttttttgtgatattttataaattcaatctttcaccttcaatatcagttgagagttttgaatttgagttgaaaagtttctaaaatttaagtttaatgttttgaattttgagatgaaagttttcaaattttgtcaaatattttgaattttgaggtgaaagcttttaaatttgagctaaaagttttcaaacctcagttaagttttcaaatcttgacttgaattttttaaatttgaattgaaagtttcaaatctttagttgaaagttttcaagtccgagttgaaagttttcaaatccgagttgaacattttcaaatccaagttgaaagtttttaaatccgagttgaaagttttcaaatctgagttaaaagtttttaaatcttgacttgaaagttttcaaatattgactcctactcttagacgcgtgtggtagttaacggccaaaaaaaaaagaaagaaagaaacacggctgttgcgcctaccgaaaaaaaaggaaaaaaaaagaaaaaagaagcacgcaggcttggtcgtaggaggacccgccatgtggcacgctcgcgacttggagaagtcgcgtgtacgcgcgaattaggattcctgtccaaacgcaccctaaatgttttgttgcttatttggcattcttggaaacataaaactgaaaccttccactagtaatgatctaatgcctaattcaggtggctacctggcacctagagccgatttgtataacactgtttgccatttgagcgcctggaattttatttttgcttctgctgcttctatagtccagtaattgctgcacaattatcttgccatctaggaaaacatagatcccatctaggaacattggagctttaatagcatttgttttaaagacctgtcttgtccccaaaaagtagcatgctgtggcttaagttaaaactttcagtagttaagcatgaaaaatgtaaagagtgctaaatttttacagagtaacatactacagtactttttttccactggggagttaagtactgttgaattaacattttatactgtgaaacatccatcttgcactgtccttttccacaaaggctcaaaatgggtcatatgtgacaataattctgtaaatatctccttttttaatcatataccatatgtattttactttcaagactggggcaattccttattttgaattttaaatttataagctatgccttgaacttgtatacagtagcttcttaaagcaacaacatagtgctgctatgtcaaaagttgctcgtgctaaatgcctaaaagcacaacagattaaacatgtaaacaaaaaattcctgtgccttttcaaatctatattgcacaggtgaaataattacattctttacaggcagaaccaagatttctatggaacagttacttgctggaacctctaattgagaacaaggcaagaattaaatttgaagcttactgatttcatagttttgaagaattaaataactgatacttgcaaaatgtattgattgtttctttcttccttaacagctggaccagtacttgttgccagtcattcaaggcagtatcctttgtttgtcatatgacatttcaatttggtcactgtcagaaatgcaatataataatatattattatttgaacttgagtcaccttccctagggtcatatgtcaatataagtcgcagacacttaactgaatatcaggctttcagaatatccatgcagaagttggatcggagaaggtaaatgtgaccctgattgcacgtaggtgcacacggaggataggtgagaatcatcagtgatcagaataagttcacatgttctcttctgcttattgtcacttgaaaatatttttttatatgtatttgattattttttctaatttttattacatcctggctccttatttttgagaaactcactggcatatgagtagatttaattcagttgatgagtttttttttaactaaaaggtacacgaatgtggagacgtggagctgacccagagggttatgctgccaactttgttgaatcagagcagataatggaatcaaaagggttcacagcatcctatgtacaagtaagtttcttaggatagtttaaaaccaaccaatctgcctttctatcaatttgtgagttgcaatttcatcagtaggttattactattttatttttaccacattctagtaccttgacaaattaatgtgctttt

SEQ ID NO: 4944 - DNA, 18199 bp, Oryza sativa
ccttgccacctgggcccagatgcaaaaagtaccagccaaatgctctttagggctgcgaaaattgcatttagcccagagggcagcaaagggctaaatgcaattttcacagacggcggcggacggcgccgtcgagccgccgtctaccacgtcagcttgccgccctccattagggcggtatggtctatttttgtaatttttttcgccaatagattatttctgtaaatattaaaagaaaaaaattaaaaaatgaaaaaaattcacgcaggttcactggttcagtgaaaaggaaaaaaaaatttcaacatggcctgttctaataacttcgtaaacatacaaaactttcctcgttttcaaactaataaatggttatcttatacgaaaattttctacataaaaattgttttgaaatatcagataaatttatttttctaagtttttaataattaaaacttaattaatcgcgtggctttctcattttgtgtgcccgcttttaatcttcatccttagaagattcgaatggggccttacacaacactttgcgtagttgcgtcggagtatataatatgcatttatttttatataaaagccaaataagattttctatgggggtttttaaggcagaaaatatggttgtaaatgcaagtgtatcccctgacccatcgtcacgaatgaacggttttctcacttttacaatgagatttcctctttttacaaggaggagtgttgcagttttcaacttgaagtagagaaacggatgcttgaatcatgggtttttctaactctgtaaattcttgaagttggagttgttgaggtgagacattaaaaattataatttaacctagaaattctatgattttacaattcaggaattagaagcataccaaaacaataccagggcaattgatcagccctatccctcaatttagcacgcaatttttgttgcacgcaaaacaagaaacctcattagcacataattaattaagtattaactattataaatttaaaaaatatttgtatttactttttaaaacaacttctatatagaaactattttaaaaagcaccaattaacagtttgaaaagtgtgctagcagaaaacgatgaagttgaagtctggagttgaagaatagaatatggccttagttgtaaacgcttaatccataaaaccatgcccctttattttgaaattgaagcatcagactagaatattagaaaatatttctgtctaacattatacttttataaggatatacaaatagggacaagcgtgattttatccatatactgatgtattatgggttgacacctttcaacatcaatatcctacttttttcagttgctacaaatgctctaataagtttatttacaaataatatgtgaagcatcgtacagttctgtttggtgcaaaatacctgtaattattgttggcacatcgcatcaaagaattggtcacttctaaaatactactccatcaaatcaaaccataatgcagtgttttttcaacgaccacttagccatcaaatcaaaccagtaaattcttgttgatgtagtactaaacggtagctccatagtgcagtgttttctacttgatgcacaacaactattctagcctttttaacttttaatgtgagtattagtgcatcgtctaaaagccttaggtatatgaatcatgacccttataaaaaccagaacataacctataaatctacacattttccaggtacacatatatttaaaaaacataaaaaaaaatagaaagaagtatgcatagctcaattggttttgtctcttgtggtgaaaccagcctgtctgagtttaaaccctaaacttgtggtgaaaccagcctgtctgagtttaaaccctaaacttaagtacttaacatgagtttcgtatttatggctaattattcatttagttgtaagcgatatacctatcaatagcgagacatttgtggccggtccaattttccggatgtgctcatagggataggatgtgtgtagagatggcaatggggacccataacccgagacccgacgggtttttactctattaggagctaatcgtgttcttactgttatacccatgggtctactaacgggcgaaaactcttacccattgggtacgtgggtatgggtctgttctttacccacccgtacccaccaacccgtgggtaaaaaaaacccgttgattgaacctaaaactatgagcaatataagtttcaacgactactaaatcatagcataaaacttctttcacatcttaagcattgttctatactagttatgtgaaattattattagatttattgattatgtattgtggttgtataatttttttactcgcctttgaacactaatattaatagcattgttgctagagaaaatattgatagtttagaactctaatatggctaattagagtacaaaactataaatgctacaagtcaattatatgggtatgggtacccgttagatacccgttacccgcatgggtatgggtatggggacgattttgtacccgcgacgggtgtgggtatttaagtaggaatattttaacatcatgggtgtagggctgtgaacgagccaagctcgagcgagtttgactatgtaggcttgagcttgacatgaactcgagccgagctcaagccgagcctgccagcctggatactgatcgagcttgggaatgagctcgagtttaagctcgagcgagcttcgagcctactcgagcttggtagcttaacttggtgaaactccaaagaacttactcttatataagagatattaatgtaaattatcggtagtcaaaattaatgggtgctatttgtcttgaatgaagcctctgcagcttttctcatgaatacatggctttgaaacgttgcaattaacaaaagctagctactacatctaataggaatagtagtactattactagcagccgaataattactttattgataagcattgatggggtcttgagacttgagcaggtcaagcacaatgacaagtatatattggcccatcaaaaatatcttcctacatgcaatgcatattatactaatcaagccttgtcgagctattcgagctcgagcttgctaggcttgcgagcctcagcctacgcttgagcttggcttgtctagtattcgagccgagctcgaatcaagcctgtaacgaatcaaactcgagcagcttgcgagctccaaacttttttgacagccctacgtgggtgtgggtatggggcaagggaacccgatgggtatgcacccgttgccatctctagatgtgtgtccgtattcatatgggtgagtatatatatgtcttgtgtgtgcatgtggatgagtacgcaatgcgagtgtatgcatgtgtactgtgttgctaaaaaattgagaataatttacttttaaaaaagaagaaatggcatcaattttctttttttgaaaaaaaaaaaggaatcgacaacaatacttcagaaccaaggaaggaccgtaacggccgtccgatcaccgccccagccgcggaatccaacggccaaacttccatccatccacccgttgcccacccccaaaactcaaaatcaccgaaacacccttacccccgcacgccccctccctcactgacacgtgggccccacgcctcctctctctctctctccccagatccgcgcctcgaaacattcatctcgtctcgtcgggcgaagaagcccgacttcccacccactctccccgtctccagaagcagcagccgagccgccgccgacgagcggcgatcgccggcggtgggttgggctggcggctagcggcggaatgggggtgccggaggcggtggcgctggagatacctgcggcggcggaggccgaggaggaggttgaggaggaggaggggtcgccttcgcctccggtggtggccagggtgccgccgcggatcaggaggcggctcctcctccggcaccgcgggggagcgccggccaccgcggaggagatcgaggccaagctccgcgatgcggacctccggaggcaggtgggtcgctgtgatctctcggcgcacccggcgcggcgctttcgagatttagttttatggttttttttttcgtgtttctgggtgatttggttgtggttttggtcggtggattaggggcatctgtgcaattcatgtcaatatacgtttcatcaggttggtagttagtgaattgggagtagcattccggagtgcagattttagtcacgtagctggattactgaatggtttgtgttagaagcaattggccatcacatgatttgctgggagttgattatcaaggtaacgctgttcttgatcaaacccgggagccacaatataacttggggtttatctcaaccatgtcaaaatgggagcccagattcattttaggatgattgatatttgaaggcttccaattttgctgtcagcctgtaaaatgggttctacaaacaacaattaaaattggtgttgttgccaagttcatttgaaggactggcagaaaaaagtacgatcactgtggcttgttaactcatgtgtattctattcctccagcaatttcatgaagcgttatcgtgcaaagcgaggtgcacagtcagatacccttcgtgtccatctcaggaggaggatcctaagaagcgccttgaagcaaagcttgtggctgccgagcagaaaaggtaacagaaagagggacctagtcacctagcagagcatatttatctgatcggatattaagatagggaacagtgagaagtgatttctgattgcaggttaagcctcctggctaaggaacaaagtcggcttgctaagttggacgagctgcgtcaggctgctaagaatgatgcggagttgaggttcaagaaggagagggaggaacttggcatgaaagttgaatctagagttcggcaagcggaggagaaacgtacacaactcatgcatgctcgttcgcagaggagggctgcactggaggaaagaacaacaaagtaccttgtgcagagagtggcgtgggaaaacaagtacagggagcgtgtacattcagcgatcctgcagaagcgcactgcagctgagaagagaaggacggggctattggaaggtgagaaaaggagagcccagggtaggttttcacaggtccaacttgctgccaggactttatcttgccagagagaagctgacaggagcaagttaaaagaacaactagaagacaaacttcagagggtattcctttttatgctgcagagttggtataattgttttagtagctctttgacttacattgcaaactatttatgcaaaacaggcaaagcggcagagagctgagtatttgaagcagcgaggaagtactcacagctttacatacaccgcttcagttaaacacggtgattttctttcaagaaatctggcaaggtatggtagacttatacagtcaactttctcgcaattgtttggcttgtgtgtatactttaaattttattgattattctattcgatttgatgcttcagatgctggagaagattcataacatctaggaagacaacagtggtgttggctagggcctttgacatgctaagaataaatgaggaatctgttaagcctatgccatttgaaaaactagctctttgcattgaatctcccacagttcttcagaccacaagggcatttcttgatcgcttggagagtcgttttactttatctcagtcatcaagtccatcatcaccagaaaatattgatcatctgctcaagcatctgggatcaccaaagaggactctatcaaaaagtgggggaagaactagagtgacaccaacaaaggcagctagaaattcagatgttagcaagttacctagatattcaccgaggatagttctttgtgcttacatgatactaggtcacccaagtgttgtttttaatgaacgaggtgagcgagagaaactacttgtggagtcagcagaaaactttgtgaaggaattcgaactgctgattaagacaatacttgatgggtcaagtggtgcatgcatactgaaacagccaatactagatgatctgtctcctggatcttctaattatcaggaatcttctgccgttgttgctgatcggaagaaattcagatctcagttggcttcttttgacaaagcttggtgtgcctatctttaccacttcgtggtgtggaaagcaaaagatgcaaagtcactagaggaagatcttgtcagagctgcatgcaaacttgagctatcaatgatgcaaacatgtaaatttaccgctgaaggccaaccagagaaccttaatgataatttaaaggccatccagaaagaggtatggttatatacctggtgccttttcctttgtttttttcttttacctatttccctgacattagtaattgagaagtattttaagtgcataaaatcccgctattcagctattgcaggaagcagtccattcctacaactttgcacttagtttatttattttgattatagttttcttttgtctagtcaaaactttactatctgttgaaattgtttctgttcatcacccaggttatggtagaccagacacttctaagggagaaggttcggcacttgggtggtgaagctggtattgagcggatggaagttgctttatcagaagcaaggacaaagttttttgaagcaaagggaaacaggagccccttggcaacaactataaaaaatgtagcagctacatgttcttctggagaatctcctatttctgacatgaaggagaattccaacattaatgataaaaggccaagtcaggctgtccaatctatgttcagagttccctcttcaccatctgaaagtaacacagcaggcatcaccatgagtaatccaatgacagtgagcagcactctgtcagaaaaacggccaacagagaacgagcagatggtcaatgagattcttcatggttttctagctgacagctctagtaatattgggactgttgagggtggtttcaaggttagatcctatgttacatttatactaggattatattgtaagttttcatattgctggggtgcagacaataataaccaaaaatgtataacatgagaaagaatttgggaagcttttagaggggctcacatgctgtgatttagggtctagattctattaatgtggtacgtctatcagcttaaatatgaacttttttgcatccagtcactcttttttttctcaggaaaaagtaagggaaacaatggagaaagctttctgggatgtggttgtggattcacttagaggagacatgccagactacagctatctggttcagctggtaaaggaagtcagggatacattgtatgagatggttcctaaaggttggaaagaagaaataatcaacaatattgaccttgaaattttgttgcaggtaagaagagcttgagtgattttatcatgaatctacagaatatatctgataccagttttgttgttttttggttgaaaggtacttgaatcgggcacccaggacatgcaatatttgggacagattttgcagtactctctgggtatgctgcgaaaactatcctctcctgcaaaggaagacgaaatgaagagaagccatgacaaattattgggtgaattaactgaacactctgagtgtaataacagtggttcaaattcatttgtaattgctgttatcaaaggtttgcgcttcaccatggaagaactaaaggtttgtgaactccttgagttcttaaataaacttcatggaatatacattgtgaacctataacagcctccattttttttattttttttgtaaaataaacaggctctgaagacagaagtcagtagagcacgtatccaactattagaaccaattataaagggctcaggtggagtggaatacctgcagaaggcttttgctgatcgctatggattcccgtccaatgcatcagttgctctccgttcaactgctcagtggatttccacatcaaaagataccgtggaagtagaatggaatgagcatgtcagctctttttcagctctgccagaaaccgatcatgttaagtctatgaattaattttatgcagtagtcacagcagtacacaaccgctgtttgtagcaatagtagttcaagtatctattattttcacctgctgttgattttacttacacatccctcgtaacaggctcagccatttgttgccaccctccgatcaggtcatggagttccagatcagcgacagtctacaatacctgtgtcaggtatttattcttttttccccttgtatggccattgttctgaactccttaatcatttagtgtcatgataagcagatgatacggggctaccagagtgcacggggcaaaggcttgaccagctaataaggattgggttgttacagctcatcagtggcatagagggtgtgcaaatgcagtcagtaactgagaccttcaagctcaattggttgaggctgaggtctgtacagagtcaattccagcaagtgattgtaattgcaacaaggtgaaacattactcaattttttcactttattcacttcactgctctgagtatcagcagttagctagaatggtataaccaaacccaattacgcctcttttttttcctcgcagcatgcttgtgcagcgtcaagttttggcgaccgacgacccaaacatcactcccacagagctggaaagcgcgacatcacaactgttcaacactctcgcagagctactggacaacttccccgacgttagcaccgccaagatcatggaggtgatgctccgttcgtcgtcgtcgtcgtcatcaggctcgacaaccggctctccatcagatgaaagaaccgagagcaggaagcagatactggccagggtcttcctcaagagcctccagaccgatgaccccgtcttcaagaaggtctcccggtccgtctactgtgcgttccgcgcgatcaccctcggtggcagcggtgccaggggacggaagctcgccgacgccgccctgaggcgcatcggcgcgacgaagctcaccgaccgggtggtgagatcggccgaaatcctcatcagggccgcgtccatttcacagcaggtccacggcccttggtacaatcacttggtgtgattcatggtggaaaagctagtgaaaacggcgtcgtttgagcaatctgaaccgctaagcgttcgtgtgaagaaccgaagatctcgtcttgtttacttgttagtagtggcaaggcagatggtagattggtacgtgagcaatgccctgctgctttgtgtgaataaataaaagagatggtactgtactatgcttgtatctgaaatcctgaacaatgtgtgcgtgtgtggtggtgttcatacgtgtgatcaaatctatgcttgtatatatacgaaacttaaaaatggtttcatcaatctaccatgtagtgtatacgtgcatatccttcatcagtacatttgaatctttgtgaactgtgatgatacgtatacaagcatcatgtctgaagtcacagacatttctgatcttctcttcttcttctctatctgcagcagcagcagttcaggaggagagctggtcctctgcggcggcggcggcgggggacgccggcgccggcgacgaggcgtcctctgtggcgggcgcgtcgacggcgggctgctgctggagcgcgaccgcggcgagggacggctggaacttggcgacgtagtagctgagcggcgggccggagtagacggtggcctgcggcggcggctggttcttgccgacctggatgaggatggacgacacgccggcgacgaagacgagggcgaggccgccggcgatcgccgccgtgttctccgacccgtccgccgccgcgcccgccgcccccgagctgatggcgctctccgccacgtacaccgtcggcttcgcccacaaccaattcaggtcagaagaaaaataaaaagaagatatttcttgaccacatttaatacgcaggaaaaatccgaaaaatttgaattaatccgattttttttaaaaaaattctataccgcatttaatacgctcgcgaaatttatgggcctgtcggctgcccgggctgcccggcacgaacagaccgatagtttaatcaatccgaaattttgaacaaaacgagatgaaactgaattgaactttcaaaaacaaacctgatactagacacaccttaactagaatgaatttgaacagaggaacatgttcagattcgtgatgttacgatgtggagtactatgtatgtgagtacgtttttttatgggacataggaaaaatacaaaaaaaaagaaagaaagaaaaaggaaaatacctcgacggagtagatgttggtttggccggcggtgtccttctcgacgtagccggtccatcccttcttcttgggagggaaggtgccgaccaccttggtccgctcctccgccagccactccgcgctcaggctccccacctccttctccggcgcgcactcctcctcgttgcagtcctccgccgccggcgccggcggcggaggtgaagaaggcgacggcgacgacgacgacgacgaggcgttgcaggacagcaggaacagcctcccccctcgcgcgaggctcgccgccgccgacgccgcggcctgtggcttggcggcggcgctgctcctcaggaacgcgcagcagctggtggtgctcgccgacagcatcgactgcgccgggcaagccatctcgctgcgcgccctcctctctactctctccggaccaagaagaagaagaagaagaagaagaaggaggaggagaaagggatggcgtggctagctagctagctagttggtggaatggtggagtgagcggccgcagctagcggaggagggagacgagggagccttttatgccgtcgtgtcgcgtcgcgtgcgcggcgaggaggaggaggaggaggagaaagatctgtctggctgtgcgagggagaggatgggattacgtgggtggagcggggcgggggtgtggtgggtggatcctccacgtcgcctcagcttggtctgtgtgtactgtatcaacggccaaccggcaaccggtgaagccgtcaatactcaagacagagaccccaacgtgtctgcctctgtgcgcgccaatgcctggaggctgcccgccactgttcgtgtgcttgcagcttccccggccgtctctcaccggggaggcgtccaaatataatccttttagccactaaaatttatcgtaagagataataatttttcgcctatattttagttttaatcaattgtaacattttacaatttaaagttttttacatgcatccttttcttaaccaataacagcattcctccatttaattctaccaacctttttattatactcgtgtccaacactccgtactagctaaagtgcacctgtatttttgtaaaacacttttattagaaaattatgatgctcgtactatcatgccatgtttagaaaatgggtttggatatgatttcccacccctcaaagggcatgtttgaatcttcatccattcttctcaccccgttttatcctatacctccattcgtttttattttccaaacacaccatcagtgttttcttgcttgatgttccttactgacttctttggttccgaccttaggaggtatatttggatagcttttagatcatgagaaattgtgggtggaaatttgaccggagagaatctgaagaataaacttcttgtttttctcgattatacaactataacttctcacaatctagataaaaaagtagaattgtctacaagagcttccctcggaatcaaaagcaccctatacaggacttgtttttttactttctttccttcgttcaccggtacaaggcaaggcgaaggtttcttatgttaatatttcgcatatgtccctttgtttctaaatataaatatttttaggttgtttagaataaaagaaactttttatccttcattgtcttattggtcaaaacttgaaatttaatgttgagttaattgcggtttggactggatttctttatcaaagttgcataatggactaggtctcatctcatattttcactttaaaccagatggacttacaaattgttgcaatttggacctgattgatgcatgagccacttgatgagctcttctccatgtcctcaaactgaaacatggttgcacgaaggaaggatggagctaggcttgctcatcgtcaaccataaaccgtcgagatggccgcctcaaatcgacgcaagcgcagatccgctcaagcttaggggctatgtggtgcaggagcaatttgacgagatgcgaacaatgcgacggagggtggcacttcaaagtgctctgttagttattgcatgtttgagctttcacatcagcctagcgagctcaaggagagagagagcgcaagggaagagagggaaagatggagaagaagcaaagtgtcccaaagtgaaactatatgtaatctttcccggttcaaactaaaaatgttgtgctgctcctattccaacttgccacatgggtaaaaagaagtggccctatatgcaatttactcttttaagttgcttgattcttctcgtaagcacatgacttgggattctataacatatctcacacttcccttctaatccacctacctctttccatctcaaaactctcctcccctctcactctctccagctaagcttagctttccactttgagcgaccattatcacctctctcatttcactcggccatctatcaatcacactatcttacctcaacttcctcgccctttcttcttctcgttgaaatgcatgtaagctaatgaaaaatgtcctcatgccatcgccagttgaatgatatgctttctccattctaactccattctaaaataagtgggtttatttttatcctcttgtcatttgttcaaaaacaagttaatttctatctttggtccataaatcaatgaatttcattacttcaatactccttaactacccacccatatactttggtctttttctgttaacaagatgcactttattccctctctctccacgttattttgtacacccaaggttaaagttaagagttattttaggatatatggggtatgtaccaacattgtacggcacgcttgtttcaccagtgtctactgttgaccatggattacataacaattgctaaccagaatggcacacatatacaacattttactcgtcttgcgttgtgcagctaccaactagtaccaaattggatttgtccttgccactttttctgaaagtaaaatgtaaacctcaacgtaacatgtcacattgccaatttggcaatttccatagttcacgtaactggggctaatggtaatggtgctatgtgctgcaacaaacttacaaccacatgcatcagtgcatggcctcaaacaccattcagcagttctacatctaacaaggcacatctcaagtgaaaacaatataatgatagagaaatgtatcccctgcgactgataaatccaaaaccggcataacatcagcagcatatcagtttagcaactcatggttcctgaggctaataccatgtttacatgtaagataagttacactgggtatatagctccaaaaactagctctggtagcgctctatcagtccagtgtaaggctgtaaaccaacaggttaattggttttgctacctagtgatgattgctcaaagaacagccatgaggattggctaacaaataacataccacctcatcagaccttcatatatgttcctctgaaaacaaaaccctgtcatcgagtagctagctcagttcccccacctgcggacaagctgtcctcttggctacttagttatccttccatttgttgacatacttcaggaatgacatggatgggttatcccttggttgagcccggacacgtgtggaacggcgcaatacagcctcttcaagcaacaatttgtgtgtgatttcttttgatcgtttctccagagcattactgtgttacagaacaggaaatgattagttgaaaattgattggtgtagtaggaatcaaccaatatatttctaactacttatgatacgaataataaaatatagcaatggtaaacatcatagaattatacatgatagcagaaacaaataaaagtttcgatggtagtcttcttccagaatcaactagcaggtaatttataagagaactcttcaagtatcatcgatgagatgcagtaattattgagtaagaggacagcaaaaccagtatacacagtattcattttgcagaaaaatagtatgtgaagctacaaacaaaaatattatttttcacgttaagaacaagtgtaacgttagcccctttctacaatcaacagaaccaaaagttctaagttgaccaattgtaaggttcagaaagatctatgtaccttatcttactgtacaacttgtccagctgccgtttgagagctctctcccttaaaccttttacgttcagtgagctcattaacacatcgagctgtcattccaaaatatcaaaatatgatcacgactgtagcaacaataaataacaaaaagaaatcaactagagcaaaacagtcacctcttccttagtgctgtagtatccccattcttttgaatctgcactttcaacaaaaagccttccttcacgcctgaaaaaccaatacctgttatagtgtctgtcttttccaagggggctggaacggatggataatttttcaatctctgtttcgaggtgctgtacctacaaaaagtagggagtaagcataataatcaggctcactaccaattgtggtaaacaataacagaacatgggttaaatacagagaaaggtccatcacatgcaagtacatggattgagaacagatgctcaccccatggcgtttcccttctgtcttgcttcgagagatattgttcttatccttttcttctttccccttaccctgctcatcaacactctcattgtcatcttgcaatccatcaatgcttgagttctgctcatcctttgcctttctagtactctctcttttagtcgcagcgagcgcttgccgctggtccacccgttcacttagtttctctcttacaggagaagttgtaatagcttcttctactagttcccggagaatcttaagtttgatatcagtatcaataagactataataaccctttcttactgttgcaatgtttctggtgagttcttcagtttttgtcatttccaagaaatcacagagatattcagcccatgttactaaagtcacctgataaggaaataaaaaagggattaagaaacggtttcatcaatggagaaagagggagatcgagaaatgggcatgagaaaacctttagcttccgtttcttggtccgcagaatagtgaaatagtcaccttcatccttaataagcaagtggaatatagctgtatgtatttccacaagaagtgcattgctttctttgtggcaaattgcattctccaaatctaccagtgaaaatggggatagattcagaaccctcccgaaggacaagcagaagtcccataccataaggagatcgcccacagaatattttggtactctaaaatctgtagccagaggaggtctcttcaataaagcatgatcatctgcagaaggttgtactaagagatcatctattgggtacttaattggaacatttatgtgttcctcatctgcaaatcataccaaaaaaaaatcgataagtatcttggaagaatgccatagccaaaaggctgctaacagaacaattgcaacaaaggtgccagattcagatgaatcaccgttcttcatcttttttttgggatctcccataggtccatcctcacgtcttttcctccctttcttttgcaaaccttcaccaaactagacaaagaaagcaagtgttagtattgtaacatacccaaggaaataaaggacagatgaaaggggcacataaccaactcaccatcatgtcattcgggggctcaatgggtatgccatatcttttggcaagattttcatgtataacccatggggcattttgagaagttgcatctctaataaaaatcttcagcgtattcctactaacaggtggcctccggtgaatcaagtcttcacctttgatcactgacgtactgatgatagtcttgtccctaagaagccaaccaacttcatacatcttggtgccatcagaccctaaaatcttcaaaatcctgcaagcagcctctaaaccatcctgtttagcatataattctaatccttcaaatacagcttcctgcaggctagcatatatcttctcaacaagctcatataatccaagagtgcctgaaacaaaaggtaaaatgaagtattatttccaatctaattaagtgaaacgtacaaatgagaagcaatctatgatgcttcttgaatgaagcgcatatagtaggaaaaaggtacatggatactttagaattgcaaagcataacagtaagcatgcatgcctatttattacaggttgtcatgtcagcagcttagcagtccaagcagagaattcagagctataccttaatatcagtaaacatcaaaaccagatcactaatgcaaaagatacttagattagaaagaggttggtatactgtactctcttctagatattgttttagaacacatgcaataaaactattggaatattgataaagaaggtaagattgtcacactagaaataattactgatcattacaagttttactaacatataattagataagttatgatagtggaaattatgtcgctgaaactaataagtagaaaagaacggtaaaggatatacaaaagttcaaacaattaaaagaccaacagtttcacatgccctttttttaaaaaaagcaaattgagtattagtatgtctagtagctttgtctacagggaaaaaatgtaagaactgagaaatgttagaataacaaagaagaaaacaactgtaaccaatatactatcaagatccaggagcacaacggaatttcataaatattacatactgtattgaatcatccgaagaacaggagccatcagttctgtgggtaatttctgagcctttgacactgcatgatgctcggagaccaaagcttcttcaaaagtcaagtttgattttccggatatcttacatgaccaaaccctttgccgataaagattcaacctgtttatgtagtctctaattgagttgttaaggacacaagcattggagaaatattagtgcacatactgcactgcaaatgcaaaaggcatgaattcctgcaatgccacaattcagctgcattggcgtcatgaaagaggatactggtaatctcggaatatctcccttgtgaaccgaatttggaaaaccttctccttagaatccaagtccttggggggctcaagtaaggagaaaggtttcctcttgaaaagaggcattggacctccgatccaacctacataatagcaacgcacacggtttacatttaaatagttaaagagttaaccatgtgaactggataaagaatctataatactgccaagaacaattaggcaacagtgcatgaatatttagatgatcacgccacattttgcgaggcagagaggggaaaagaccagtctcaagccgcgcagatatgcaaaatgtgatgtaccaatcatccaagcaggaaattcagaacccagaacaacagattagcccattcgaatccaaccggccaatttccgatgtgcgaatcagcaaccatagcatttcacttaaatacatgatgagtcgcacaagctcaggctgctctttctctcacgcatttgcccccaaaatgtgcaacgcaaagcattcctgaccactcagctcacgaaaatggacccccgtgctccagaatccagcattcggaaatcctcgcatcgctcaaaatccccccattctctcaccccccccccccaccacaagaaatcccctcacccaagccgccttcagaatccagacaacaatcccctcgccggcgcccaccactgtgaaacctcccgctcccgtcctggcatcgctcgagggtggcgtgaacccgaccacctgaccccgcgtttgaaccaaccacgaacccccccaaccacagtttggtcgaggaaaccaaaacaacaggaaaaactagggcttcccgatctcaccgacgacaggtcatgcagggcgggggcacaacgccacactgtaccgtaccgcaccggaacaagcgtgggggtccccgggaagccctccaagcgcccccggcgccgccgaagacaaccgatctgccccggttgccccaagcgtttgg

SEQ ID NO: 4945 - DNA, 27124 bp, Oryza sativa
tttaatttgctttcaggaactactaacccactagcttacatctcggccgctgagccccttaacgggaacaactatggctcatgccgagagaagatagagatagcacttgcgctgacatagctctcaccgagcctcgccccactgagcttgttactccagtgagggcagaaggtgagagtgaaggtgactttaaacagaggatgctagaccatgcggcaataagattgaagtatgatgttgatcgtgcgaagtgggagtcatcaaaccgcaagtgcttgatggtgattaagagctccattgtggaggcaataaggggagcaatcccagcttgtaccacccactgagtaccttcagagagtggagaatcaatttactggttcttcaaaggcctatgccagcaccctcattaagagcttagtaaccatgaagtacactggcagaggggttagagagcacattttgaagatgagtgatatcacttcaaagctcaagaagatggacttggtgctccctgataagtttctagttcaccttatttttgcctccttgccttcagattttgaggcttttgttgtcaactacaactcacagccagaaaactgggacattgagaagctcattgccatatgtgtgcaagaagaggatagacccaaggctcgtggtgattccgccaactatgtgaagcacaacaagaagaggaacaactacaaccagaatgttgcctctcctaaggcacaaggaaaggcaccacaaagtgatccacatccacgaccaagcaatgtagaagtggacaaggacacttgcaagtggtgcaagaagaaggggcactattagaaagattgccctgatttcctaaagcatctcataaagaaaggtgaggacattattacatttgaagatgaatcactgtacataagttatttaaaatccacttggtgggttgattcaggtgcgatcattcatgttgcaaattcattacagcgattccatatgaggaggatgctaacaagaggagaaagatgcattagagtggcaaatggagtcgaggctgaagttgaagcaattggagaacatccattagaattgaataatagcttcacacttcatttgcacaatgttctctatgtaccctttttgagtagaaatttggtttatgtttcatgtttagcggatgatggatataattgctttttcgatcaacaattatgttcaattatattcaagaataagtgtgtgggtcttgccatataacaaggccagctttatatgttgcctaaacatgagaatgagaatgttgtatgcaatggagagaatgttgcgtgcaatagtatgtcttccccgtctacgaatgtaagaaataagcgcaaacgatgcaatgacgaaacatctgcgaaattgtggcactgtcatttaggccacatttcgaaggggataattgaacgattaattaaagaagaaattttgtatccgttagactttatggattccgaatattgcatcgattgtattaaaggaaagtatgttaaacaaataaagaaaggagccatacgaagtctaggatccatggcttacgggaaagcctatgatccttggcttaaaagggcctagtgtttatttcgaaatagggaggtattgtagttgttgcgtctgatggctcagtggtgactgtcatgatgaagcgtgctctatacatcaatctatttagaagtgaatattgagtatgagaagtaagaaaggcggagatcaaaggggagaatgttagttgcaatctcctggggaatcaggaaaccgattccccactccgcactcacacgccctgatctggggcgccagccgtacgatggctgtggtccctctcacgcagtgccaaataaaaaggggggagtggccggcacactaaaagaaacgtttgacggcgcacacgcactccccacaaaaccctagaaccctccgatccgggaaggcgttgaagtggggggattcctcacagccgcaccaccaccaccgccatcgtccacaccgacgccgccacaccgtcgccatggccgcatcaagctcaaagaccgacgccggtatgtctctctctctccccttccccgttcactccctaagtcaatcatctttatctccatgaggtagttcaacccctagatccgcaccgaatgatattagaatcctaacaacagttgcccattacggtgtgcacagtcaagttatctagcttacgccttgacattatggacctgtactttccactggaagggctgtaacagtgcttcctaatgtgcttgagggcaatgcatcaactacctgagtgtttaaagttaattagctgcaacaatcattggccattgtcctcttgttgcgaagaaatttggtggtttggcctctttatcgtggaatcgtgtgctgcaacaagaaccatgaatactggcaaccacttgaaatgatggacaataaaatcgattgcagagatggagtatcaatggcaccatcaagaaccatccacacaattggcagcctatatgcacctcatggcatagggtccttgagcagcaatcagcaagaatccagtaaaaacaattaggagttgaggacaaggaaacacaggccccgcatgagcaggggccattgccagagcctctgaactggtatttctttgttaaggacagccatattgctgcttactccatggtatatgtggtgttatatcaagtccgatactggttactgatcacgaatttttgaaacctaagttcaagataaacctctacacctcccatttccaaatctgaatgtatttggctatttgcaattccgttatagctggtgctacagggcaatactgtcatgttgggaagagatcatggtgttgcaaagatttggccacgccactcgcaatgatgtggagcatggcagcacacgattgccatgccaccttgtgtggtgtaggaagaaggttcatttagaaaaggatacccccgtaactttattttagaaaaatgatttcaaaaggtatagaaataatttcttacaataaaagaagggcaagaacacattggcatgaaaataaaaaggttacatgtgaaagagaactcaccgccataggtaaattttgatagcagttcagcttcagttgccctcttcaaaggataaatgaaaccaatcaaatttatatcaataacgattacttatagggtcagaaaaacaagcaacactatggaactatgaccttgccctcataacatggaaaaacttaccttgccctcataataaccttgcaacaagtagttcacaaaaccaaagtccgctgctgacacatacacaaatctcttaatacctgcaggtagagcatgatgtggaagcagttaagtcccaaccaaaaataatgtgcatcagcatagacttaattttactttgccatatcatatgaaataattgatcaaaaatgaaagatttggagtgattcctgccttcggcctaagcaagcaccgggcagtatatgcaactctagtgactagatgtcatgcatcgtcactgtccaagcagtccaagctacagtacatggctgaatggtacctctccactttttgtgtacgacagacaagcccaatatgcaaggaagtaaagtgcatgtttctagataattattcttccagagataactttgtgaagtactagtaagaaattgtatttatttatttttttggaaattatgacacaagagttagtattctgacatttacccttttgctttaattgatctgatcataagaactacacactatactgactaaaggagattacaaactagtggggagaatcatatcaatacatgtgaaaaagagcatattgatgaattgacagaaactgcaaacataacatagaaaatgaatatggtgctgcaacaatatgttctcaaacataaatacctttctcagctgcaacactgatggcattgatgtttgcagttccattaattttgtacatgtaagaatttgagccaaagcctccaacacatgatacctatagcaatttctctcatatgagtaatgtttcaagattcataaattcatgttagcataaagcagttactacttatatgttataccttattagagtatcggtgcataataaatttaaaaggtatcaacggtgttccagggatgatgataaaaggtttaacacgaagtggaaatatttccatcatactaattaatccagtgctcatagaacctagatagtatgacccaataatccaaaattatctgcaggcaagggaagtggcagggatggatttgaaaacctaagtgataacaatttaaaaagatggcctgtaaaaaaccatttccacctagatcaaccaagagttatgagcaatttgagccaagggagtgcaacggatggagcttggaaactaaatgatattaattgagaaggatggattttagaaactaaaagatattaacctacaagactgtacagatccaccagatactcattggtgccgacatgtatggagtaaaggcatcagatacctcttggtagtttcaagtctagtagtctaatgaatggtacctttaattagatttccatgacaataacagcagaaaacagtcataataatgcgcatacaaaataacaaaaaccctaaccccaacccaatcactaataaggatttgaacaaagaaggtagcaataagttagtatttgatgcttgaggtgcccaatatatcatttcagaatcatatattaacttagtacaatatcctgcagttgtttcggcatcatgtaaagaccagacaagtgagtctgtttcaactttcaagagacttgccaaagatccaggaaagtacaagggtaaaaaaaaaaaaaaaagaggaaagcataaatgcaagaatgcagttttcagtacaaaaatgtgcaccaagttaacaaattcgaaaataaaagtgtaaacataccacagcagaaacaccttccataatatccttcagggaatcaggttcaagtagattgcctgcccaataaaagagacattaagcaacataatcatttataagcacaataaatttatctcactagcaaataacctttgttccatataactttgtcagcccaagattcacttattgatggctttccagatctgttaaagtcaaaaatcaagagaatggtaagtcattgattgaaaataaagattgatgattttgaagtatataaagtctgatatttgtttgtctgataatacatcagatgtgtcaataaggaaattatgaattcaataaagcttcaattatctaaaaataataaaaatttaggaaattcaatgcaagactacagctactgaacagcaataagtacattcataaattacatgagtattgctctcagaatacaccattgacacccccttgaaaacactcacagaagaataagatgaaaaagaaaagatcaaactaactctgattatatttttacattgttaacaaacttctagaatcgaaatctaatatgagtagaaacagcttcacacagttctgttcagtgaccacaatagaggaacaaaaggagaatgagagtctcccatgaattttttctaaagctaaaggcatcaacacaaacttaagagaaccatataaagttatctacagttagattagaggattcagagtatccattgctcttccatatcagatatcagggcaaaaacgtgtttaagtttcaatagacatacagcctctgtagcaatagtttatttatgattttggctagttacaaaaaaaaataaaaaaatatatctcaaaatcaaacagtctgacaacaaaatgagaatgaacatgtcaacagatacagcttacagaaatacctattaagactagcaacagtaaatcctttgtccaaagcctccttgcaaacatgtgaaccaacaaaaccatttccacctagcacaagaagctatgtcgacatatatgtcagtagcaattcagtaatcttcaccaaatggaaagcataaagaataactccatagaaaaatgtacataatttatctaaaagctcgaataacacgtagttagctgttaatattaaacaatacatttccaaaaatatattaattgctgttaaacctgcaggaacaccattcaaaacagaatacttgttataatatttttatcggtctgtaatatattgctcaggataatgaagataagaaaacattggaaataggctaagcacttgtctacatgaatattttagttatatatgacctttctgttggaaatgaagaattgctttcccttgaagataagcacactatagagatttaaatatcataaagcaggatgtatccgtgacatattcagggaaatattttgggaaatgcttaatgcaaaaacacaatatgctgcacaaagggaaaaaagaggtttccatatcaaatcaatctgaagatctggtaaaataacattgtcggtgtagtgaacttacagggcttatgtagataacatttcaagtctaactgtttcaacattgagagcaatgacaatgaaatagttccgataaaacagcacaaaagaaaggcgagatgaaagaaaagggaatatgttagcattcgaatcaaactagcacgtttatgtttcctctaatgcattttcagttcgaaggactacatcgagattatcgaattcattttgcaacttttcagttacgtaactgatggctgcactggatatctccccaacagccaacatgtccattctatgacaataatctacatcagatacaaccgcataaaccaaaattcatcccgctgatagtttaaaatgaatacactaggtcactagcccactatgatagattgctcattcagaaaaaaaaaaaagaaagggaacaatgcaccttataatatatgggtaagaaaaggataaaacgactgctaccaagaatgactgccaaacaagctaaacacaagaaaaagtcttaaactagtgcattttacgcaaactagtaataatcacattaattataattaccttgtccggggaaggcggtggcaccttcacggtttctgcttcctccaccttgaaaggctcctccacacgcttggaagcatcctcgctcaagaaagccttcccattattgttctttaacaagtttgcggcgctgttggcatcatcggtcacacaaggtagaacagaacaccactaatttagcatcataataaaatccacaataatcataacaaaatccccctattgtggtggataagccaacgaggaggtaaatgcggctcctaattccccatcctaacgaagcacgcgcacctttgcacgccatctcatctcatctcatctgaatttaagggtttattgtttatctcttcccaaaaacttgggggatgtttcgacggcgggcgcgcgcggggaggggctcacctgagacgggagggcgagactacgggggacgaggaacggatcaggcgggtcatggccgacctcatcgccgccgacgatgccgccgccgccgccgtactactcctttcctcgcgatctatcgagagcggaagcaaagaatacgcacgcgacgcgaatggtctttttttcctcttgcgagtttgtttgtaggcgagaaaaaggtgaaaagcggtggcagatggcaccgctacgtgttaaggctggcaggctgccacgtgatagggttggcaatggggcgggccgggtgcggccctggccctggccccgcttttctacgggctcgctcggccctagtccagcacaaagaacaatctcgcaccggccctagcccccgcaggactcgtcaccggatcggggcctcacacgaggtgactcttgtctccgagaatgtgaacggcgactagcgctcccgacgtgggtggtggcatgggaatagcgactagcgccaatggcacgattggagaagaggatggtaggtggtgcatcgttgtagcagacagttgaggaatcgccaaagctacagcgacaataacaatgtggattggatggagtcgtaggagcggttaagcggagagacatgatgagaacatattgtgtgtttctcaatgcatcttcctctattaggtttattgaacagtttttagaaagaaaaaatctcaattctcctctcacctctatttatctatgaaaatcatatgtggcacctattctcattcttatgccattatttatgctcttacttatctcaattgaaacatgactatatgggaaggcatatatggttcacatgcatacaaacaaaacgaataccttatcccctctcccacatgttcccctcgctcccatggcatcacagcaccactacccttatagtgcctttgcttaatgccacaagtaaaaaccacgcccttatctattttcctcctccaacgagctctccactcctactctgttcctattttcccaggagtagatggtacgtacaatggtgaggcaaggtgggcttggttgaggtcacgagtgaggcgatgattaggctggtggcgacaactccaatgtgcatgaggggccttcttcatcctccctgacaaggcaacgcgtggccaaaatctcatttttcttcctcccctaattatgtgtcgggccactagtgagtggtggttagaagtttatgatttgaaatagaaaggttcacatatccggttggaaaaaaaaatctatttttgagcaaacaattccaaagattgttgaaagttaatgattttgaatagaaagttttggcgttttttagttcatttgaaatttcatgtgcacaactttctatattgacaagttctttttatgtataaagcttatagactgaaagttcatatgtacaaaaaaagtttataaatcaaaagttcctcaatgtattacatttatacattggaagtttatgtaaagtttatagattgaaaacctctggattgaactcgaacatccatctattccatgcataaataaataccaggaaaggtgtttaggtgcgtcaaaaagagaggacaaccaattggcactccgagcacatgtgactgaacgttcactcattagggtttttgatagctccaagcttccactaacaagcgaaataggttttttgccacttatttgcaaggcggaagtaaatggcttcgctctataattaagtggggtattatccttatatatttttgtattttttaaacgtggtctatttatataaaaaagatgaaaaggataactacaatagaagacaaaaaaatactttagtagtaaacatttctagaactaaatacataggagaaaatggttgtatgttaataccagaaccattatgtgggaacaaaattttcttactgctttgaaaccgagaacttcgtataaaccacaatattaaccacaatattaagtaccacaattgatggggtcgccgaacaactttggcgtcagaatcttcacgcacactaagggggtgtttagattcataggtgtaaaattttggcgtgttacatcgtatatactgacacatatttgaaatattaaacgtaaactaatcacaaaacaaattacatattccgcctgtaaactattagatgaagttattaaacataattaatccgtcattagcaaatatttaatatagcatcacattgtcaaatcatagagcaattagacttaaaaaattcgtcttgcaaattagtcacaatctatacaattaattattttttaaaacttatatttaatattccatacatgtgtccaaacattcgacgtgagggtgaaaaattttatcaggtgatcagccctaatagaaaggccagcaatgaatggattttgtgctacactcggtacgacttcgaatatttctatgtaaattatcctttccaattcctattatttggcatgaacgtctccaagattactctttctaccattttatttcgtgtctaaccggagtgttttgtcgaatagtttgcaagaattgaggaatgtgcctctgtttgaaagcgtcggaaatgggtgtgtgcgcaggaaatcagttcagacatttgtcatccaggcttatcaagccttccctggctgcttcgatcaattcattcagccaattcgtcagaattgtcacccagcctcttactaaaattcctgcaaaatactgaactcatactacaaattcaggtcctaacattcaggtattatgctaaattcatactaaaattcagttaaaggatgtgtttagttcctaaaagaagttgaaagtttgaaaaaaattgggagtttggaaaaaaaaagttgaaaattcatgtgtaggaaagtttttttatgtgatatgatgtgatgaaaagttaagaatagtgggatactaaacatggcctaagttctaaatactagtaaaattaaatccaggagaggtcctagtccacatgttaaatccaggagaggtcctagttcacacgcaggttcttcacgttgataggaatcatttggcaaagtagccaggtatgaggtatcccccgaatctgctttaggcgatgactgcttttggcaatgacaactgttctgtaattgtttggcaatgacaactattctgtaattattcattaaagttcgcaattatttcacaggttgtatttagcagttttataccatgcaccagaaaaggataaattcagacattacacgcagctaccggactgaaacgaaaccaaaaagaaactgttttagaatggaggatttgtgggacaaagaaccatcagcggcaattagatttgacctcaaggaaatattcagtccgcatcatggttggatcgccaaatggcaaacccacatcatttggttcttcccattatttttatccacaatgcacaaaacagaaaatgcaggagaacaggaaaacaatcgtccctgctcatccaagaacaagagaacaagaaacagaaaaggcagcaattttgtttcttcaggtgaatgagatgaacaggctcagattgataatgggtagtaagtctgcttgtcagcaagaacaggagagagatctctcccgagttcagagtggtgcatgactagttcctcatcatcgccatctcgaatctcgatccaagaaaaacaacatccacaaattgaaaggaaaagaaaaacagccaagcaggatgaatcgaaaaccccccaagaacccaaaaccagacgagacgcgagatcgaatcaaaccgcaggaagcgtaagaacgagagggatcctcggatccacgaagcggaggagggagagggggagagattcgtcgcggcggcggaggcatcgcaggaggggttcgactatttatgggcaaatcctcctctagctagggtttccttctcctaattcggaccgacgagaggctgacaggcctggcccaacaacccgagcctttctcagctagctttgcccggcccggttgcaggagatgggccgagctatacaaatggcccatgtgccaagcccatctagcccatgattcccttttattattatttttttttgaaaaaagagggagcccacgccaaccatgtgggactgacacgtgagcctagctactcgttaagagaatttaggcggtcttcggcaccatttttcccaacctccaggcgtgtacgtttttcaaacggcaaaatagtgtgttttttgcaaaaaaaaaaaaaacttctatacgaaagttactttaaaaaaattaaattaatccatttcaaaaaaatagctaatacttaattaattacgcattaatagactgttccgttttccatgattaccggttgggaaccagcatgcccgaacacagccttaagccggtttggacgcatatgcccttctcctcccttcttccttcagcattgcgtgagtttctttgtttttttgaaagctatttatataataggctttttgtttgatcttttcttttcctcctaggtcaaggtgttctagttcttatccaattaattatttattgtgtttaatttcaaagtaatatattaggccaacacacattagatgatgacgctaacgtatacgtcgtacttgtagtgttggttataaatatttttttctcctaccttcttactaagaacaactttgggtttgttcgggggtccagtctgcggcaacgctgtgactgggttgtagcagtaaaagacaaaaaaaaaagttcatgctggttttctgctgcagcccgcccagccgcaaggtagccgaacggagccttttgcatccaaagctatgggttttttttgtgccatttaaaggccatcatcggtcatattactatatacctccaatcacttgccataagatgccaattgatgaagtgaaagagagaagtgaggagagagagaagaatgcacccattatgaagggacaagatctatataaactctaatataattatgagagtattagagttatttggatttatatgttagagataactatttatgtgttgttgtctcttagtctataagtagatgagataaataaaattagatgtagtagtcatggtaacatggtgttcatctatatatgatcttcgatatggtataaaagtttgagtactcatacactatggattttcattgttgttaatataaattatatatttatgtataaataactatgaaaataaaaggtttatatataggtaccacacaaaatggaggttttcatataggttttgataatgcctccattttgcatgagaaataaatgttagataaaatagattatcccttatttatcaaattccaatgcaattatttcttattttatctactctcaatgcatttattttctactctcacaaacttcaatttaataactacttaaaaataaacttattttgggagaaactggataagctaaaaatgaactcgtttcaggaaggagggagtatatttttagcatcacatttttttaatttctttttacgttgtaaattgtaagtagttatattgtaattacaccatacttactacaaattttaataggtgtaattctttaattactttgttatatgagatatggaactaaaaaataattataattgtgtagtagtatcagtatcctaagattgggtttttttttaatacggagggagtagttatactatctatgcagattaacaaataaagtaaaaaaacaaaagcaaaaacaggagagagaggccaaggcgcccggcccgtgcacacgatgttcaatcaagggcatttgaaccgttaagatctgactagtcccaaaatgtagcgacacctttttagcaaatccatttgatcaaatagactaatttaaagctgatgacatcaattattgttttcacacagagctaacgctgacgatgagaacgcgtccattgaatcttttcagtttctcgacgtcctttctcttaggaaaaatccggcaagcagttacgggttgacccctacagttattagtacaaaatgagactaaagatcattttctacatggagcttattctaaatttccaatctaggcgacaatagaccaacatcagttacccttaggcaggaagatagagctagtactccctccgtttctaaatatttgacgccgttaacttttttaaatatgtttgatcattcgttttatttaaaaaaattaagttattattaattcttttcctatcatttgattcattgttaaacatatttatatgtatacatatagttttacatatttcacagaagtttttgaataaaacgaacggtcaaatatttagaaacggatggagtagctttttatcctcctgaaaagcttacaaagacattgcagccaacaatccaacataagctgaagtttcaccaaacagggttctacttttcctttggaacggaggaattttgttggagaaattttgaagaaaacgaattacttgaaaaatccaataaaattccatgtgtgaaatgtattcattggcatagtgataggtgcatgtgtgcgattttaaccccaagatccccgtgttcagctcttaacacgctcacactgtattcttaattattcgacaccaaaattctccttggttaccaaacgttctcagttgctgtgatataaaatccacatgtgtttgcccttaattgattctccagtagcgtgtttggaactgggaaataacaacatgtgttcccttggttagatggatatcactgtcttggccagattctgacgtcttgttcttggttagttaggaccatccactgatccgtggtgacaaattgacaaactgaccacttctcacgtcaagaaacccccttccttttacttctacgtgtcgctgcaggcaagagatttcagagtaagcagcagcacgcgcgtcagagaaggagaagaggacaggtcaaaggaaagggagcagttgggaacagatgcatgcagaaaaacctgagctatctcttgatttcctgcaccctcaggtaagcaaaagcaaagcgaagcaaaggagttttgaactctttttttttttttgcctacctccatctggaagcaaagtaagacctgttccgttaatcaacatcatgcatgcccacaaaatataatcttttcatgttcatactcaccatacacatacacaacattgtctttctttggccttaaaaaaaattaacatatgccaattgatggtggctatactgttatagtagtgttttttttttttttggataatggaattcaatccggtctctgcatcgaagatgtacacggccacataatagagcaataactctggatagttggtgtttcagagatttccatggaatagtattcttcatgcttcacctaaaacattggatggctcactttggttgcaggtaaccttcaaactattaggcctactggttgaatcgtagtcaaatcaagattcctcctctcttttcttttcttttcttttttctgtcctggtttttgtgtgctgtgctgtgttgtgtctgccttttcaccacattcacttactcgcttatgtagtaaccttctttgtaagcttcattttagcagtttacctaaagcaatttcagattcagtcatcccttgggtgcaaaggcactgcacattttttttgcttcaggtccaaccaaactcttcccagttgatcagttgggtttggtgaacgtcagagcttctcctgcttgtgtatatggtagccaatctacattggaagtacaggaaaagaacctctgtttcttttagttttcttttctgttcatgtctactcttccattcacctgtaccaagaaaatgtcccttgttgatcatacattactgaattatcatccagaatgattgagtagaagtagtatgtagtacagttctgcttgttcttcagttgtgtacatctctgtcagagttgcacaccaactctgtctttgcatataacataagtaaggtcacacctgaagcaaaaggaatgttaagagagtgagtgagatgaaatgaaaacacgcatgcgaccaaaggaagacaaatggaaacaactgaacaacccttattcagacaggactgtgtcttaggtttgtagtaggatttttgggactgattgctccctacatatgcactcacctttttgcaggccaaggattaatatcctgtgaattaaattaatgtgattggttgcgtgcatcttagttatgtagaggttgagaaacgctcaggggtcttccggctagctccacaaggtggtgggctagccggcctaggttcgaagccttacccccttctatttatttgatactagatccttccctaatacctgtgttttcttttttagttatgtagaggttaagagtgttcttagtacggttgtatcaccttgatgtaaattggctaagttcaataaagcttccttatcttaaaaaacaataaattaatgtgatctgttccaaaaactagtgacaaggaccaggtctccaacagttcctgcaggaacttgtcaaacaaggggttgttcttctggtcacagctctcctgccaaatctataagttgctctctctctttgcctaggtttggagctctcatcatcttttgctgtcaagccatgcattccattgcctcctgagaacctccttgataaacatctcatctttctttgtacataaaccctctctgcaagtgtgttgtctcccttgcttcttgctgttcagctgttctatctctcaaaaacagttcaaattttcgactcgatatcgagctaccagagttgatataggaggaagataggaagatttatcaatcttcagagtttacggaaagtggaggtttatcagcaaagttcttcagagagctgggccacctgaagaagggtgattacatactaggattcaatttggagtagtgttttttttttgcataaaaggatgagaggttttgcttgtgctcatcatgcagagaagaggcaccgtcttgacagaactctgtgagtcttttcttccctccagtagttatagcaaacttgcttcctctgcatatttttgctaaatatttagcaaacacagctaaaatctagataaacctggctaaaatttacatatttagaatctcaggttcccagtgaaaacttaatgttatcttcacccgagcatcatgcataacggcgccaatgattccttgagcaccgaacattttgaattccatccatgcatctatccagtatttaatcttgtccatgtaaacttgttttacatcgttgcatattcatcatcgacaatgatacgcttggtgataaatactatgcatgatcttaagtttacctgctatcaagttttaatcctgtttaaatacggttcttagcgtgttttcgtggtcatgttcctgagcccatggaaaaggttacatgaccacgtatgttagcaatgcaaaatggtcgttttgaagtcaatatttgcgagtatttttataacatagagtagttattaactaccaacaaaattgcagttttttccaatcacagtacaaaagtacgtcatcctggtgactttagcagagaaaaattactccctgaagtagttttttttttccaccaatagaaaccagaagtgatgtgcccaacaaaccaatttgaattaatcctcctaatttcgtgtgctctgaaccaagagagcccaattctccaaagtttggcgagctctgctaatcaaaattcctacctttaggtgagctaacagtccaataaaagattaatttatagtaaatcacgtcgtaggaagttacatatatagctagcaacctgcagtttcaccaactccgtttgcaacttctgaagaagaaaaagtcacaatggcgtcacgagttctgaagaagtctctcttcaatctgcatgccaaattgccaatttggatggaagaaaagaaaactgtgttctgaaattaacagaatggtgaaaacaaataggttcatgtaagaatagagtcaaaggtagaaaaaaagaaaaataataaggaacaaagctattagggattaaagcgataatgaagagggaattggcacgatgatggagacgatgactagttgtagatgtaagcctggaccgttgaagcatggaactgactgttcttgatgacttcttacaagaggagatgaagaaagagagccattcctttaaaaaaaacaagaagaaagaaagaaagctatgacacatatgactttctggtcttggtctgaaagtaatagaggagatgttatgaaattggtcgtttgaagaaaagtagaaaatgaccaaatgcagaaatagtgattgctgatcacatattggtaaaagccaaagaaaacttaacacctaagttttttttaaaaaaaaccaacaccttagtaaagactgacaagtaattttagttacaggtaatgatttggtcacaaggggcaatcttgttcagttcaaccatatgatttgtgacctttgttagaacttttgaagccctcaactgcacatgctatcgttttctacatatggtctaaatagttatgcaatattctgaagaaaatcgcaaccggattatgaactaattgtgattatttacccgtgttaatttcagcaacagcctgagcaagaggggatacataggaagctaccactacgagaaggatgccaagtacaggccattcagtgcactgctccctgagggttcaaaccccaagatgctctatgtcaagctcgtcctcatcatcctcatgtgtggctccttcgtcagcctcctcaactcgccatctatccatcacaacgatgatcaccacacagagtaagaaaaaaaaaccatacaaaattcatgtttttattcgcaagatttttttaaaaagcaataagttgtaacaaatatttcttttgaaaagataaaggttacgatcattaccacaaagctaccaaattatgtaacataaaatgtagtaccgtttggtgtcttgtaccaggagataccatatttcacaataaaatgtagcacatctttgtatctcctcaaatattataaaattactctttgaaaaaatgattttaatgtcgttgaggaggtagtgaaatgtaccaattttttaagccaagggtcataaaatccgtcttgcagccccattgtttggctgataagaggaaataacgaaacaacacatttgcaaacgaaaaataatttgtgaataaaatttttatatgcgtgttcttaataatctaaaaacaaaggttgaaaaataaactacgatgggaaaaaaatcccaaaatcaactctaaatttaagcataaacgaaaagatgaggccgttgatacgatggtcagtgattaatcctttgcttcgtctgaacttgaaacgcgcaggtcatcagctggagtgccgagagtgagctacgagccggatgataccaggtacgtgtcggacgtgacggtggactggccaaagatctccaaggcgatgcagctggtcgccggagcggaacacggcggcggcgcgagggtggcgctgctcaacttcgacgacggcgaggtgcagcaatggaggacggcgctgccacagacggccgccgcggtggcgcgcctcgagcgcgccgggagcaacgtgacgtgggagcacctgtacccggagtggatcgacgaggaggagttgtaccacgcgccgacgtgccccgacctgccggagccggcggtggacgccgacggcgacggcgaggaggtggccgtgttcgacgtcgtcgcggtgaagctgccgtgccggcgcgggggtggctggtccaagaacgtggcccggctgcacctgcagctcgccgcggcgcgcctcgccgccacgcgcgggcgcggcggcgccgccgcgcacgtgctcgtggtgagcgcgagccggtgcttcccgatcccgaacctgttccggtgcagggacgaggtggcgccgcgcgacggcgacgtgtggctgtaccggccggacgccgacgcgctccgccgggatctcgccctccccgtcggctcctgcaggctcgccatgccgttcagcgcgctggcggcgccgcacgtcgcggcggcgtcggcgccgccgccgcggcgggaggcgtacgcgacgatcctccactcggaggagctgtacgcgtgcggcgcgctagtggcggcgcagagcatccggatggcctccgcctccggggcgccgtcggagccggagcgcgacatggtggcgctcgtggacgagacgatcagcgcgcgccaccgcggcgcgctggaggcggccgggtggaaggtgcgcgcgatccggcgcgtccgcaacccgcgcgcggcggcggacgcgtacaacgagtggaactacagcaagttctggctgtggtcgctgacggagtacgaccgcgtcgtcttcctcgacgccgacctgctggtgcagcgccccatgtcccgctcttcgccatgcccgaggtgagcgcgacggcgaaccacggcacgctgttcaactccggcgtgatggtggtggagccgtgcggctgcacgctccgcctgctcatggaccacatcgccgacatcgactcctacaacggcggcgaccaggggtacctcaacgaggtcttctcgtggtggcaccgcctcccgtcgcacgccaacttcatgaagcacttctgggagggggactccggcgagcggctcgccgccgccaggcgcgccgtgctcgccgcggagcccgccgtggccctcgccgtccacttcgtcgggatgaagccgtggttctgcttccgcgactacgactgcaactggaactcgccgcagctcaggcagttcgccagcgacgaggcgcacgcgcggtggtggcgcgcgcacgacgccatgccggcggcgctccaggggttctgcctgctcgacgagcgccagaaggcgctgctccggtgggacgccgccgaggcgagggcggccaacttctccgacggccactggagggtccccatcgccgaccctcgccggaacatctgcgccaccgccgccggcgacggcgaggcggcggcggcgtgcgtcgagagggagatcgagaacaggcgggtggaagggaatagggtgaccacgtcgtacgccaagctcatcgacaacttctgacgtgggtgcatccggagccgttggattttgagatcggacggtgagatcgaggccgttagggatgggtgacgtgttcaccaatttttggtctctcgtgcattgcattgctatgcaatgcaagcgtgccaccggggatgttgcgtggtagcgtatggccgaaatttctttattacaatgatgagaaaagtagctgtgaataatttaggtatttgctttcgtaaaatacttagaatttttttgaagagtctatgttttccaaccgtaacattgcaaatatgtcatgtttgctatgttaatcctttaaatatgatgatactagtgcataacaacaaaattcattttaaaaatggattgtcataaatcattgacacatggagccttaggttagtttcttcgtttctcatgctcactcggtcacttccttagttccttacatgtccaagcaaaaattcacgcttagcttgcccttttgtatataccactcacatccttacatgggctcttttttattgatcaaatatacattgtaatgtgtgtttttttagaaaaaaaagaacaccttacttacatgggccttcttttggttctagataaaagaaacaccttcctttccagaggagttatgtgcacatgatttcgtcgaaatgcaaatcttacactattacaaaataattttcgtggctcttggtattatttttcactgacagaccaaaaggaataatatctatgaaaacgtttgaggccgtcttggggtaacaaaccacgaaaacctattttccgggtgggtccttaaggaaaatcgcatgtgaaaatatatctaatttcgtatgcggttttcctaaagagccatatgtgcaaatcatgaatttatgaggtggtttgttaagaaaatgaccacatgtaaaaatggggtaatttttaccggcgattctcttagaaaaaatacatgtaaaaaatacaatttcatgggcgattctcttaatgaaccacccttagaaatatgagcactactatttcaaaaaaaataaaacgcacccttccatataaaatcagatgacaacgaactctatatgaaacttagagcatcctcattgtctaaacccctccaacggtactaaccaagtctacatagaaataaaggctgagagatactctccccgtccaaaaaaatataagggattttggatgaatgagataattttaacccttatattttagacagatggagtttacgtgcagtgtgtaaagagtacttcaacactatagtgggaccacaaccatgtagaatttatgtttctctctcccgtattggctcttggccaactgttgctgccatttttgtaaaatgtgatatttattttatttggagtgttcgctcccatgggaagagtcgatttgctatatgcttggaagagacatgttgcctgcaatgtgtagtgccgcgaaaatattcctttaggccatgttcggttatacaaggatttaatccggaccgggaatgataagtatagtaagaaatttatgatagatacaacgagagaccgggattcattctgggccgggaaccaatttactcatgatagggacaataagagactggaaatcaatccactagtcaagaggtgtggaactaatctggatgttttgttgtacctaatatgagtaaactggttcccgacccgaaataaatcccggtctcttattgtatctattataaatttcttgttatacctatcattcccggcctggaacgaatccttgtgtaaccgaacaaggccttagtgtctcccttataaccctcgacgggatctacaactaatctggacctatgcttttacatgccataagaagcccaagagaagaaataccactcctacatactccctctgtcacgtaaaaattcaatttaatactgaatgtgacatatcctaatacaacgaatctagacatactcactccatcccaatatattaaaacctaggaccagataggacatttcctagtactacgaatccggatgggacatctagtactatatttggcttttttgaaccgatggagtatattataccataaaataataagatgtttagagtcgtgcatgctactatcagagtaaaaggccaaaatgcggtgacaattggcaaccgcctcgtcaaggccagacgcccgggccgttccctccctctgctacagcccaatcagcccatgtacggcttgttcagatcatgcatggacgctgcttgttgacttcatattgtcattgcacacaaattttgacaatttgaccttttgaaaaaactaattttacaaataaaccgacgccaaaacttatttcaaaattgacccttttgttcagcgccaaatcatctggcgctaaacttagacacttcagcgtcacgtcaactgacgctgaatgccgtgccaccgtggatggatggaaggctaagtcagcgtaccaacgcacattcagcgccacgctatttggcgctgaggtatctaagttcagcgctacacgatttggcgctgaacaaaatggtcatttttgaaatactccctccatctacttttgatagtcatatttcatttttcatacaaaccaaggataattaattctacttatcatccatttaaacatgttactagtcattcctcataaacaagcgatttattaatatttacatttctcgatgcccatgcagccaatcttgtgtggaagaatatagagttacacattaaatccgagaaagtcattaagaggataagttgttggattgaaatatgcctatcaaaaataattttttcagatttgaaaatatgactatcaaaaatatatggagggagtaagttttagcaacggtttatttttaaaaatagttttttttaaagagttaaattgttaaaatttgtggtcattgcagggaagagatttttcatttgtgagaattccaaacatgtgtgtaattaattccagccggtttactcgttcagtcttccactctccattctaccaccatacgttagcatcaaacttactggtagtactgatatatagcatatactactatccttctattgtatacttcgtttgttaaaaagaaaatctcattacgaatatagatatagactatatttatatcaaagttggatttttctttaataaaacggaggatgtatcagtgtatgtcgttgtctgcaacaagctcgattcagagttaaggaagagaaaaacataccttcatcctgaaatataatgatgttaaaaagaaacgtgcaattaagaccagtaaattgactagagcaaccaacacagttgtcatcagtacagataattgacgtgacatcagcgatgacgccgccaaactgcgcttctctcaaatgccacgaaattttcaggcagacaaaactcaaaagtacgtagcgtgtagagtactttcgtcttttctgttcctgttactagtaccaggcgctgtttatttcagcgcaaagtttagattttggttgaaattagagatgatatgactgaaaagttgtgtgtgtatgataggttgatgtgatggaaaaggactgaagtttggatccaaattttagatataaacacagccttagttaattaagaaccgaattaattgcttgaggcctaagctaatcatccctaatctttgactcaaccccttgcacggacagacacagtcagaccgttgcgtttgttaaaaacgaaaaggtagctagccatcgactatgacagcaaacgctaggcttaatagccagctatttagctcttcgactgtcgccctctcatgcgactatatactggagcatcgtcagcgtttacatctacgattctcgctcgacaactcgccattgtgcatggcatatccaactaaacatactctctccatttcaaaataaattaacctaattaatatataatatgacacattataaaactgaacaaactgtttcttggacggagggagtaaatgcatatagcaagagtacatataaaaggtacgatatatctaatgaaaattattaaataagtgaaaacccatacgttctctaaatttctccattcactctgcaccaatcgaaacacacacttcctccattcaacatatattagttgtcaggtgtttcaatcttctccaaaaacaaaagttctctaagtttaaccaattttttttaaaaagtaattaacatctataatatctaatcaactctaaaattaagctttaattcaaattttcgctgtgactgataaactaaaaaccaaatgtgatgaagccataaaatttataatatataacttatctatataagctattatctataatctattacagtactattatattaatcatccaagaacatgctcaaagtccattgtcaacctctatatacctcctctctacgcaccattctttctgaattcgctgcgaaggatccttcttgtagtactctccgttgaatcttcggctgtcgtcgtttcagatgactccggctaatcatcagacatcctgtacggtagactcttctttgctcaatcttttgtggagtataggctgtgttaagttcacactgaagtttgaaagtttggttgaaattggtatgatgtgatagcaaagttatgtgtgtatgaaaaatttgatgtgatggaaattgaaaagttggaagtttgaaaaaaaactttggtactaaacagggccatactataggagtacgtacttatggactagatctgtatgcggtgttctagcacaccacataggacgacgacgtagaaatttgtgtcaatgaggatgcgatggaataataattaggaccattttgcaaattgacttttactcgtacaatttatttgtcactttacaaggttaatggttaataaaatatatttttacaagtaagaaaatatttaagcacgtagtgtagagtttgcctagacccctaaaaatgtagagaaggtggtgcagtaataaaaacaatcaaagcatcggcagattaaaacaacggaaatatttagtgtttaaatagaagaaaaatgattttaaaccattcatatgaactaatcaaagttttcgaaaatccagctaaagctagtacaaattagtgacttaaaaaccgtgcgtgtatagagttacaaccttggtgtccattttaactttcaagtgatgcttaatacctctaatttaaaatatagcaatttctaactatggtcccgttcttttctccaacaaggttggatgaaaattaagattttcgtggcacgtttttcaaactgctaaatggtacgttgcgtgcggaaactttctatatgaaagttgctctaaaatatcatattaatctattttttaagtttgtaataattaaaactcaatcaattaaacgttaataccacctcgttttgcgtaaaaaaatcaatcttcatcttcaagagaaaagaacaccacctatatactagtattatttatgctttggtccaaatacttgcatattccctccatcccaaaaagctcaacctaccccttctaggacaacgaatctgaactaccttttgttcagattcattgtcctgagaggtctcccatccctttttaggttgattttttttgacagagggaatacgagtaagcttgcgttggaaggcatagggcctgttcactttgatgaaaaaaaaaaaaaccttaccaatgccaaaaatttgatatagttatcaaaatttggcagcaaactaaatatagccactttttttacaactttaccaaaaacttggtaatgttaaaaatgacatcaaaagtgaacaggcccataatcacgaggaatgcatgtacttgtgtgaaattaaatatagtattaaaaagaaaaaaaagaaaactgcaaaacatttgtagcactcgtatcagtccaaaacatctccttttccttgacgaacagatcggagtactccactacggagtacgtcatcacccccctcgacgtcaccggtaggctgttttgtgggcccccactccaccaccaaactccaagcgtcccctcgcacacggctcgcctcgcgaagattcctctctctctccctctcccgcacacacattccccccctgggccccacaacccgccaatccgtacggcccccaacacacacacatacccaccgtccaggccacgcccaacccgtgtcactgtcacgtgggccccacccgagatcgtccccgctcgctgtcgcgtgggccccaccccccgatccgcggggcccgcgccgcacctggccgcgggttgcgacgcacgcagcacgtaggcaaggcagctagctgtcccgcacccccgcgcttttattactagtagtacttctcctagcggcagcgcaagcagcaggagagaaccaaaacaaaaaaaaaaagaaaaaaaaggaagtaaaaaaaaagaaagcggccttctcctccagctccacctcacgcgcgcttcgcctcgccgcgcctcgtctcgtgcggctgcggcggcggcggctgctgctgctgctccggcggcggaggaggggggaaaggctcgttcggtaatagggaggaa

SEQ ID NO: 4946 - DNA, 33579 bp, Oryza sativa
  unsure (1)..(33579): unsure at all n locations
cgccgagggactccgtcgacctggggggaacgtccgcgtacccgtccgcctgcgcgtctccatcctccaccacgccgacgccgacgcggtggggcgccggcgccagcgccgtgcccccgcgatgcccggggccacaggaccagcaccacgggctgccgctcccgcggccggtgtccaagtcggcgccgatgcccctggcgtcccccgccgcggcgccgccgtcgccgtcgccgccggcgtgcgcgtcggcggccgagtcggtctcgggcgggagctcgtcggacgacgaggcggatcaccggaattacaggtgatttgcttcgtactggctgctccgttttacagctaccgacctgctatttttttttcatttttgtttttgtttttgtttcggtttggtcgggtactccaattatgggcgtagctgctacaactccaaaccgtgatcgcaacgaattcgacgcgattaccctttttccagttcgttagtagtaatcacgaagtgtgccgagtgatagtgtgatttaggggtcttgagttgacttctaaaagaccaaactgtgtggagactgaggcttcgcaacaactgccatacggccgttgacctcgtctcttctctcaccgcctatagcgtacaaaaccgtattcctttgtttattactagtataattcggtggacttggggagtcaggctaccaaagcgcgtcaaaagttcaacccatccttcttttttattcattcaattgtatttaagatattttatgctaggatatttatgatattgttaactaacagaatttcccgcgtaatttgtttgcgtggaattcccgcgcaattttgcccagatagaattggatttgatatacaactattcctgctttgataagaacaagtttgtcttatgtaaacctttatcaataaatctgcaccgttgtaatctaaaacagcgcaaatctttctcatctttcgttaacgtggaaattttttaggcatagaacaaacatggcggctacttatagatagatagaatgtctaatgtattcctaacaatcattctatggaaatgaatgctttgttccacttggagacgcaaatctttctcatctttgattagcgtgggaatttcttggcgtagaacaaatacggtggctacttatagataaatagaatatctactgttttcctcacgatcattctatggaaatgacgccgaggtgtttctatgctaggagtagcattatctgttccttcaagaatgatgccagagcataaaagaatgcatctttttatggcgtcaagctaaatttcaacacattgatggttcttttctttctgcctgtagttatagtgcgtgtttcatgcctttgccctttctgatagtgtccctgtttggctctattttgttttctattgaaagatgacctattttgtttttcgacaatctgttcctacagtcctggaagtcctctgatatttcctgtttgttgttggaatctgtaggtatacagatccagttgtccacactagcggaaggactgtgctacctgatggtcataatggcatggtagaagagaagcgttttgtatcatgtggtattctccaggagcatcaaaaattctttgaggttcctattgcaaatgtgaacgaagttcatcacatgcaaatctttgaaccttcaacaagtgaatctagttattctcggggcagaatgttgcctgaggatacatttgctgtaagaccaagaagtcattcccctggtccgagagggcatgcttattctgcttgctgcgcaagagattttgggtttaccccaaggtcaccagtgaaaaggatggatgatcctaggagtccatctcaacccttgcctctccctccagttcctgttgctagctcatccattccttcatcttccattacttctagtcaattccaatcacagtggaaaagggggaagctattaggtagcggcacatttggtcaggtttatcttggtttcaacaggtatggaggtttatcttatagaacattaaaagaataatatggtttcgaagttcacccaaagaagttactatgaatgtgactcattttttcatgtactttgcatccatgcaggttcatctttgaagtttatatagaattttagttctatggctagatcgcagctaaatcctttgtttttctgtctaaggctgtatacccaaaatgttgctatgtgtaatttgattacgtacatgcacaaaagtttgatatttatgtggacccacatgttcaattcggtaggctagaacatagaaaaaggaggagagggggtatgtgaagtcataattatcacatgtatacatggttctatttaatttccttaaacaaaagttgctacacaacacacttttttggcatcacatgagagcatgaaagaaaatcttagaactatttctatgaatctatttcactcttgactcttattgttgccatcttgtgattgatcttaattggcgttgtacagtgaaaatgggcagttttgtgcaatcaaggaggtgcaggtttttttggacgattcacattcaaaggaacgccttaggcaattgaatcaggtcatttgattgccctatacaattgataggctgtgtgtcattttgaacaatttatttttattgtaacacaaacacttttccaacctgtctctgactacatcctgttttggtttattaacttgtccatcttgtaatgacaggaaatagatatgcttaagcagctctcgcaccaaaatatcgtgcaatattatggaagtgaactggtaggttcaatatgattattgactaattgttcaataagcatgtcatgcagccacataattttattctttctcatcttagcatatttgtattgtgcgttgctcattacaagatggatctgtgagggaaaattataacattttttttggtgggaactaatctgatgatgcatagactcactctctggtgcacagagcataaatttatgcatcaattttggttctaatgcttaatcgtgcatgctttgtccttttcctcttttctaaaatcagagggtatacgccctggttccagtttccaccaagaaaggagacaccatcagttttactaattttgtgtgattgttcacttattttctgaaagttctcattaagctttggcttgcctaatttaaacaattttgagcaggctgatgaagctctgtccatctatctggaatatgtttctggaggttcaattcataaattacttagagagtacggtccatttaaggaacctgtgattcgtaattatactcggcagattctttcagggcttgcctacttgcatggtaggaatactgtacacaggtaatgtaaattatcctacactgttagtgattttcatggtaggcactgaatacaatgatcactttgtaaattttatttttgtggacagagacattaaaggagcaaacatacttgtgggccctaatggtgaagtcaaacttgcggactttggcatggctaaacatgtatgcagttatattttcgttcttcccggggttttgcttgtttggttgtgtagaagcatcattaaaacctcactgagaccacagaaagcatttagtagtcatctaactgaatactctctccatactcgtaaaggaagtcgtttaggacaatgtttaagtcaaaccttggaaatataaatcatgaataactctcaagttgttgagtttgaaaatataaaaattatatgtatagatttgtcttgaaaaatactttcataaaagtatacatatatcacttttcaataaatatttttatagaaacaagaagtcaaaattgtattttggagaccgtgtcgctgtcctaaacgacttcctttacaagtacggagggagtattaagttcctcctctgacagaatgctagatgcaactcagtaaaatgtctttaacattgagcataaacactggcttcctctaagtttgagacttgggagtgataaagatctgtactatgtctataaacttccctttatgttgtgggctggtgatgtcatttctacatgatttaaaaaagatgtctctgatggctatggaagggcttcttcaattcaacaacaaaatgaattccttttgagctttggttgtctcttttatctcatttcaatgcttatgttgaaacaggtgacatctttcgccgaaatacgctctttcagaggaagcccatactggatggctcctgaggtatacggtttcctgtttacaacacttggagcactgtgtcatatgttatgtaatttacttcaccaagaacggtttgtccaactaaatgtaaaacgtgcaggttgtaatgaataacaaaggatataatcttgcggttgatatatggagccttggatgtacaattattgagatggcaaccgcgaagcatccctggtatccgtatgaagatgtatgctacttcgtttaatatttaccaaaatgctttgttccacttggagatgctattctgcctcttttagtgaaaataactggaggactcttgatacttcttttatagttggtgagcctcatgtcagattcttggtcttgcaggtggcagcaatatttaaaattgcaaacagtaaagatataccagaaattccagattgtttttccaaagaagggaaagatttcctaagtttgtgcttaaagcgtgatccagtacagaggccttctgcagcttcgttgctgggtcacccttttgtccatgaccatcaggctgtaagagcaccaacatgcaatggtactcagttgagaaatggaatttcttcccctgcagcaagtcatagaaaggtgagatttctgctcatttgtttttttcagagtcaatgtcgagctcttttactcttttgaagtaccaacaggacatagtagattatatatttctagatgtttacaagatnnnnnnnnnnnnnnnnnnnnnnnnnnnnnttgtatcatcgcatcagatgatggggggcagtagggctgattcatgtgttgcacataattctttttaggaagcttgctttacatatctgttgttgataaattaattacgtgaaaccaggtttaaagactggattacacgacgtaattcccatgtccggacatccttgtcatgtcttcaattttttccccttttgcagccaaacagagaatcctcgtcaaggagaaacattgctcctctgcatggtatcgcaggactaagcgcaagggaattcgctggattttccacagcctatccttctcctcacaatacctccaggtataccattctacctcctgcccatcctttgtttccaagttcatcttgtaacctacttctcaacatggccgtgcacgtgcagcagcccaactgcagtgagagcaaacatgtctttaccggtgtcgccatgctcaagcccgctgcggcagttcaagcaatcaaactggagctgcctcccttcaccaacgcatccggcgctctcccctggattatcagcagcagcctacccaaacaatcccttgcagaaccagtcgaggcgaagcgccgcagttccagatccctggctggagttgagccagccgagacctccaagcccatatggctctccaaagagattctaggccttctgacctgcagagtttcttgtagcatggctcctcaaaagagattctaggccgtctgatctgatctgcagagttgttgtagatgatatgtgttgatatctgacacaagatagagagggagtcgcatatgttttttgttgacagatcatttgtaactatatatggcttactctgatctgattcatcattcattgtataccataggaaaaaggagggcattaggatgatctctgatgttctgtaaatctgtaggactagaaatgtggagtggaggcttggaccagttgcagaacttgtaaatttttagaaaatggaataaaatatcccggccgctacacacccgaaggaagtttttctaaattgttataagcatattatatggatacttgcgatgttggctgatcgaaaagctaggtttaccctgaatttctaagggagatagagaggtaggagaatgccactgaacagcaagcggaagcagcgggccagtctgtttcgttagagtttcgaatggagagagatcgacaggaggttttcaaatttaaacagcatataagttaaacaaaaagatgtaaagggggccatagtttgaaagatgtattttattttcttaaaagatgagggatgaggctttcaaaccaattttaaacggcgcacaagtttaaaaaacaaaaatgtaccaaaaacattgcggtgagcgtggatcgaacacgcgaccttcagatcttcagtctgacgctctcccaactgagctatccccgctatgcgtgacaagggtctctgttccacctatagtgacgcataacttcataagttagctttggtttatgccaattgaactcagaatctttggattgaaaccacacgtccattgccattgcactatcaaatacatctcgatccatatattagtatccaactaccgaactacgcaagcatgaaggcaattcaacaagttcaaggccacaagggacgtacaccgccggtacacgcatacaggctatccatgtactacactagtacacacatacaacaaagttatccatccatgtacacaccgggtacacactacacgcatatggccagatgcgtgcagaactgcagatgcattagttagggccaaggggaaaaaaaacttatggctcgttaactcgtttagctcagctcagctcgacttttaactcgttaagataatgagtcaagtcaactggctcgacatcaattggtcgacgtcacaagttggtgtctcgatgtgagcaataattaattcattcggtttcctaagttgtacttaaatacaacattagttttggtattataagtgcacagaaagtattagtattgtgcgcgtttattggcttgtaagaggtaccacgctatgctttattgagttactttcttgatttattttgtattatttggtatgttcatattaaattcatttatgattttggatccaaacaatgctttcgttctattttagacaccagcctaggggtggtaatgggtcaagacccgtggatcctttcacaacacatctcaacccttagatatttttagcacaaaaaaatactaaatttcaactcaacctttttacccaacccttacattttgtaggtcaaaatgttaggccaattaccaccctacggcagcattgtcttatttcttttttatgttgcaccccttaaagttagtcctatatttgtcactaagcaagttatataacaaagataaataatgatagcaattccgttagttatatatataacaacgataataatatcgattcggctaactgtataataatgattgattaaattttgacattgtgtaatataactttatcaaaataaatgttatgaccttcaaattgttactaatatactactcaacaagactattagtcccgctctttcttaaaaaaattaatgattggtcaatctttatagcgttctaggctactgatgccctcatatagcttttggcaactatggcgaattttcttgaccgcaatactttacatagaactattacgcagccctcctgttacacgaagcagtacaaaagagtcccgtaattctatcgaaagtggagacacaaagtttacgggtgagactctctttactaatcaatgctctaatcaactgtacaatgagtaggcccctccactctttatacagtgcaatccaatatatgcaaggttcggtgatgggcccaataaatacatttgggctaggtcttcatgggccaaacccaaaatttcttaacaagaacaatgctatcatggaaaaaataagtgcgggtatgcgtcacttaggttgagcctattttgacctagtgaaaattagctgaatttaaacatcttccaaatgaagaaccctagctttaatgactacatggatcatggatggaaaattaacgtggaatagaatcgaatcgaatccctgtggccatgtgaatatgtgatgcaaatgatggagccctgcaggacatggaggggacatgcatcatcccaggcagtgtaaagccatctcccatcacatgtgcacaacctttatagcttagcccttttggtccctgccttgcctctctcccaacaaactttgcccagtgctgcagcattgtgtgttgtgtgtgttgtgcttgaggggtttttatgtctgcatatttccaggggttggctggtccagggggttgctgcagtgtacactagttaatcaacatcaaggaagattcccacttagctctccagcagaaattaaaaaaaaaaactaaggtgaagtatattcaattgcattcattgggcatgttgcacttcatttttactaaagtaactaaaacatgcaacattgttaggatacgatacctttttttcctgccatggttaaattaaggatatgatacaactgatgaaataggaagctaatgtgattcatggtggctagctttgctgaacttgggtcggttttatttttaatatgaaaaacacaagaagcaaaaggatgttgtaaaatattggtacttattttttctaaaatatttaaaataataattaagtttttttttggatttgcccccaagacttttttttataacaggcattcataatacccggcttttaaacaaagccgaagataacggcacagaagtcttacacaacacaaagaaaaacaagtgacttaagggaacagactaacgctggagcataggtatcactggagaggcccaacaatcagaaaaaacacacccccggacaccctaaaacaaggcacctaacatgctaaaccaaaacccaaccccttagcctgttccaagacttccagatattaattctttttttaaaaaaaatcagagtttgtttttttttttaaaaaaagatgatctggttcatttacaagtttgtgggaaaaaaatacaaaaaatgtcatggcttactaacgactaggctttttacctgctcctacataaacaatgtggctaccacaagtccacaagtcgtaatcatgcacatccattcattaacaaactctaaagaatcccgcaaaaaaaaaaaacaaactctaaagaagaaagggaaaagcaaaaggcacaatcctttcatttaaaaaaggtctgcgggatctcaaaccgaagtgattaataacatgcaggagttagtatatatatattgacataagactgaatcaaatcaaagatacatctatataaataccaatttatgttactatatatatgtgtgcactattttgttggggtattactagatttcaagcacatggaaaattgcatattttcaatcacctgaaattgcacactcataagtctaaaattataatagtatgcaaggtgcatttttatttctatttaactgtaagtttgttgctatatggatttactttatttttatccatgtttaaatatttttcatgtaattttgtaaaaaattttgcatgtaattttgtaaaacttatgtataaatgtttttcaacgttttatacaagaaaaaaaaggactaggaatgataattattggattgacattaaagtaacgagataagttactggaaattttgaaaattctcagctaaattctagccactcccattttatcttatatggagtagctaactacaaatttgcacaaaacccctgtttcaaaagtttctctaaaaagaacacacctatattccgaaattttcaaattcctttttccccatccctcaaagctaatccttttatgtataaccctatcatggtcactattcactaacatgtcccggctatatagttctatgtgtttagtacgttcctctcattttacttataagtggagatgttgaatatataggttgtgggtctggtattaggggagaaagtaggtagtccgcaaaccccctttagggtgtgtttagttcacgctaaaattaaaagtttggttgaaattgaaataatttgatggaaaagttagaaatttatgtgtgtaggaaagttttgatgtgatagaaaagttaaaaatttgaagaaaaagtttggaattaaacgaggccttaggtcgcttaccctataaccctataagtgggctacgggctaggcacttacgcttaactgtggttccagtttcatacagtcacagactcatagtacatctctttcacaaacattaattaataacctgtttaaccaaaaggtaagggtataataatctactcacttcgtactattctaagtgtagttctggtttctatgtctaacgtttcaccgtctgtcttattttaaaaacataaaaaattaagtcatgtataaagtacttcctccgtcccaaaatataggtatttttaaggttggtacggacattaagaaagtaggtgagaatgattggagaaggtgtgtgattggttgaaaaaaaaagtaggtgaaggataatggttctgattggttgagaggaggaggtaggtagaaaaatagcttcattttgagacacggtactgtgctacaaatagctacattttaggacggaggtagcactactcatgttttgtcatctaacaacaataaaataataatcataaaaagcatttcaaataagaagtacggtaaaatgttgaacgcttaaatacacaaccgtacttgaaatgggatggagggagcagacgagtagtaaccatttaaaaatgcttgatttgattccccggggtccactgcccatttgcccccaaggaggaggaaatatagaaaaacaaaaggagaaataagtttcttttttcaaaaaaaagagaaagaaaaccgggcgacctgtgctgttctgccacctcgcgccgcgcggcgcatttgcgccatttgtttagctcgccatgtccgccaccaccttccctcaccagcatcgcctcgccgcccagctgctgccgctgcgcttgcgcgtcctcactggaaagatggcccccctctgctctggcccctctccactgcggtatgaatgaatgatgcgccttttctccctccccccgcccagatcgatcgccagacctgcactttccagttccccatccatgctctgtctgcttcatcctgtcccagcttcttcttcttcttcttcttgttgttgttgttgttcttggtgcgggagggtgttcttggggtagggagcagcatcggcggcggcggcggtcatggcgaaggagaccgagttctacgacgtgctcggcgtctgccccgccgcctccgacgacgagatccgcaaggcctactacatcaaggtcttgcttcttgcttgttatgccaactctgctcggagagtcggtgctgatttgtttttttttttcggtttttggtttcttgatgtccaggcgaggcaggtgcatcctgacaagaaccccaatgatccgcaagccgccgagaaattccaggttgtttcctgctactcagctcaagttggtttcttgcttggatggtttttttttaattaaattcagtttgctttgtctgaccagctgagctttcttgggtggattttttgcaggctctcggagaggcctaccaggtgctgagtgatcctcttcagaggaaggcctacgatggctatggcaagaccagcatttccaagtagccaaacaaacccatctgagatgattgattgactctctgcagtctgtggcaattcaagtttcaggttaacaaatgttttgttttgttttgttttgtttgttttttcagggagaacatgctggatggcactgtggtgttcacccttcttttcgggagtgagctgtttgaggactacattggccaccttgcaatggcaacaatggcttcctccgagatggccagcgacaatgacaaccctgaaaagcttcaggacaggctcaaggtcagtgagctcaatagccattgcagccatctgtgattatggatgctccaaagccagtttgatttttctctcctttctgatggaatgttggcactagactagttgatactaaccattctgttctatgtttattgtgacaaagggtgtgcaaagggaaagagaagagaagctagcaagattcctcaaggagttcctctcgcaatacgttcgtggtgaccaggaaggattcgcaagccgtgccgaatccgaggccaagaggctgtccagcacttgtcagtctgatcgatccccgcaattcatttcgatctctatgccaatctaagaaaagcttcttttaactgttctgaaatgccattgctcagcatctggactagacattcttcgcacaattggatatgtgtactcccggcaagctgcaaaggagcttggcaagaaggccatgtaccttggagtcccattcctggcagagtgggtgaggaacaagggtcacctatggaggtcacagatcaccgcggcgaaaggtgaaaatctcgcaaaccggggcttttggtgtgtattcattaaaattgctgactgattagaggacaaaaagaacaatgcaggagccttgcagttgctgcagctgcaagaggaggcctgccggcagagcggtaaggacggcttggccaccgagagggatgtcgatctgcagatgaggatgaacaaagacctgatgatgagctcactgtggaagctgaatattgttgatattgaagtgacccttctacacgtttgtgaaatggtatgcctcaagatatcatagaaatttgcagtgatatgattaatagttagttggtagtatctgaactgcgatcgccaagtagcacgacatgcctgtcttatcttccaggttaacatgtcaaaatgattagtacattaaattgaattgattctcttgtacttgttaggtgttgcatgaaaacaatgtcaagaaagaggatctcaaggctcgtgcaatggcactgaaaattcttgggaagatattccaggtatatgttacttggccttttcattaggataattcataccgctacatgagatttattttatcataatttgcaaataccatattaattcaattggactacaaacagagggacaaggaggcattgccaggaccatcaaaaccgaccattctcgatgatgacagcagctctgatgaaagttcagatgacgacgtggctcggacagtgccttatcggactcctgcagttactcaggcaattactaaactaagcagcttttatgttgcatagcaaagcattgcataatcaagtgcctgctaatattagttcccatgttttgtggttcagggaattggcaggttattcagatgcttatgcaacccagcatatgatgttgacgatgactttgaaccacgcaaatgagtggtaaagtagcagagaggttgcaactatttaagagatccctgaatctttccagattatgtgcttctgaacagttggggatcatgcatcaccataatttgtctgggtgtgcattgtagattctactgcagcactggtgatcaggccattagctcaaaatcgttctttttctgtccatgaacagtagattctttcttggtttttgatatagattttatcgaattgtgtggtgtttatgtaattgtttggtttgggagttgtcaaaagaaagaaagcaagaacaagtgtaactggaagtccatttctctctgattttaaaatcacatgtaaaactctgacatgaaaaatcaacttttgatcctatcgtctgcctactgtcaccatcctctgctctaaagatcttctatctcatattgacatccctgattgctgacctgccagatgaatgctgtcaaactccaaaaagagtgatctactgaaatttctttgagcttctgctagaaagatgctgtacaaaagatgaacagatagctcaaaaagctcattcatgcaactcaagagcagtctgcattctgcaatctgcattgcacagaacagaaccaacaccatggatccagcatttttttctcatttcctacactggtaggtagagctccttatggtttatggactatacaacaacagcaatttctttttctgccatatgccacacgcagtttctcaccctcaccccctaaactctaaaatttcaactgaaatctccttctccttatggcgatttgcgcaacccgaaaaagggaccataattcttcagagattcaggtgaattatatcatgctctgagcttggcgaagaggttgccgaaggagaagaagctggtcctggacagggcgccggaggcaggctgccccggcgacttgccgttggcggcggcggcggcggcggcggaggaggaggagggggaggagggcaccttcttgacgttgagcatgacggtgtggccgacctggacgcggaggccctcgatggtcttcatgtccaccggctcgccggaggcgtcgcggacgtagaagacgttgatggcctggccgccgaccgtcgtgacgtcggccctcgtcaccgtcaggccgtgctccctgagcacccgcgtcacgtcggacagcagcccgaccctgtccctgccgcacagctccagggtgaatccctgcatcatcaaccaccagtgttagcacatattcaagctccagttcgagctgaaagagatcctctgacttaacgccatatcaaagtggaactcacatgtcagtgactcaattgtatgtgtatgcatgtgtagttaagtcagaggatttgcttctcggtgttcgagctattgtactggtcggtgcatgtaactcaatctgacttttatcttttttctttttcagaaatagaatcagaattcagtcaaaggtatatatgaaaatggagaaaagacaggtagaagggcagtatgttactactggttaatagaactaaatgatgaactgaaacagtgtactgaaaaaaatgaacagattaatgtggtaccaggtgctgtagcaaaaccgacatactagtaacagagttcagtgtgagtgtatcgatcaatcaatgtgactttactactaggagaactatacaccataatctgcaacatgtcctgattaatcccttgttccagatgcagccaagctcagaaattcttttgcaaaatactactaacagttactacttctactgatgcagtgatgctagttgcttgtacagacagtggcaaagaaggttcagacctcagatactcttctggagatggccgcttcaaggcacttgatcaccctccctgcttcgtccttctgtagcgtgcgcccatccttccgacgaatgtacagctcctgacaatattaaaataaaaaaaaggaagttcattgcaatgtcaaaagtcaacgttgaccgagtcgcggcgcagagctcctttgaaatgcaggaatattctttctacaaatcgaattatttcatgtgaaattcttagcattgtcgtggtaggagcttcgatatggtagtagcagctgttgacatgctagagtccagagtacacacctggatgccgtagatgccgtcggaggagacggaggcgtgggagacgacgtagtgcatgtcggtgagcgtgcacacgatgtcgaacagcagcttggacctgtccctgcacttgacgttcaccaccgagtagtccttctcctcgcagtgctccaccgtcaccaccggcctctcctccgccgccgccgcgttcccggcctcgcccgacacgatggcgcggctgtcgaggccgtcgtcgtcgtcggcgtccacgtcggcgtgcatcaactggtggagccgccggtcgacgtgggtgttcgacccggcgccgccggaggagaagaagttggcgtgcgccgggccgtcgtcgccgtcgccgtcgtcgccgccggcgtggccgcggaggacgaggcggaggcggtgctcgatccgggacaggcggcacgggtcgccgacggcctgccccgacgcgacgtcgttcacgtacacgacgcaggcgacgcgggcgcggtgcgtccacacctcggcggcgagcacgttgcagccgagctcggcgagcacggcgaagacctcggagaggaggcccgtccggtcgggccccttgagctcgatggcggtgtggtcgccgatggagtgcatccccaccgacctcaccggcgacgacccgcccttcgcgccacccagcaggttgctgtctgggcctaacgcctgcaattttaaccaaattgatactgccacttcagttttcagtttttcacttcaactttaatttacacttcagtgtaaatctatagtcacaaaaaaattcttgatttcatggaaagttttcaaaggaattgttggctccatatctccactatccattccaaacacctcatgaaaaatagtactgcggtctaaatttgtaattcattaaaggaaaacctttaaaatgtttttcaaaaactgaaacacatactgacatgatgaacagatacgaaaatacttcacctaaactaccaatactttcaaaccaaacactatcaggatgcagttgcaccaaaaataattctgaaagcttgatatagaggataaaataggttttcaactttcaggtggtaaattttaagaccaattttcaggtggaaaaaaaattacaaaccttctcaatgtgcttaatggtcttctcatcagtcaccttctgcccttgcttgtccaccacatgaaacactgcatcaggttgtaacagacatcatgaataaaccggcaattgatgtccgcgaaccatacatgagtttgcatatatatgatataattgcatagcataggctgccttaccatccatgaaccatccaccatcagaggtgatgtacgccttcgagatggcgagatcgagatcgctcagaacttgcaccacctccaacaggatgccattcttgttcatgctgtcgacctacctccaaacgcaaacagacggtgctcgaagcaatcagtgaaacggttcttgaatattggaagcagtgttcagtaagattatccagtcaagttttgagagagagtagtaagtagttcttaccttcactaaggtgcagtcgctgcaggtgctgttgtcaatgcataccctgcagaaaattatcagcttgttagctacagaaagtagcggagcttccgacaatagcctgaaatgaaacaggataatgatatgaggagctctggaatttagatgtttaaattagagatccacctaggagggttgatgcgctgactgaagttctcatactccggatcaaagtaaggcagcatatcttccaaggttacgaatcttccctctgaaagaattacgagttgaaaaccagcactgtcatgatgcgaggtatgcagatatatataagcaaacagaagtacacagtttcgtcttgtgaaccatctgtgatagtttccaatcatgagggtagaaacttcgatcttaaaatcatcaccggaccaatgatgggctcctcataaagaagatctaaattactttagagagtagattagaccaacctttcagtagattcttctttcagcagggcctgaaagttcactggaaaattttcgatggcttcaatcaaaagctaacccccaacacttcacgctttagtatcctgaaaaagtcatgagcagtttcgagtcaatttctgtacaacgatacctgaaacctgaacgcacctgctcaccctgaaaactgcctgtcaaaaattcagacactgacatggaacacataaaaactcaagaatcgcaggcagaactggatcgaaatctggatcagaagttcagagcacatcgcttataaccataaaaaaaggcaaccaacttgaaccactgtgatcagaaaactaacaattgccaagaaaccatgggctactgcaaacacaacatatacacatctccctgaaagcaatccacccccattgatcaatcaatcaatcacctcacctcacagaagcaagatactcttttgcctggatgaacaaatcagagaggggcgcacagatctgcatactttattgagtgctcgtgatgcatgaatcaacagccacccacaaccgatggccaagaattgcttgctgctgctggctggggatccaatccaatcatcccaactagagctagaataatcgcccggcctgaggaatcaagaaccacgtcacggtgactggatgtggggataaaagaaaagaaatgcacacccgctttgcgccgcagatgacaaaatcgatctgcttttttttgttttgttttttcagtcccacccgccggattctcgagcgagtgcgcgtgcgtgccagcattgggaggaatttttttcccaccgcctcggttgatgatggtggcggcttcggttggcgttggcgttggccctgcttgcggcgatcgccatgactgaatcttgagaagaccttttctattatctgaacttattagggttcgttgtggtttgttacttatacctgttattactgtgttttttttatttcagaggttcttgttgtgatgttgattaggccgaattttttattcataataattaataatgcagaaattaaatatataataaagcaaagtcaatttttacgaaaataggaaggacactattgcataggacgtccaggtgtggatgctgttgtagacaacgtccagatggggacgcttcttacaagggcgtccataatgctgcagttgaagaccccacagagccgtccaattcaccggactaagattggactttggatccaatcacacaatggtcgaactctgcctcgttactcctatgcagactattgtctcttgttgattgcttgcttgccgagtaggcaccgctctctacctgatctgccagacagggtcgccatcccccggctctccttcaatgcttccgctgttccgcatgacggacactctactcggggtcatatgtgaacagccaccacttttattttgagatatttgattagtttggtttttgttctggtccattgtttactacgcatcgagctctctgctgactgaatcttgagaagcggccgccagatgaactgcatgcgaggttttcgatcgatgctttttttccttttgcaacaagccagagattggaagtcatcgggcgacagatgatctgatagaaggaggatgtttgcgtcctacccttcgtaattttgcattctttgtaaactttctattgcagaacatatacacctgaataccaaaatctatgaactgagcatacttgctcggccagccacctggagtgaggcgatgcctggacttgctgttaggaaccaagaggggcggacagacgacgcaacacaagccggcacgagtgggttattgttccagcatgactcaaccagaacgtggatagcggctgcgacctcccggtgtgaaggcaaaaagcggcggcgtcctctccggattcgagagccttcgaggtgagttgaggtgaactgcaatggcagattcctgacattgtggagacggaagccggaaggcggctgttgcagtctcccagagtcgaggtgaacggcgggcatggcagcaccttgcccgagccctgcaccaacattgggcctgaggagaggagagtcgacgatggcgcctctccgcatggcggcatgggcgccccaaaccgagcctggacgtgcttcggtacagcgtccacctctggacacttcttggaacagcgtccaaatctggacgccctttgaaacaacgtccatcctatttttacaaattcaatttaagatttaccacttatttaattcaagacttattaattaatataaataaaaaattcggttgattaggtcttatttttccagcgttgcatgccgcggttagggcccacctgtcagttagtagcacgtgtttgaatacgaaaatggcaactttaagttaaatgttattatttaaatcatttattctcaatatctctaattttattgggtgcatgtattgtatttattatgatgatatgaacaagaaaaatgataataattggtttttggtctttggactaaggatagttatgtcttgtattttaaaatagatggagcattgcccagttttgaacaatatggagtttaaagagcaaataatcgtgaaaagttaaatgcaaaatgatcagatttactcgctctgtctcagaatataacaatctagaatcggatgggatacatctattataaaacatccatttcagttgtagattactatatccacatgatgaagggaatagttttttttaacaaaacaagtaatcttgttcaagatttttaagtgcgagaaaggtcatcggttcactattgtatatagtttgtagttaggtgaacgattttgtatgaagatactaatgtgaaatgttcctttttttttgttgtttttctgaaacaaacagagagtataaagttacttacaaataggcaagcaagtacttgaaacaattggggattaatcactaatcacagagatgtcctaagacctaaacctaacctactactctgtaaaaaaaatcaaatatgtccaaatttaaatatagggtttgattttttttttgaacggagggtagattaatcagcagggtgatagaccaaatcatctttgccttggtaatccacatggtctcaagtcaactggtaagaggaattcacatttctgaatttctgattggcacataattgccttttatccaggtaggagtagttaattgcggagtagtcaactaccactggtggtcagccagccacgtggcccggtggggcacctgtcaccgacaggcgggcccaatccgctgcgcgagaggaggccaggcagccagccacgcgcgctttacgctttcccaaaaagggaatccgctttccgcaggtgcggcgggcggcggcgcctccccgattggaatctcgatgccacgtggagcactcccttccgtccgatctccatccgacggtccagataggccacgcgccccccttcctcctatcagcagcgtgtggcacggtaactacagtactatactactgctactgctacatcaatcaaaggcttcccaaaacaagcaaacaaaaatgaacaaaaaaaaaactctatgcaattaattaactaattaattgtacgtggtgctaccagagagatacgactacagtgtacatgcgccgtcacaagccaaccatccaatctccaatcataacatccatgattttctttcccctttaattaattaattaattaattaattctctcctccctctgatcgcgaccagaagaaacaataaagacacagagattttgcaacaaagtggacgagtggggcccaccggtcggcgactgcagccgacggctgatggaggcagtagtagtaacagcagcagcaacagtagggcagatggggggcttcgaaagagagatttttgctttcccaatcaacatgatgcaaaccagccaagaaccaagacaaaactctctctgtttttatttttttttgttttgtttttttgaaaaatacttagaacagaaaaaaaagaagaagaaggaaagaaacagagacacgaacagcaagtcggttgtgtcggcccacctgattgacgaagactgcaatcattcgacgctaataaacataaaaatgaaaatgaaaaacaacacgattctaatctaccgtcaaacaaggcaaaccaaagaatccaggagagaaataatttaagagagaaaaagagagagagattggtaaagcgttaattaccactgttcttggattccctcttaattctctcctcctttttccttctacttgctgctgctgttcttggcttcttgagattttgagatttttgattcgcgcgtcgtcttacatctcacgcagccggagcacggctagctgagaggaagaagaagaagaagaagaagaagaagaagaagaagaagaagaagaagaagaagaagagctctctgttagtgtaaggaaggggagagaagaggagagaccatgggaggaagaagaatcaaatcaagaaaaagggacggcaaaaggaagggagatatggatgaatggatggatggatggaggggggagagggcaaatgggcctagtaggggagagatgacagggaaagagggactcacactgcctctccacatatgcccccactttggatgataccccgataccttccctttcctcttcccctcctccgtcgaggattatatagtcccgcgcggaccggggaagtccaggatagcgctcgccgtggcgactgtgtgtgtgtgtgggggggggggggagtcagaccgagtggcgagacacatgtgagaggtaaatgcggatagtgtatgacaagcgatgccaagtagccatgtagtcgatggtgtggcgtttgttagaaggtacaactaagcatgcggtggttgttgcgctagctggtgtttcggatttgtaaagtgtgcattattcacatgttttttattgtgcatgttaattaagatcatggttgcttggatggtaaacggtaacataccatgggttcgtactataaattgttcatgcgcattctcacgatgttctcttataccctcgtctctctctcatcccttgtctaggactataggtcttgtgagtactcgaaaagtctagaatatcaccccacaattatgaggggaggccatgtatggtaattctagatagcatacgacaagtgcaatgtaatcatggcgttgattgtgtggagtttgttagaaggtatagttaagcatgttatggtttttattatgcttgttacgattatgggttgtctagtaaacgacaacaaactatcagtttgtgtggccaaaatcttcatgtgaattcgtgatgtttcatgtacgattataagaaaaatgaggtaaacctacctaaacgtacaatgccgatgagtaatcttccgctaggattatatagtctcatgagaattggggacttctacatatttgttatatagtctacatatttgctgggattataaacaacaacgcactattagtttgtgtgatcaagatgttcgtgatgttttgtgtatggttataattaagaaagataaggcaaagctaaaagtactatgtgacaagcaatgcttacaaggttggtaggttggattttgatgaagatgcactaaagctatcgctactatgcgaaaagtggtctatactaatctcagagtagatacgatatagtttgttaaaaagcatatcaaagcttggagtgtttgttgtgatagtatttcaaattttgcaaggcacgcaattacttgttttttaatgcttatattgtgattatggatctacgaagcaaacaccaatatttcaatcattcaaatagcttgaatgttcatatgaatttgtgatgttccatatagtattatatgtagtaagaaagatgcataaatctattggtattgacgagcgatgtcaagtagtcaaattgttagtggcttggcttggtacaaggatacagctaagtacgtcgtagccatttatttggctttccactagatgattttcacatgataaagaacatatcacatatgatttatacagttgaagtgtttacacatgaactcactatacatagaacaattaattcagcatgcaatattctggagaatcaataaacctgtataccttggcaccttgcttcaatataccatttttaaaagttgtgaatattaaaacatagtatattaatatacgcgtgtgaaggatacctgtatcaacattgaagtttagatataaaagtagattttcttctaaagagggaggggtcgtaccataagatatcataaacctcaagcatatccaaaattagaatcacatttatttgaattttttagttacatatttatccgctctaacattatactctctgtgtttacaaatagatgatttaggatgagcacagtcaaacctcgatatcttattggctatctcccccctccctaaatatcagtatctttgttcctaattttcacaatatagcaaaaaaaaagtctgggctaataccatatatgttcatgccatacttttttagccagctagcctactagttatgcacacatttttttttgtcataacttgttacaattgtgaccaataaagtgtgagccacaaaatgtgtgacatgccatactttctcatttgtttttagataggtggggatgccatccaaatagccccttgaatgtgccaaggaaaaataaatactgggagacatttaatttccttttattatgcacacattaagtacaataggtttcctaaataatgaagcaacaaagtacaccgaatacatatacttttgtgaactgtgatgaagcattacaatgctggacacacaattaatattggctgtgtacggtacggtgtcaaaatggaacaaacaactacaaaagggcacacaaattaaaacattctgagaaaaatgcccttttgtcaaacctgtgttagtgggcatggcactattaacaaattagcatctcagaaaactataaagctcctgtattctattagctgttgccttcacaaaagagaaatgtctggacacaatccagaagtattattccatagctgacataaggcaaagattcactcacccccatcgaataattcctctgaaaatgattgctggtcaactttgtgccacagttttattttttgtttttctttaacaaaagggaagcatattggatatgtctgtgatctagtgcaggaacaaacaagagagatccagtccagctagtgcaagcaagagtagcagaacatgtttggtgtgatgagagattccaaacagatcgactgatcaaacagcattgcagagaattttgtgtatagtaaggtccaggtctggatgtgatcatgtgaaggattctaattccatctccagtgacatgcacttcagtggacagtcccctgtatgactatccacttatgaactgttcagataagcttcagtgattgattagatatttcgaagaagatgaaaaaaaaacactatctggacaaactggatctatctcttcttcatatctcccgggatgatgtgcgtgattaatatattctttttaattgatgaaagaacattctccttttttttcagattaaggatttgtcactcgtctcaattgttgctttagtttatatggtttttattcgccgaaaggtttgcttcatttgaaacctgaatgaagttgaaatttctttgtttcacaaatttatatttctaaaataatttggatcaaagtcaaaagcatgaatatcacaacttcaactttggaggcaaattagaattgataaaaccttattgccatagaggaaaaaacatattgaaaaccctgttttctcttctatcactacaagattgcagttccctcttttactttactccactcatgctccttttccttttaccacttgtccacttccatcaagtcaacataattgatctaaccccaccaagaaaaatactaaaattatataaaattcagaaaaaacaccagcacaattatcacggcttatcagccgtgaaaaaaaaatgaacaacataactaaaaataattaataggtgtgttcttatcgatttgaaagctaatactagaaaatgaactacaataaaaaaacctcaaccctaaaattaagtttcacaattcaaattttggtttcagctgaacaagcaaaagatggagctaaagaatactaaaaaggaacatcagcaaaaagatatataccatcataattttcagatatgattttatagaaatctagttaaatttttagaatcttctaggactcatgtagccgatggtccatgaaaaataaactttgtagcgtgtacgatgggcagacaatgggggatgacacggtgccacgccaggtaccggggctatggaatgtggattgccttgtctcagaacaccacttaaacctcctcctctctttctttgctcctcccatcgccatctccatcacctcatcaaaaggtccctccccttgccatgatttggtcatttgcctgccctcattgaggagctatggcctgagcttgccattttccaaaaatggtgcttaggtgcactgttcctgctaggcccaaccccaagtgcaaccacccacagcaatcagctcagcttgcagcctcaatggatgcaccaacattttcatgtgcatcaacagcgacagatcaagcaaagagccatagatgaaataattgtgtaagagaaagaaaaattcagttagtttccacatacaaaagcagaccaaagtgtgcgttaggacatgaaaccttttttcagacaaagaaaggacatgaaaattcagcaggttaaccgattctttcaatctttcctgctgaatatctatctatagtcgatattaattcactggcatatgcatttggctgcattttttgtgtgtgtccttgcttggctgcttaatttgcatcaagaaattaactcatgaaaattaaatggccctagccaccaaagatatgtgtaggatgctgactgtcgggaggccattgatggtggctgttccctcttcatgcttcaaggcccagacagcaacatggagccatggacagagtctgcagacattcttgcatgatctctcttgtgatgaaggaatggccacgttgaggtgcttccaaacaaacacaatttcaaggttcagaatttcagacggaaatttttcagttctttggcttgttctgcatgccattgcctttgggctttgtcactacggctgaagtgcagagtgactgactgagtgagtgacaagtaggatagatggagaatttaccagttaccgcaaagagaatgtaggggctggctgtttaatttgtttttgtcaagtgcgattttacgatccttgacgaggtactatattttccagtgtaaaatttgatatctcttggtatcttcggtacgaggagatatcaaatttgaactaaaaatttggtactacctccgtttcaggttataagactttctagcattgctcatattcatatagatgttaatgaatttagacacacatatatgtataaattcattaacatacatacatatatatatatatatatatatatatatatatatatatatatatatatatatatatatatatatatatatatatatgaatgtggacaatgctagaaattattataatgtgaaacggaggaagtacctcttattattttttaaggaccgtaaaatttctcttttgtcaattattgataaaaaggaagctttttattcttatttttatttatttacttatttatttatttatttacttttttagtaggattaggcccagcttaactggagtgagagaaacgtaaccgggcctaaaatgcctgtccggctagagttaaatctaccctggcccagctctatctactaaacagtttggttcaacgtttgctttctaaagggaagttaattctggtgtccagataaattttaataaagtaaattgaattgacggtatccgacttgtgtcaagtgcatataatgtagtacatataaactggaaccacctatacatttgtcgataaattttctcctaaaaatttgacagatataattatagtacaatcgtagtgtaattacactgtaacttacatgtaactacagtgtaactttacacttgtatgtaagtttcatgaaattttgaatcgttagatctattacaagatttgttatggtgaggaagaaaaaaatcacagcacacacatatgtgaaatgatttgttcccacgaccttcattttaccgaaataacatgttatagataaatttttgaaagttacgtacaagttacattatagttacagtgtaattacatgcaagttacagtgtaattatactacgattatactataattacatctgtcaaattttttggagaaaatttgtcgacaaatatatagcaaaattgtataaactaataagcgctcgttttggtgcaccaacttgtacggcgagtgcccaaggataaaaaggtactatatgaccaatcttgttgattaggatgtaacataagcatgtatataaaagaaggatagaacaaagaaggataaagataaatttagaaacaaagtacatcgttgtttgcaaagatagcatgtctcatgtcctcctcacatggacacatcatgtttaatcaatatctgacctagtaaggttagctacaccgtgccttttatagccttgttttgtactccctccgttccataatataaccgattttggtggaatgagacatatcctagtactatgaatctggataactctctgtctagatttgtagtactaggatgtgtcccatcccaccaaaatcccttatattataggacggagggaatacacaccaagcaagttcgtccatcaaaacgagtcatttacaagtttatacactagattgcatccatatgataagttcgtgtacagtcaatgcaatttactttacttttaaatgaataatgtcacgacttaataacaaggttttacggatttgttgttgatctgtctttgaatgagtctgggtgtcaaggagaccacattcatgcataggtagcgttgtagtagtggtgctccgtgccttcgtccgtgttccccacgctttgttgcaagaattactaataaatttttaatatgttttttaccaacaatcgagctaaaagtaaaaaagaaaaataataatgaaatattagggtttattggtactaaacttaaaatagtcaaatgataccaatgctttagtgcagaatatattgataagtatacgttaagtattataaaaataatatatatagatatgtaaaaatattgtggaaatgatatggtggatgatgattggatatgtttgcatgctgatttgtagaattcaatagattatagattgcatgcttgcatgaggtttgatatgtaattatcattagcgaatgatgatgtgatatggttgaatgttgagctttaaatttagtgagttgtaactttatagaagatatagattataggttattgtccagaaacctaaattgcaggactttgtcacttcggcttgcctacatttggaacaagtgatcaaggagttttttaccccgacatatgggtggcgacctagtcttcgggttgtagggccttgatcttgcacgctgtttttttctcttattttgtttgtgttggagtttgctggctgtgtgcactgtcatggtgcaaaggccagaagtatcctcagaatgaccgagatcaataaagcttgtattatataaaaattagaccagaaaaagaaattttgttaaatccgtaggctcttgaaacatgtaaaaatagccacgttctataaaataatgtgttttactttgagggtctgccgctcacacaaagggcgcgagtgtgccattagaaaagctggcgcacacgtgcggcctgcgggtctcacgtgatttctttagtgaacatgattttattttcatgatttttttattttttttcacatgattttttttcgtgaatttttttaatcacatgcaaatgttgagtaaaaaagtttttaaaattttagctcaaagtttaaattttgagtttgaatgtttttaaaatttaagttgaatgttttaaactttaagatgaaagttttcaaatttgaattgaaagtttcaaatatttagttgaaagttttcgaatccgagttgaaagtttcaaatcttgatttgaaaattttcaaatctgggctgaaagttttcaaattaagtttaaaagtttcaaatctggacttgaaagttttcaaatatgagttaaaaagtttttaaatctgagttaaaagttttgaaatcttgacctgaaaattttcaaaatctacgttaaaagttttcaaatctaagtataaactctcagatatgaatttgaaagttttcgaatgtaagttgaaaaatttcaaattttgatttcaaaatttttaaatctgagttaaaagtttgttcagttaaaaaaaagaaaaaacatgcgcgggaaaaaaattttccgcggaaaaaacaagaaacatgcggggaaggttttcttttcgtgttgtggaaggagaaatggagagaggatcctctgacttacttccgtctgactttgagtcactgacacccacacgtcaatgacataagttagagggaaatatgttagagccttaggctgcattcgttacctctcgttcccaacttccctcactcgttttctgcgcgtacgtttttcaaactgctaaatgatgtgtttttttaaaaaatttctacacgaaagttgcttaaaaaattatattaatccatttctttaaaaaatatcaaatacttaattaatcatctgctaatcgctgctccgttttccgtggcagggtgagaggttccagtcaggagaaacgcgtcgactggcgatggcgagcgaaggaagcagcgatgtgaagttattgcagattgccccataaccttttgaactaatcacaagctcacccctctcgcttcgcctccaaagcccctacccgccgccgccgccgccgccgccgtcgcccgtcggccgcgagccgctgattccgggtcgtctccggcgggaggatatgctccggcgtcgtctcgtgatgcgccaggtgatctctagctctcctcccgcaaacactcagccggacgcaatgcaggtcgctgatctccttaattatcttgcccccccgcctcatgcggccgcgtgattaatttcttactcgtagacgagatcgatggttcttgttcctgccaaaaggggtggaatctaatccgtgtcgctgatggatcgttgaggtgataagagatcggagattttgttctgggatttgtggtttccctttccgagggagaggttagggtttggttaattctgccgcgaagattagaatgtgttaatccggtccgagtgagaaaacaaaatcgattggtgggttatgggcttttgattgatttgagccctgcgtgcttgtgcatgacatttggcccaatatttcttcgtgtcaaatgttaggagtcgcattgtcccaaataaatgcctgtgaaattagtttattaattaatttctataaggttgtctcaactcttgtcatgatttggcagtagttttttatgcttgttttcaagcttaaagagttgaatactgaagagtataatgtctgtcgatatagtatagataggaaagagggttcgatgaaatggacccgatttaactctgctttggacactgttttgcggttcatcatacttgaatacttaattgatgtgttatacatacaattaatttgtacactctcggtctctccatgttattctcacacatagaaccagttcatttgttgcctgctatggagcacgtaatgctatcccataacacatcatttgttgtatagtcataagtatttctgtttgtctctgctcagacactctgcagaatattgtgacatttgtgaattgcgtgtcaacttccaagttctttgattcacagtttcacaccatgcgaaacagataaccttgcatgggttagttttgaattttacagttaactatcatccgggaatttacatgctttatttgactagtcagatgcaaattaaagaatcacaatttccttctacatatttcacaacaatcattggtgtgaggtcaacatcaaatgatcatattttgtgctgtggaccctcttttctgagactccgtcatacaatcagattttcatttttttttctagaatctagattgcattgcttagctgctattctaaacaattgaaaaaacatggatatgaagatggtttttttgtgcaatttgtgttgatctacatggaatgaatgctcccaagatattaagaagaattttctgtttcagtcctacgttgatgtgttgaagtgaactagttggccatgatgtgcatatcactaacataatgaatgcctaggaaaaaaggtactaaatgcatgaatgtggccccgtcggcaaatgcacttacgcatggatagataatgttgtgtcacaatcttaggcatacatctgtacttgttgaaaactacatggatctaacccatttcaaaagtccccaagcgtgtctttctaatgcatgtgaagcaactagccagatggctttcaaaacatcatggagaactgaagtacaagtttggccaaaaaaaaaaatttgtgcatccatttcagttggctttgtaaacttattagggagtgacttcagtaaagtatatacactgaggtgagtttactctagtatgtcataaatattgtttgggtgttgtacttactgtggagttctttacataggctggtacaaagagaatgttaatgtaaacattagtgagcacactagcaaagttagcatgcatgcaaccttaatgtaggattcaaagggttgttagcttttgaagtgtcatgagtatcccaattggggagttaggtatgtatcctcttagaagaagtaaatgatgttagtagtatagacgatgtgcttattggcattcggctttctagcatcattagaagcacttaggaggtaaatttgtatctgctagtagatggaaacaaccaggggtaatccatcaggctgtgtcagctatttcattaaactcaatttgggtttgcaggttcaataatttggaagaaaaagtgagcaaggcaatacttccaagtttggcatggactttatttattaccatgttcactgccttgcattagtagttcaaaattccctttgatggtaaggatgtaaaattgtgtttgctgggcttacagactttaaatatgtagttcaggaaccatgctactgattcaacatgatagcaatctcctcttttctttttccataaagaaagaatgtcatttacatattgctgctctcatttcaggattattggagcactatggatagctgtatgattttgtttcttttccctaggtcaagcacaatgaatcatattaattcacaaaatgcttgatctcattgtaattcaggtatatgcctttggcaattattcttatatatggtcagttaaaactacttaatcactactggtgcttctatgcttgcttatttcatatgttgttatttcttttcctaaccacacttaagcatgtaggaacaataacaagttagcttatcttgtttctgcaaatgctaatactttagttcaccatatttggcactatcaaagtggcagcagtgttcggcgatgagatattttgtgtatgtatacaacagtaggggatatagtaaatatgttatctggctggcaattgccaaagtttgaactttgaactctctattcagctccttttgtttttttaacaattactacctccgtttcaggttataagactttttagcattgcccccattcatatagatattaatgaatctaggcgcacatatatgtctagattcattaacatctnnnnnnnnnnnnnnnnnnnnnnnnnnnnnnnnnnnnnnnnnnnnnnnnnnnnnngcgagaggattaacacaat

SEQ ID NO: 4947 - DNA, 92053 bp, Oryza sativa
tctcatctatctcttccacttcttctctatctctcctctctttctctatgcaggggaggaggggaggcgcggcggcgctggcccggccgccagatccggcagaggcgggaggggcgggggcgccagcgccggcccggccaccagatccggcaagggtgggaggggaggcgcggcggcggcgccggcctagccgccagattcgtcaggggcgggaggggaggcgcgttggcgaacgacggatctggagccgtggcacggtagcggccgatggcgggaggggaggcggccgaggcccgacggcggcatcggtctccacctccgccgcctctgtcggcgacacctccaaccgtgcctctgcctccgcccgcgccagccggccaccacctacgcctccacctcccccctccttcccttcagatccatcaccgccaccccccgacggcgcctcccccgcctcccggctgccaacgccatcgacgcctccctcacctccaccaccgaccgcgctagccgccggatccggcctccacgaggccggggatgcgcagatctgaacactagttgtcggtcagtttgaagtttttgtgatggtgatgcggtgacagcaagcaccaccatggcagcgtgcgccaattttcttgctagggttttttcactcctgtgatgggttgcaatctatttttccttttcttttgctggattatagacatcactgacgtctcacaaactaatgggccgtttgagataatagttacctgtgatgggttctatacacggctcgttataggggctggtcaccactgacggcccttcacccgacaaaggtgaagaaagtcatcactgaccactaatctctgacgaggggccgaatccgtcagaggtgatggtttaggcccgtcacagctagcatggttcggcatagtgaggttgaaactctcgctaaatttcctccaaaatcttaggtttgtccattccataggattttcaaatgatatgataggattcaatcttttgtttcaaaggcattcatagaatttttttcctacaggattgaaatactccaaagttcctatgtttttcctctaaatcaaaggtgccctaggtttcgttgcccatatagcatgtagcagcatatcacgtaaaagttatagatttgtaataattccccacaatattgttacaacaaattgaaatagaccactaatgttgcagcaaaatgatagttttgtcaatatagttgtaattttttgaaatttaatctatatgaatacatcttttatgtactagtacatgttattggctgtttataaaacctaatgccaaaaaatagcctaagatcaagaaaatcttaaaaccaacttaaaatggctatggcagatgagctaacaagcagatgataagatacgtataatccttggaatgataattagatgcgatggtggaacaaagatgagcgcacgctttcgctaaggtggcggtccgttgcaacgaagcattacgtttggttgcatcaaaagcggcataggaaaatggagcgctgcagctgtacgtagtactacgtattcgtgccgccgtacgtgcgccccatgtctgtttcgtttaaaaatgatggcccgatgcgggcaaaaactggtagtgccactcgatcctccacgcctcctcttcctgctttcttcgcgaagagatgggagattcacatgcatgctctgatgctcgtggaagaaaaaggctgcagcaaagcaaaagagatgagagacgttttcgttgttggcactgttgcatcccgtcaccctttttctcggttttgtgctgcctttttttctgcccacttgctgcttgaactggaccatgtgttgatttgcccccctgaatcgttgaatcgtaggaatgaaaaaacagaggaataagaaaaacacaagattctgacaggaatataattgtaaaacagaggattgcaaaacacaggaaaaccataggaatgaccgtttgattggaccacaggaaaaacgcaggaatcagatgagagagatagactcagaggaaatgttccaaaaggttagacctcttactaacttttctccaaaatgtgcataggattacccattccataggaattttaaaggattggataggattcaatcctttgtttcaaaggtcttcataagattttttttcataggattgaaatcctccaaaatttctatatttttcctacaaattaaaggggccctaattctttcttgtcagtatgtttgcaatgcagaaaggaaaaagtacgaattatccccctgaactatcacggttgaccgaattaccccatgaaccataaaaccggacattcttccaccacaactatacaaaccagataaattaccccccctcgacccaatccgctgtggttttgatctaggtgacgtacgcgtggtagtccagcgtggtagtccagtaaccattctatttattaaaaaatgtgggacccacatgtcatactcttcctctctcttactctttgtctcactcttcctctctctcttctctctctcagtctctgacagcgtcgactcctacgagcacatccgtgcagaggagatccgggcgctcgttcgcaacctatttggatgtgccagccacgccgttgccgtgcgcgagtgcctcgtgaacgcgacgctgcggaacatcctccacatgtcggtcggcgagaagtggtcgggcgtctacggcagcgctgatggggaggtgttccggcgcacggagagtagcgcggtgacaatggagtgggcgatggcggagctcctccgctgccccgacgccatcgccaccgccaccgacgagcttgaccgcgtggtggggcgggcgcggtgggtggcggagagcgacctgccggacctcccctacgttgacgccgtcgtgaagggggcgctgcggctgcacccggtgggcccgctgctcgtcccgcaccacgccatggaggacacggtggctgcttgcaacgacgtccctgtcggcacgcatgtactggtgaacgtgtgtgccatcgcgcgcaacccgacgtcgtggccggaccgcctagacgtgttcctgccggagcggttcctccctggcggcggcgccggtggagtcccctgccgccatcctccgcatcacccaccgccgaccacttctccgtcaccatcctcgtcgtcgtcttcctcatcccccgctgtcgcagcctccgcgtcacccgccgcctccgctccgtgtctcccgccgccgccgacctgtgagagagagaagagagagagaggaagagtgtgtgggtcctatatttttttataaataaaatgttgactgtactgccacgcatacgtcacgtagaccagaaccactgtggattgaattgggggtaattcgtccgatttgtgtagctagagatggagaatgtccggttgtttggtttagggggtaattcagttgatcgcgatagtttgaggagggataatttgtactttttctatgcagtaacttctgaagtacaacctactcctccaatagacttgtctcattagctcacagtactacatccgttaaaaaaaaagctaatcttcagctataaatatagatagtctatatccaaattcatagtgaaaagttagtttttttccgtgaaacggaggaaatacggtacttatagagagctcatgatgtactgtcgcgtttatttgttcgtagcagcttattcattggtgacggataggattcatcggaactcggaggatggccacgctacgctaccattgcgaacggaacaacaatcggtgtgagagacagaaggccgcattttctgaagatattaaataaaaatctgatctttatattcaccgccttacaactgaataataattaaaaaaacacaggactagaatactaagcttcgcatctatatatttttcgtctttagtccagcttcaaacttgctcatttttccttcttaagacaacagtgcatcactcattctctctattatatcaaaatcgtcctgccaaagatcagtttttcttttttgcctaatgagatttacagcacaaatcgtttcaggaaaagttagaagaatttgacaaagatcagaattagttacttgtcataaactattatatcaaaatcgtcctgccaaagatcagtttttctttttttgcctaatgagatttactgcacaaatcgtttcaggaaaagttagaagaatttgacaaagatcagagttagttacttgtcataaactattatatcaaaatcgtcctgccaaagatcactttttcttttttgcctaatgaggggagtaggagtatcagttttgtttggggttaaattgattttggccgttgttttcttaaacgatgtcagagtgaatcaattttttaaaaaaatcagacggtacagctctgatactaaataattagattattcagaaaatattattgaccaatgtactatctccaaatcaaaatcaatagtagttatgaaaccgacagttatgtttatatgtgaacgggggagtattacgtgctactacgcaagtatctgctcgtgttgtggtgagtttgttatctgaatccatggtttcctaaacctccggggctggggttaccgtgtcctggcggtaagcacggttaccgtgcagtaaacttggcaaaccgtgtaaaatttatcaaaattttaaaatattttttaaatttatggaggttactgtggttttcctttaaacatacctccgcggtaagcgtgcttaccgtgcggtagcatacacaaattttgataatttgatactttacagaaactaattttacaaatgaatcgtggtcaaaacttatttcagaaataaccattttgttcagcgccaaatcgtatgacgctcaacttagacacctcagcgtcacgtcaactggtgctgaatgccgtgccactacagatgggaggctgagtcggcatgccaacgtatatccagcgccgtgctatttggtgctgagatgtctaaattcagcgccatacgatttggcgctgaagaaaagtgttattttttaaataagttttgactataattcatttgtaaaattaattttttaaaggctcaaattgttaaaatttgtgcggtgaacgaggatgcgatgatggcggtgattcatcggctcagctgctggctgctcgctcgcccatttccccggcccgtgtcagacaaacacagagctcgccatgcccggtgcggcggtgccgggagctgtgcgccgaggagacggcagcacagaaaggggatggatggaaatatggaatgctgtaaggcatacatcaatccatcaccccatgcacatcatgtgtagtactaactccgtcccaaaataagtgtagacgtagatattcgtgtctaacgtttaaccgtccttcttatttaaaaaatttatgaaaaatttaaaaatatttagtcacacataaagtactatttatgttttattatctaatagcgataaaaatactaatcataaaaaattttcaaataagacgaaagatcaaatattaaacgtgaatagtataaaactacacttattttgtgacggagggagtacttgtccagactacatctagctccaacgagctgcagcgagagagatgagatgagcacaagtgaactggatatttttttcacattttagattttttttgaaagattattttacaaataaactcctaaaaatatttattctgaaaattaattcttttttgccaccaacatcattagtgtcgtggtccaacatgataatgccaatgacattgatgtcatcccctagtctccccgcagaagatacagtaagttacgtatacgaaggacaacggtgccaatgagatctaaaatgatttatttgtaataaaaaatacaaatagatccttggtgttaataacactgatgttgaggacttatttgtaaatttttgtattataaatatattcttttattattatttttaaaaaataggtgtgcatggatgatgcatcgacgagaaggctagttggcgatcaatcacgcgcccaccccccctccccgcgcgactggacactgtcacgcgcggagagggggcggcggacgcgtgccgcgggtgaggagggagagccagttttccttttttttccattttttccgtttctgttcggttgtgttttcatttttttttccggtttcttttctgttttttcccggttttttattttttatgaatacaaagtttgtattcgtatgtataccaagtttgtatttatacgtatataaagtttatatacacgtatgtaaagtttgtatacgcgtatgtaaagtttatatacgtgcatgcaaattttgtatacgttgtgtattttctattttttattttttaatacgtatgtatataaagtttgtatttatcatatacaaagtttgtatatgtcctatataaactttatatacatcatatataaactttgtatatgtgtatatattttatatatattaaaaatatatttatatgtatatatatgtgtgtatatatagtatatacatacgtatagaaggctgatcgcgtatcagccgtccccatgcatcgatataagtgatttagcttccgtgggaaagctagcgggatctggcgccaataacgttgacatagtaaaaaatattcattctcagattaagtttttttaaaagtttatttgtaaaataagtttttcaaagggacaaaaagtgaaaaatgcagcacaactgaacacagcaataactcacgtactccagggaagaaaagaaagagaaaaaggagaggtgagggtactggtaatcaatggaggccgctgccacccctgaaaagggccctgtccttgcaaacgcaccgcacaggctccaccaggctcacacagacactgttgaacttgtttggagagcttcttccataatcgaaaactccctaaacattttagttttttcgtttaaattctaaaagactttaggtatagaatttagaaaataattaaactagaaaaaactgaaaaatttattcttttcaattttttaaaaactgagtgccaatcaattaattctcagaatttaattttaagttctcaaacaaacccctctttctcccctctcccaacccatccatcactcatgcacgtctcactcagtgtctctctcctcctctctgggcatgcatgcatgcggctacgctagctagggtgaaagggagatcatcacgtggagagagatgcagatagtagcactccagattacagattgcagagagagtgattggcagagcggcatgcccctcgccccaccactcacttggcatttctctatcatcaccatgtactactcctactgtcctacaaggacaatgtacggcgcaatgctttgcttgatggagtatactcctatttaagatcgaatcttcagaaatttcactgaaaatctaaccatcctgcagaatcactagtactatagcgttaatcgtgttctgaagattagagtggtagtatcgctttaggtcctgtttgggaagaatatgctggttggtagctagcttctaaaaatcggaagaagctggattttctacttctgaggtctagtttattttctagattttacaggtatagattctcagaatttaggtgacaatctgaactgtttggcggagctagaaattctgggagaagctgcagcagttaaaaactccccgaaacagacgcttattttcgtgtgtactccagcatgcacggatacacactctcggaggctcggagcttgcttttttacaccaggatttgcagagcaaggaatccagtagaaaagctcacagcttcacagtacgacagcgagaaccaacggaagaagaagcagcatttgcagcaaacaaacttctaaaactgacgaagcatgctgatcgaatccgctcccaaaatgcagctgctgtttactgcagcaagcaagcaacagtggcccctatctcttcctgccatcgtctcccggttccaggagatgcccatgcctctactactctctgcagtttcttctgcgggcaaaccgatctagctcgctcgaacggtgcaccggtgaacgcaccgcggcttcgttttcctcgccggtgaaacgcaacgacgacgactgcgacggcgacgcctcgctgtgaaacaaacatatactccggcctcgggattactgtactatggtttggagatcacagccgcttggaataaatgtggcatgtggaagagaaatggtaaagagaaggcaatgccttgggagggatgcttatccattctagtaggagtactactgtactaccgatgcagtcacgcagggattctatatgctttttcatcatagatgaatggcttgagagggtttaaaaaatcacgtgcactaaccttctcagttttaaaattacggtacacctcgtgatgatcgttaaaccgtgggatggcgctaactccacccagaacggtttggtaaaccctgcacattgtaggtcgttggcgaaatagctatgagcataatttgccccgtttgaagggatgatgatgaaaattaaattagcgcacgcaaaatgagtaaaccattaacgcacaattaattaaggttagaaagttagaaaatatatttatttgatattgtaatccaactactatatagaatagaaaattttcatatgaaacataccgtttagcagtttaaaagggtgctaacgaaaactgaggtcaaatatgtatcttagcgaaatgaaaaattaatgaaacaatcgaaaataatctaaagataaaactaatatatttacgtgattagtggtttaaaaagaaatattgaaaaataaactataataaaaaaaccctaacattatatctaaagttaagtttcagatattattttttggttccaactaataagctaacaagcaaacgacaagaagctttgataatagctatcgtactttcatcaacaattttgggtgtctaataaacttgtaacaagcaaacaataagaggttttggtagaattgtaccttgatcaacaataggctttatattttttttctattacacagaagacattcatagcatgtaatagaagtacagatactactatcatattgatacatatgttcaccactctatatcatacggagtattggctagatttatttattgtaactgttttttatcttttatggctaaattgcggaaaatatttaataaccattgatgataacttgggtatctgtaggaccaaaatccaaaagtccaaaaatcatcactcctcactacgcgaatatccacagctaaataatgcactcatacaatttttctttaagagagagggagtacaccgattggaatttccaaatttatgcaaggctttaaatgagaagggctcactcaactgtagcatcatacctcaccatgcagagcgcaacagtatgcagccatggtagcttgagccccattcccaaacaccacgggtgacagtgtcacgtggcgatgcacatcgtcaccatctcatggccaaaaatacgccagcctctccaactgttaatcatatccacagtgcacgttgccttcgctgtgcactgcatcatctctactgcaactgtcgctgcaacagaaaccacagtagcctcggtttttctaccaggacacaggcacacagctgttgcaaggctgagttgggtgctaaaatttctcaacttctattcctttcgttctcacattttctaaattgtaccatgatatattaaaaagttttataaaaaattatattaatttatttttaaaacttttagctaatatttaattatttatacgctaataagacatctggttttccgtaggaggaaagttagttacgaacgaaaacactcttttgacgtaatgtcaaagagacatgagtctctacctagtgggatccatccctatggacccacaagtgactcaccctaagggcatcactaatgtatatgacaaagtgatccatatagatagggcccatataaatagtttttatctatggtaatctttacaatgtatatagatataaggtatcactaagagaagagagatgagtagaaatagataatataatttatttcatgtggaaagtccatatctatatgggtaacttttgttattttttatatatggactattctattgcttatggactacttctacactatactgtggatgtcctaaggttgtgtttggaagtgaaggttgggaactctcgtctctccgcacataaaatggagtaatccatagcgtattattaatcgagtattagctaaaataaacttgaaaaataagttaatatgattttttaaaataacttttttacaaatatttttttaaaagcacacgatttactagtttgagaagcgtgcacataaaaatcaggagagtgttgaaacacggcctaaacaattttatatcctggatttataacatattattaacagtggttattttatattaatctaatgagagaatctattctatgccactgagtttatcccagttcaacaatttggcactggcattgtctctttctataatataccgatgactttatcaattgttgtacaatatgctattgggatggacatcttttttaaaaaaatatccaaaatagccttagagacatacatggttaacaattaatttatctcgttagaaagtttcaggaaaaatatgaaattttctatatggcctccttacacaacattgaagtatgtaaataagtttcattttttttggtatttttaatttttagaaaaaaatattttgtggtatatcatagagaaatagattacacaaaagataatagcaaaaaatatcttatgttgcatatgaaatatagtttacattcaaaacaacaacacaaaaaatattgtatatatcatataacaaataagttatattttaaaaaaatagaaatgaaaaaaaataaaacttgtatacaaacttttatactgtgtaaggagtccatataaatgttttcatatttttttaaaacttttaatgatataaatcaactgttatccttatatatgtccataagggtattttaggcattattgaaaaataagctcaacccaatagcgtattgtagagcaattgataaagtcgccagtatattgtagaaagagagaaagtcagtggtaaattattgaactactataaactaagtggtatagaatagattctctctaatctaattgaaagtttcagtaactagtctctgcaaatattagtcctggttaacctggacttgtaaagatgagaataaatagagaagaataaataaaaggatgagaaaaggaggcaaaagctggagataaagaaaagcgcggccctgacatttcctgcaggagcctgataaacatcacgtttcgtgttggatcaatcatggtgtgctgacatgtgggggtatagtgaaccctggccccacatgtcggtattggcttaaatcggctaaatttagtcgtgtgtttttcagttgacgtgcttacatttgctaatccagccaactgaagtttagttcaaagtagtccatgtatttccagttagcgttagcttcgttgattttttgcacattcatatgtttgaaaggaacctttagacagaagagaacagtgaatatggttttcatttttcctgatgaactgaaaaaaaccacattttccattatccattacaaaaactacattttccattatccattacatgaaggcccaactgaaatccatgtttttttcaaatcaatctagtctgagtggaatatatggattgagagtatacttatactcgttttattttttttttgggggtttgatatgaaaaaagtgataagaaggattgtgatttgtgaacaagtatgataagaacaagtactctgcatgatttatgaaactatatatttgttgcttgtttactattagaaggtctacatatgtgaagtactcctttcgttttaaaacataacaatataatatcggattagacacaatcgttcaggtttatagtacttgataatatcaaatcctagttggtctgaaaacatataaggagattcctagtaggtcgaagcaaagcaaggaagtggtcaaggggatcctgcaagagtttcaaagggaaattcgaacaattttttgagttcaatatcacacaattatctggtactacatccgtcccataaaaaacgaatccagaattggatgtgacatatttcagtactagtatatgtcatatctggtactaggttggtttttttataggacggagagagtacttgtcatggtaatctcatactgtaaggccttgtttagttcacccacaactttcaactttccatcacatcacatcatatctaaaattttcctacacacataaactcctactgcctccgtcccataatataagggattttgagtttttgcttgtagtgtttgaccactcgtcttattcaaaaaatttatgcaaatataaaaaataaaaagttgtgcgtaaatactttagataataaagtaagtcacaaaaaagtaaataataattccaaaactttttcaataagacgagtagtcaaacagtgcaaacaaaaactcaaaatcccttatattatgggacggagggagtaacttttctttccaaactaccaactttttccaaacttttaacttttttcaggaactaaacacaccctaagtaataagcctattagtttttaaaatgtttatagtttttcttggtaatctcgtcgttcgcaaaaccatggtaggataacgatatttcctaccaaaacagtagggaaaccctggcctcctcggagctgtggcagagaaaaaaaagaagacgggtaaattgcatcaaccatacacgaatttatcaagttgcaatctaatacataaacttataaaatacttgtttttgatgcacgaacttagaaatatatcacgtacgtagatactaaaaggaaagccatccctgttataacggctagagaaataaaccgtcaacggaaaacaacctaattggaactgaacggcctcatcttttcgcttatgattatgcttatcagtcaaaatttaaatttttgaacttaaatttaaagttaattttaggattttttttcatcaaagtcttttttcagcctttacttttagatcgtaaagaacacatatataaaagttttattcacaaaattattttttatttacaaatatgatgggtctggaagctgctaagcaaactaatcatcgttgtcctcggttaggtctcatccttactgcgtggttcccgtggcgcatctctctattctatttgcagctcaatcgttttggaattgacttaaaatcttcatgcttataagtaataaaaaatcatctatatataaaactttcatacatgtatgttaaaataaattatgacgtaagaactaaaaacattcaaatcaactctaaaaattaaatgttaaaattcaaattttagctttggctagtaagctaaagaggaagtgatcgagctgatgagcctgttgaaacacacatccccaaacatatgacagcatcaaaatatcaaaattaaccaaccccggtgttttgaaacgcatgaatcgcgccccccccccccccacacaaaaaaaaacatcagggtaagtgataaaaggcattttctacccatcacttgtacaacaagctaaagataaattaaaaaatgtgaaatagttttagcttcaggctttaaattttcatacttctagcgtaagaatatgattttctattttaatggttcaaaagcaaagactgagaataaaaaaataataccacctaaattaacaccaagaatcaaagattaaaatataaaattgtctagacttcgctgtataaaaaaggggttaattggatccatggactacaaatatatcattttagctaaatgccactactattcacgatatcggctacgtgacaatggaattaggggagattggcccattagccccaactccatcacgtttttcgtgaaaaatctccattagccctaactgcacgtgggacctacctgtcacttccatctatacctccctcccttctcttctctttcccctctcctctctctccaccaccgtcgcaaccgccgtcatcgaccacctccgtggtgggaggcctcgggagccgccgccgccaccatcctcgacccatccgacgtgggagggctcgggagacaacaccgtcctgaacgctattcacgacaggaggttcgggagccgccatcctcaacgccatctgcaagagagggctcgggagccaccgctatcgctgtcctcgaccccatccgtgacgggagggctctggagccgccgccgccactgtcgtcgctatcctcgacgccatttgcgacgggagggctcgggggccgccgcccgcatcgccaccttcgtctcctcgacgccatccgcgagagagggctcgggagccgccgccgcctccctcgacaccatccgcgcgggagggttcgggagccactgccgccgtcgtcactatccttgacaccatctggaacgggagggcttaggagccactaccgtcctcgacaccatccgtggcgggagggatcgagagccgccgctgtcgttgtcactgtccttgtagcagtcgcggcatgaaggaagagatagggaagacagaagagggaggatggaggaagatggaacaaacatgtgggtcccgcgtctaggggtctaacggaaaacgtgatggagtggcacggttccaatttcttcaaatttcagtggcacgtaactaatatcatgaatattagtgtcatttatctaaaatgtcatatttgtaatggcatgaatccaatgaacccaaaaaggactccaataaacaaaggctaatcttgtatttcctcgttcttctctactctctccgtttcataatataagggattttggaggatgtgacatattatgggacaagaagtatatctactattgtaaaaattgaagatatttccactgatattttggtacgtcgtctattttttagtcggtttttaagttctttcgcttttggaaatacataaggagtcatataaaaaatccttaaaaaaactcacatgctatcttgtaacgagagtcgtagtcctaatttctttggaattcttgtctggcataagaaagcaacgtacaagatatagctatcatcctaataagggttctgaattagatatcaatattatcaaattaaaaatcccatatactttttagataaaaaataacaataatatgattaaaatagcattcacctgttacaatgtacgggtattttttcccgtaaaatatagagtaagagagtagaatcggatgagatatatccagtactattgtgctccctccgtcccaaaaaaacgaatctaggattggatgcgatgttttctactactatgtatctggacagatgtatttccagattcatagtactcgaatatgtcatattcagtactatgttgggtttttatggtacggagggagtaactgtggacagaggtaataataggacaccaatatacagttaggggctgtttagttcctaaaaacttttccaaaaaatatcacattgaatctttggatacatgtatggagcattaaatatagaaaaaaagaaaaactaattgcacagtttgcatgtaaatcacgagacaaatcttttgagtgtaattagtctatgattagccataagtgctacagtaaccccacatgtgctaatgatggattaattaggcttaaaaaattcgtctctcggtttctagacgagttataaaattaatttttttattcgtgtctgaaaacacttccgacatccgttcaaaccacgtacaaatttcaccgactaaacatgcgcttgctagctactagttgaataccggagtaaggtggtgtttggttggagggactaaagtggggctaaactttagtccctcttataaaaatataagtccatatggtaaagacttatattttaatgagagagactaaattaagtataaactgcatcagctactcgtaagctacacttatgagtatactcgactgatgaaaaatatagtggaccaccacatgtcataggcgagtgagaccatgctcctcgacttgcgactcgagttctactcctaccaactctaggccaaccagatagatactgagaaaaaaaaaacaacgacactgatgtgacatctcagtgtccatcggccatcgcctccttttctctctcctctcctctcaccatcttctcctacagcaaatcactcttctctctctctaaaaaacttcacaagcctactagcctactactaggcacgtagctagcccctgccactctatcgcccagcacaagccatacagctacccgctgtcactgcgccagcggccgcagctgcgcaaagaggagcgcgagaacccaagaaaccaaccaagagctgcgtcccataaaggcgcgctgcttcaatccatccatcttctgatcttccatatacttcgcttcctgtaaatgtcatcgccgccccggcggtgcctcgcagcggagcagcagtggccatgacgccggcgccggcggccgcctcctaccgcgctctcgtcgcgctcctgctcgtcgccgtcgccgttgccgatgatggtgggtggatggctggctagctagctggctgttggttttcggttttggttggtttcttgctggggggagtgtgtggttttgtgtactggggagcagagagattcaggggggagttggtttgatgggattagtattttattagtgttgcaagtactcttcctttttggaggcatggtgattctcttgtgggtgatagtcctactactattttttattgtcctaagatctccctaagaagagtctaatactttaactaatccttgtgagtgagttgtgacaagtgccacttccatctcttctcttccttcttgtactagaacacagttgctggcattttgtttatggtggtggtagccactaggtaatccaccaatatttcataatgtgattcttttttttttcactttctgttttgttctacaagggactccgttctgctttggtattctgttacttatcaagaagtcgtctggccatttttgaatctttgtgctcattgttcaaggaaggagctttatttcttcttttgtatgttactaccaatctgatgagccgaatgctgctgcccgcgtcaggaatctttaggctttgtagcaaccttttactttactattgtgctgatttttgtgctttccaatctgatgttcttgaactctttttttttttgtcttgaaggctaagaaacataaatctttatttattagtactactacgtaaatagattttttccggggcgaacaaatctgtgcagattgtgctgttctagaatccatttgctgttgcaggcttgcagtttgtgatctgtgttctaatgtggctgtatttgcattcagggtcgacgctgctggagatcaagaagtccttccgcaatgtggacaacgtactgtacgattgggccggcggcgactactgctcgtggcgcggcgtcctctgcgacaacgtcaccttcgccgtcgccgcgctgtaagaagaacaccaccgagttcgctacttttcttgctgacaagtccactggttcgtcactgatcatgcctgttgattgcaaagcagcaacctatccgggctcaacctcggaggcgagatctctccggccgtcggcaggttgaagggcatcgtctcgatgtatggaagacgtggtggtgtactttgttgttgtttggaaatgtggcttgctggtgcttggactcgcagtaacttgtgagcttgggtttgtacctgcagtgacttgaagtcgaatgggctgtctgggcagatccctgatgagattggcgattgttcatcactaaaaactctgtgagttgtgtggagtgtggacggcattatcgatttcttcttaacttacggagagaatgtgggttgatacatgtgtttggttcagggatttgtctttcaatagcttggatggggacattccgttctcagtatcgaagctgaagcacattgagagcttgtatggcctattcttgctggaattcatttattataagcagtgttgtatggacatgccgatcgtgttctgtgaaatagttttattcatgtgccggtgtttgtggttttctaggatattgaagaacaaccaactgatcggagtgatcccatcaacgctctcacagctcccaaatttgaagattttgtaagttgcgcgaaacttcttatttttgtggtgtttaattaccgtgctcccagttttctaattgttgtgtgccctgcagggacttggcacagaacaaactgagtggagagataccaagactgatatattggaacgaggttcttcaatacttgtaagtcatccttattttgcgctggaagtttgaagattgtgcagtagttctagtatatcagtattttattgtattttagttatgtacctacttgaatgcgatttctttttttttcttttttttgaaaatcatttgaatgtatttaagagcatgtcaaaagtttgttaagctggtaaaaatctatattgactttatgtgaattcactagcattttacgcaagttgcgttatgtaaaatactcatattttttttatgaattgtggctgaattaatattatcctcaggggattacgcggtaataatttagaaggcagcatctccccagatatatgccagttgactgggctttggtacttgtgagtatatgcatactatgttttcggcaaaatttgcctcgagtccaccgtattgtacttatgtttcaatcatttggaccagtgacgtaaagaacaacagcttgactgggccgataccagaaaccattgggaactgtacaagttttcaggtcttgtacgtatttgcagcttacccctcttaattacaacttttctgcttctgtgtttgtgaggttttcctaacatttctttcatgttagggatttgtcttacaataaactttctggatcaattcctttcaacattggtttcctacaagttgctacactgtatgtggtgattatcttgacaaaaaaaaactcaattaaatgtttaatacagtttttgctgatctgcatgattattcacattgtttgaattagatctttgcaagggaacatgtttactggtcctattccatcagttattggacttatgcaggctctcgctgtactgtaagtacaatgatgaactgaatattcatcatacaattggttattgataaatgaagctttcaagatattttaattcatcaatataactttactcttccagggatctgagttacaaccaattgtctggtcctattccatcgatactaggcaatttaacatacactgagaagctgtaagttttcttttctcctaaatcgttaggttgtgaatattttccctgatagattttctactgccagttcatagttaaaaaacaaaagccttagaaggttctgcttaggaatatttcttgtgtaaattaatatgttatatttgttccaataggtatatgcaaggcaataagttaacaggtccaataccacctgagcttggaaatatgtcaacccttcattacttgtaagtgcacgttttattttattcccatagcatattctgatttgttgcgacctgatttatgtcattgttgactaatttcagagaacttaacgataatcaacttagcgggttcattcctccagagttcggaaagctaacagggttatttgacttgtaagctcttttttcaaactcttcaaaatttgttatgttttctataatttattagtaaaacaagcggcttatcttactctttgcttcacagaaaccttgcaaacaacaactttgaaggtccaatccctgataacataagctcatgtgtgaatctcaatagcttgtaagcatgatttaattataattgttatggtggaacttacaatttcagatgcatgtatctaatgtggattttctttacagcaatgcttatggcaacagattaaatgggaccattcctccttcattgcataaacttgagagcatgacttatttgtaagttgtaacaattttaatttcttaaattgtgttgttacattatttttccttttgaacttctatacttgtttaatttttgtatttcacatagaaaaaccttgtttcccatgtttgattagtaccatatgttcatctgttcttttcttaggaatttgtcatcaaattttctaagtggttctattcctattgagctatcgagaatcaacaatttggacaccttgtaagtcctgttagctccatctatgaattcgaaaatatctgttctatcctattgtgtgtgtgatgaggtacctgtatcagggatttatcctgtaacatgattactggcccaattccatcaaccattgggagtttggagcatctattaagactgtaggttttgttgtccccatcttgtatgtatctattatagtgtcttacagtgtttgatgttattgaacttgtttgttcagtaacttgagcaacaatggtctagtaggattcattcctgcagaaattggcaacttgaggagtatcatggagatgtaagtatttgcttaggtgtgaattttttaaccatctagtcccataggtactataccccatatttgtggtttttcagtgatatgtccaacaatcatcttggcggtttgattcctcaagaactcggaatgctgcaaaatctgatgttgttgtaagtagtacctttcatgtcagccttctttttaaacccataaggacattgaatctgtagcctgagagacatctgtctatcattctcagaaatctcaaaaacaacaacataactggggatgtctcttcactgatgaactgcttcagcctcaatatcttgtaagttgaataaccagaaaatttttgaagcatatgctccagtatatgttttttgctcacattatctatctgttttatgatcagaaatgtatcctataataatttggctggtgttgtacctactgataacaacttctcacggttttcgcctgacaggtagtgtgctccatcatttccatcactatcatgttcatttactcagccttggaaatagcagtttaacaatgtgatacttttcttagctttttgggtaatccaggactttgtggatattggcttggttcttcgtgccgttcatctggccatcaacagaaacgtaacaaatattccattcatatcttacataattttttcatacctaatagacaaagtcaacttttcgttacctacattttatttgcagcactaatctcaaaggctgcaatacttggaattgccgtgggtgggcttgttatcctcctgatgatcttagtagcggtctgcaggcctcatagtccacctgttttcaaagatgtctctgttagcaaaccaggtaatgcatctgcaaggagttttgctcaacaaatcaactcatttctctcctgccaagttcaatattaggatactatcttgtccagcaattattgtatttagtcaattgtttgtttttacctgataactgggttaatggtagagcaacactaaagcgctgtatatttgctgtcacagtgagcaatgttccccccaagctggttatccttcatatgaacctttcccttcttgtatacgaggatataatgacgatgactgaaaacctgagtgagaagtacatcattgggtacggagcatccagcacggtttataaatgtgtttcgaagaaccgcaaaccagtggcagtaaaaaagctatatgcccactatccacagagcttcaaggaatttgaaactgagcttgagactgttggtagcatcaaacaccggaatctagtcagtcttcaaggatattccctatctcctgttggaaatcttctcttctacgattacatggaaaatggaagcctctgggatgttttgcatggtaagtgccgactgccaactcattgcacagtttgattgtcattgcaatttgcacagaagcaccaacatgccattctcaaaagcatgatatttgacacattgatatttgcttctgttgattgcaataccaaattgttacatgacatcttgttaccatgttaaaatcttttttttcattattctagaaggtccaactaagaagaaaaaacttgattgggaaactcgtctacgaattgctctaggtgcggcccaaggccttgcttatcttcatcatgactgtagcccacggataatacacagggatgtgaaatcaaaaaatatactccttgataaagattatgaggcacatcttacagactttggcattgctaagagtttgtgtgtttcaaaaactcacacgtccacctatgtcatgggaactattggctatatcgatcctgagtatgctcgcacctcccgtctcaatgaaaagtctgatgtctacagctatggcattgttctgcttgagctgctgaccggaaaaaagccagtggacaacgagtgcaatctccatcacttggtaactatgattcatgctcttgtgattcttctgttaatctgtcattttcttcagcttattttactttggattctggtagccctcaataattgctgaatgatgcccattaggcttgtgttcctacatggggaccaacaacatgaaacctatcctgtgagtagatctatttgcactgtttacgtgtggtggattgatccatcgcatatggctgttgaaagctccattatcaattgcagtgtttaagtcccctaaagcctgccacttttgtcccctgtcatcaattatgtggattgaaagctacaatttagtgtcataaaaattcctcttgcagccatttacattttttacgccttcacttggcatttaaccgacctccgacttggagagtcaccctaatttctcattgattttacatgcttatatggcttttcatttatcggttttccttgctaatgtacagactgttacaattcttggtctactgttgcaaatgcagatcttgtcaaagacggctaacaatgctgtcatggagacagtcgacccggacattgcagacacttgcaaggatcttggtgaggtcaagaaggtgttccagctggcgctcctttgcaccaagagacaaccatcggatcggccgacaatgcacgaggttgtgcgcgtcctggactgcctagttcgtcccgacccgccaccgaagtccgcacagcagctggccatgccgcagcggcctgctgtcccgagctacatcaacgagtatgtcagcttaagaggcaccagcgtgctctcctgcgccaactcgtcgtgtacttccgatgctgagctgtttctcaagtttggcgaggtcatttctcagaacacagagtagaatagtctgcagaaatcgtcatccgatcttgggattcaggcaagcagctggtgaagctaatcaaggtagtgaagtgaactcacgttttgtgactttgtccacatgttgggtgcccagaaaattaacaagagaattctcaagggttgtggctggtgttctttactgtaaaaaaaatgcgtcctacttctttcttcttcctttttttttatctcgtttttgtctaacttaggaggtgtccatgaatctagtactaaatctcaagacagcttcttctgttctgtaacatttctgggattggaatgctggaactggtattactaatagtctctcggtttggacaaattcgcagggtggtgtttcagtttcagcatttctgttttgcactaacatctgtaatggcatctgatacagtagtagtagcaatatagtactcctagtatagcatatggtatcctgagaaggtataattggtcagtgtgacacctgaattctctcttggattttctcatctcctggcatcgccatgtgcttgtattgtaccgttgtcgccgagcccatggaggcatcgtcagtcagtcagggacggtgtaaatgatgcgaggctgtgcagcgatgctggggccggatgggagagaacagtaggggagttcagaagagatgaaggcgtactgccatggctgcctgagatgattgattgatgagtgggccaaggaggatgggcaggggcggtgcgcaatgcagttctcgtgaactcggggtactgaactcaggacgcatattccaaacccaatctagtcgcacaaaagcaacccacaacgattttttgatggaaaaatattgagagtggaagggaaaatgctcaaacttagcccctatctggtactccaggaatgtagcaaccaagcagggattggacacaacttaatacaacgtatctgaatagatcacttgtttagtagctactccctccgtcccaaaaaaaaaactcaatctgactcctcttaggacaatgtatctggactaatgatggtcacatcccctcctagattaagctttttttaggacggagggaatagattctaagaatccggattctatcttctactactttcatcccaagatataaggagttttaggcttgggtatgtggtatttaaaaagtaggtggaatgaaatgtgagaatgttgtgattggttgagaaaaaaaattagatagaaaatttttaaatgctgaaaaattgttattggttgaaaagagaatgtagatggagaagttattatattttaggacagtttgaaggctaaaaattgttatatttttggattgtgtaacagtagcttttccgaatctagattataacttgggagttttttattctgagaaaagttacggtggccggaagctcctccaaataggttcttgatcacacttcaaagtccaaagatcacgattcctttgaacacatgatttttaaaacaaggaataggataaaagcataagaatagattatcacaagctatgtaatattacaggattttaaaatactatatatggacactataggtaacattttttgatggttcacagtaaatagaggaattttggaggaaatcatacgtggaagagtagagagaaagagagaatgtgcattggacttagcaaagaaaaataaaatatgaaatgtgagctcatgctaaatttcctaagaaatagggtgtaagaattgcaatacgtaggaatatttagtcctattcctttgatccaattttttgcgggccagacgggctggcatgcttgcctctggctcaacacggcccgccaaagtgttgggccgttcgtagtctccctgctcggcacgttgggccatcacagcacggcccgtttaaccaatcgtgcctaggccgtgcggcccgtttggcccctttccttttcccacgcttcgcccccacctttggctcctcgcgttcgtcgccggcgccgccgcgcagcaaccagcgttcccctccccctccggcgatgagctcaagccgacgaggcggcaaggaggcgaggggcgccgcccccggctgcgacgtccgcagccgcctccctcctcaattcgctccccaccacatgctcgcgagcttcctcctcgtcggccaccgccgaccatccactgcaagggggtcgccgcggtcgattcgagcggaacgcggatctcccccgccttaccagcagctggtccagctcgacggcgaagcggccgatccggcggtggcattcgacccagcggctaggtgctccaatggcgggattgctcggctgacttctctgaccaccgcctgctgctgctttcctcactctgacgatgacgattgttgtgaggattgtttacttctcttttacatatctcttcttaggatggggtattcgagacttaaaaaaaagtaatagtaaaacaatagttataccgttagtaaaaacatacagtttctaattcaaaatgcaacaaagaggaaaaaaaacaatagcaaattaattttcttgatttccatagtctgcacttttcttgcctccaaatcttctttgcgctcttatctgtattgctcatctattgtgcaatagagtcacacaacgtaaatgtaatgtttgcaattttaggtgcggtagcatgtaatcattataatttactaatctgattcagttttacacgttcttggtcttccctactaattcactactgttttttaggtcatgagaatcaagctgcactaggtgagaactagaaaattggcgtgcccttggcgctcttactacttacaaccaatgcatataggcatatagcttatggtcttctttatatgttggttaataatttatgaaaatatcatgaaaattttttccgcattgaacaaactgatcaaattaccacagattatgcaatcaattatttgatttacagcatttacaagctgatcaaacaaagaattatgcaaccagcacaaagattttcccaaaggaccacaaatcatactttatttcgcatcctttacatcatgtacacaacatttggcagattttcgacctactaggagatcagatcatcatacgaatcaaaatgtcatctttgcagacagttaagctcctacagctctgagcttttcctccttattcctacctttggttagctaatgaatcaaaaatggactgaaaatttactctctttagtcctgcagctctgagctatcttcataaagaaaaggggcatatgagggcagcagaacagcatccgcatcggcttgctggaaatttcttctgagaggaagaagagcagcggcggcatcaccagcgtgctgtccgacgacggggagctcgcgtacaatatttttgtgctgttaattagtacaaatttcgctttacaattaattgagaattgactaaactgaaaattataatattgctgcaggagaactttaccggctgatgtgtttctgctccattgactgacctatccaacccaaattttctctttggacagacattggttgtacattctgaagataaataaagggttatactcaaatatgtggagatgtctaatttctgaaattacaacgcaacggcattcttctagaattaagtggatataataccactgaatattcttgcgataagaaaaatatatgaataaggaattgagctttgacatgtgttcaggaaaattaaagcactaaggaaatgtcataaaaatttgactctgtagtatttattaaattgactcaaattcgttcgagtataacggaaagttagtgaaatctgtgaaatctgccttttcttctgtctagacataatatattatttggtgatttataaatcagtcatttaaaaaatcgaagtagctcaattaactaaaaatagactatcttattgatcatactcgtcatataactacaaaagagatgatcggcgttgagctatcgtcgctacaaattacagaaagttgaagtgtgtcaactggattttacaatgtgcatatgctcatatactgtcgaaaaattatccaacttctcagctctagccatgtattgtagtgtcttacttgcccatgtttgaatcaatttcttttgaactttcatgtcaacattgctaaagaccaccagttagtgctgacaaagcctaatttgatcaagttcgtatctatatcaatacatcattatatattaagggaataaccctgaaacctgtacactataaccggttagtcttctctggattcgcaccactggatacacagcctaaaatggacaccggtggttgaagttgtaacagatcaaaatgtcataacactggttttgctaattctttctccgcttttcactaggagaaatcacatcagtcaactccgccacttcattgagactaatcgcgacaagtttcgtctgaactgaggttagttcaggtagaagtgcaataggtggagaagcaaaggcatccattacattgatgctttttgtctgcaggcaatggcaaggccggtttttacagcactcacgctcgtcgtagcccctgttcttgcctggagaactgtctacaacagccggatacaatgccttcctgcagtttgttgggctgctggtggaatttgttgggctgctggtggcatcgtcaacagggctcagttctttactctgtgacttgttcttgtcgacagagcttggaagaagacccttgcgcttcttaggggatggaacttccggtttagtatgttgagaagacaacacatcatccttagcactcacaaggaaactagacttgctattgtcgaatttggtccctcttctcctatcacaggtaaacaataaacaagtcagcagaatggaatatatatgtcttctattaagacatgaaaaaggacctgccagtaattgctattagaccgagattaacgagctctcaggcaaatgtaagaaatgtgaagaaaattcaaggcaagtgcccaaaaatctaaatacttagtacttaataatgtttatcaacaatagtttgccagctggctaacatatgcatgtgaaagaaagtctttttgtctgtttgatcctgtgcttgcactaattacgtgccaaacacacatgatcatgttcagaagcacatgataaatttctgcttataattaaaatgccatataaggtcaattaaagttttatgcgaataacattgttggcaggtatattagcccattaagcactagtgctagtgctactgccaactgcagaagcaaagctacatgtatttaaatcagcaataaataactcatgtcgctgtaagaaaaagcaccggcagcagcaatattgcatggacattgcttagaagctgcatccatcgttcaaatcaagaaataaaatcattgtgatgcgtatagattacattaaacttgtttataccagtaatattgcagagtgtccaatggacacgagagttaacaaaggttgaatgaattagagaactaattgtgcttcctgtaacatgtctgcgggataacagcatgatcacatattctttggaagactggaacaatgtagtaatagtgtaatactaggtaactgcagagtgctcaacgcaaatataattaagcaatgtttttggattcttgagcattcaaaaggtatcctgctttactgtagtgccagacaatctgacgcgagatgttcctatggatcgatgggaacaatagctagcaaatttgtatgtatattcgtgaaagagaatactagcaccacctaacaaaactactccttcagtttggagtaccaaatatcaagcctgcacagctaaacagctccttagtccttccgaaaaccacgagctccttcagtaaaagttaatttttccacaatgtttcaaaagttcaatttcccgaccacattgttaaaacgcaagtaaaaacgataattaatcacatctgcccactcgaaaactaattaagcacacaacaacaacaacaacaacaacaacaacaacaacaacaacaacaacaacacatgctacttttcacgcatcatcaaaacgatcatccctcataggccagaaatttctcaataaatccccaaattagttaacgtaacatgtaaaaaaaacaaaaaaaaactcaaggatcagtgatcgacatatttcgacaaaaaaattccgaatatatatactgcaatagtacaaaaatatcaccctaagtcttcaaattttccatcggcagaggcacaggatcaatgattctgacaccaaatgaagcagaagtccgaatcgaaatttcagtaaatttccatctacactgctcaaaatgatccgagcagtgaaggcaccctcaacgatttcgctagaaaagcattcgaaatccaaaataacccagcacgacaaccaaagggaagctcgatatcttaaggcgcgcgaagctttgaggcggattgggggtgaaaaactgacctgcggctgcggggcagcgcctgctggagcgcgtccatggtgtccaggggacccctgtacgagctctccacctcgccgtcgctctcctcctcctcccccgccgccgcggcgtcctcgcagtgcaccatccccacccggctgtcgctgccccaccccgccgacgacgccgccgccgaggccgccgcggggcggagagctcccccgaggccgaacagatcgccgccgccgccgccgtgcccgcgcccgctctccatggtgatcggcattgctccctaccccccactcctctctcgcgaggcgcgagctcacatgcgaagagaactagagaagagaagagaggagaggagaagcggagcggcgcctcggagacgagacgaagggtggggggctcgagtcgcgtggggctttgcgcttgcgacgggtgtttcgttgggatttggcaccatggccttgcacacactgacgtgtgggacccaccaagtataaggcagaaacacgctctgctttggtaaaaatgctctagaacgttataaaactggcaaaatatggaagacacaatgtaaagagtagtaccattttctagtgtggggtgcatgaagtagcattgtattgaaagtccagtctatgcagtggcattttagcggttttctcgttgtttaagtttgtggattctcctaatagacgagccacgaacttaaaacatagtctagctcattacttacgcgctctcctctttggtctcaaaatctagatctaggttagcttcaattccatgtctcctttgctgtcatcatctcactatgttgtcacctgacctcaccgacactgataggtgtcaatgtgctagtgcggcttgctcgatcgtcctcctctccgccccatttgtgtcgatgtgctcatgccaccaacattgccccaccgccctatactgaccctggctccggcgctaacgccacctcgccgcccacctttggtccgccgtctcctaggctagccctctaaacccaattccctatctcccccttcccagttccaacctccacttactcaccctcgaaaccctaacccagtacttattgtatgatgtcgcttatcagaaagcgttcacgtcacatacacgtggttgaggattaggacatcaataggtttgtgggaagagaggtttcgacttaggtgcttttcagagagctgggtattctatgcaaggtagtaatacctatttggagctctaagaaataattgatactcctatatatcaagtcgtttgatagtcaatgtgtattttttttccttttagtatccccttccggcaatgccaaaaatatatttggaaattggatgtggtgccatggtaagaaagatggttctatttgggccagtgcactgcattgtttaatttggcattaccgaaatgatttttgacaataataaatcacctaatcctacgtgggttatcttcaacttcaactagcacaacacttggttgttgatactatcacaagaggggaaggatattatgcgtaatgatgttatatttctagataaggtagctatggatcttttgttccgctttggatagtatagtacatataaaattacttgttagaatatatataagtaatttgtcttaatttttaattcagctggttatcttttttagaggagttaactattagaaaaagcattttcgtcgatgttgggcttttttttcggcaggcgggtatggccatcggagcgaaaaccccgccggcgagaatgattactggggaggagttggccgtccgcctgtgaagatagcatatcgcaggaggaccatataaggtgccgcctgcgtaaatgatctttgcaggcggaccacataatgcgccacctgcaataatcgcaggcgggctccttatgtgtgctgcctgcaaagatgtattttcgcaggcggccccttatgtggtccgcctgcgaaaatagccctataaagtcttcttctttctcgagccctgttcatttcatccgaggtttctctctcccctaacaccaaaaatatagggggggggaaggtttttgaacttcaaatcttagggggatttttctacggtggttagatctacacctttacactcttgttatgcatttttttttataattttagaactctctttgtgatgaatctatgcatgcaaaattgtgaagaaaagctcaatgttttttcttttcttttttctttttactttacggaccaaaattctttgcaactgtgcctggaaaagttccaacttggcaaagcatttttggtcagatcatgcacttgatgatggtccatggaagatgagaaggttacataagtggtacatggacgccagcaagaaaggcctaactaatttaacaattcgatcaccgcctgactgcttcgccggcgacggttacttctagctagatttcgctgatctgcacaccatctatcgtcgcgataagatggacgtaaacttcgtcggtgcatggtgcctgtgagtatgagtgcacatttattatataaataaattgatataatacatgtttacatgtgattattattaacaaactgcttttataggatgtaatacatggatgctgagaagacaaatcaatctatcggatatctggatccaacaaggatctgtcaagcacaacataccgtgacacaatcaccaaattccaagcagctcaaggacaagacgcctgaagagatagaatataagaagggcttacacaaacagaagttgattactgtcgcacaatacattggatgatccttcttacgctttcaaaataaaagagtcattctagccgcgtacaactttaaataagtctagtaggttttttttacatatctgtgttatctcatccgtaactaactgcaccttccttaccatgtagcgatcattacatatgtttcattatctacccgaagcacggctccgtgacagtcctcgacccccttgattatcatcacaagacgtacaaacaatttctaacaattttacaatagtaagtgattctgatactcttgcatgtctactattaatatattataattaaatctcctccttaatacgaaacggtaaagaatctgtacagtgtgtacaactactacaagaaaaagggtggagagcaaattcaaaccagggagaagctgctaatacatacatattggccggtaatagtccacacagttaatatatttcaattatttttctaattacaaaatttaacttttttccttctatgatatgccattaagtgtcacaagcaacctagagacatggtcctttgcagggattacgcatgcgaattcctcagggttaatgggagatacaaggttaacgcagaggatgtaattctctcgactcaacgtataagtgcattagagaactacgcatctagaacctactatatatatatatatatatatatatatatatatatatatatatatatatatatatatatatattgtgcaaattaattaagacaagaaagctcagggtaataaatgcaataattagatgtgaaatttgttgatttatactcgcccactagcgatcaacatatagtgcccatagaccatagtaaaagatcggtagcgtgtctcccatggtccattgctcggccaaacaaccaccgaccaactaactaacctacctagctaccaacaacaatacaagatcgatccttcaaatggttaatgaggatacactgcctgataaagcagttgatcctgtgggagtacacattattattagctcactcttgcagcccacagatatttatctatgatgcaatggatttaaggacccatgtggtatttatttggattttgtgcgtctttgacacacaatggtttggtatcttcttcttcttcttcttcttcttctactactactactactactactactactactactactactactactactactattttgctatttatcgtttctcaagaaattctacctatgtgggtatctcattgttcaggaatcaaactaccaacatgggcacttttgaatttagaaattttacatactaatttttatatgaattaatttgattcccatggcacttagaaaatcattctttccaaatataagacttcagtatatgttttaccggcttttcttaaaaaagttgtcttttgtgcaagcaaaatgattttggccgtgaaatagccgtagccatgggcggatccaggaacaaaaaattggagggggggggctcaattacgcagtttctttaacctctagccatttaggggccttaaatttcattaatggtgaaaaaatcgaagggggtgctccagggggtatccatgggtcttgtgggtgcagggaggacttggtgtaggggggactcaagtccccgctgcacccacgttggatccgcccctggccgtagctcaactagttaggtttctagtagtaaaatctgtacacctgagttcaagttctagacttggtacgggtgttcatatttatggctagttttttaggtggtagggcgatgtactcatcaatagcgagatatctacggtgactttatcaattttaaaacataccaatttagtttttggagttgttcataggaatggttttagctatcacaaagatgtactaggggcttgttcacttttaacacccatatgtttgatttaaattcttaccaaattttgatagaaatttttcagagtagaaatttctaaaattgtcaaaaactggtaggatgagattggtaaaaacatgtttggttccttgccatactaaaatttgataataccgaaacatggtaggattagaactgacagtaaagtaaacacgcgctagatcttggtagtggtgaggccaaatttggagaacaaacacatactacccacacaaagaatgtacatccaaaacttaccccaattcaggtccactgtccacatggcacatacatatatactcctaagagtaaatcataaatgtgtaacttttgcatggacaaaactaatcaaggatcatgtgacgatctgtcgcacgtactacgtgcagccgtacacccccacataaatagtcatcgcatttaccgaagatgatttaatttgctcaacccaagacgatgtactactgctaacagcaaagataatagtaaactatatactctctccatctaattttaatagtcatatttctaaatctaaaaaatttacttttgataggcatatttcaatacaacaccctatcctcttaataactttctcgaatttaatgcgtgactcttcattcatccacacaagattaacgacatgggcatcgagaaatgtaaatattaatgaatcgcttttttacgagaaataactagtagcatgtttaaatagatgataagtataattacttatccttggtcattataccaagataaaatatgactatcaaaagtagatggagagagtacaagctatatgtttacgtagaagagagatgaagaaaagtgaaaagtgttcgttctcaaaataagtttaatagtatagccaactattaactctaaatcatccactggttttcttctatctggaactcgcttttcttctatcttcttttatctcttccactggtttatgatttgttattgtacttgctcttatgcaaaagatagctctatacgtgcttaaaaatatgcattaaatttcagaaaaagagagaggaggaaaaacatagagctaatgttaaagctaaattagtatacatgctacttttaaaatgaatttcaaataattagtgagttttactattaaactagctctaaacatattgtggccgggtagcccggatcacgttgccccagccgccgacagacgctggggaagcaatgactaccaggtgatcgatccagttgatgtgaaccaatctttttgtcacctcgttaatcaatcgattcaacgtacagtagtacgagcaggtacatgtacacgtatcgagctgcacatgcttactccctcagtcaaaaaaaaaaaagacaaaccctgattttcgtgttcaacgtttgaccgtccgtcttatttaaaaaaaatatgaaaaaaattaaaaagataagtcacgcataaagtattaatcatgttttatcatctaacaacaatgaaaatactaattttaaaaaaatttcatataagacggacagtcaaacgttggcacgggaacccacggtttgtctttttttgagacggagggagtatttatgccagtgtccttgcttgggattaattgctgtacttaactaattacgaggcagctaacacatggttcagatagatatggttcaggcatgtactgttaatgttggttgatagaattcaactgtcaaaaaagcttcattacatacggatagatatggttcacacttcacaactatcagtaccacggacttagaaaaaaagggtccatgattatgttgcagtagtgtgagcaattctgaatggaagtgcactgatcagaatgcagtaaagtaaaactatcactctgtcatccatatgggcaaaaagatttgagaacttgtattatactcatggaagaggcatctgaatttctcatgtactatacaacctgtcactcctgtgtatgaaatggcagagggtccatccatccacatagaaaaaggaatgggtgcccttgcgccgtaaacagatgctaatcttccatatgtacattacgattttgctttttcttttttcactttacaagttacagatctctcgatgtatatacatactatgatcctcgcctaatctcttcaatgtgtgcttcctcttcttactgtatagaagaatgaaataattggccgactagctgcgtttggtttccagtttcttcagcatttacctatgagcccggctacgttttgggcaatatcttttttggcctgcaatgagaccggtgaatcgccaatgtacataccgaacagagcccctgttcaccaagcaagagttaagtacagttaaaaacaatgaactttatcgtaccataaagatgcactaggcaagaaagtacttatccagatgcaagtcatggacagtgatccaagtgaagcgggtggaaaatattgagaaagtgtgaagtaatgaagtaaatttgtataagttttggtgtgacaagtatacacttactgcagaggtctttgctcttaacagcaccaatttgtctgccatcaactgcatgaaaatgtttttttttgtcaaaatatgtggatgtggcagtagaaaactcactcctcaagacatacagaagattcagttacggtctacggtacttactttctgttattagctggccatcagaagtttggcagaagtcgatctttgtaccctgcagttatattaacagtgtttacttgtatctaaaagttataaacatacggtagccaaatcctgtgttcaaccttaccgcaggaataggaatgtcttcattgaagtaagaaccaaaagttttcaagcaatgataatcagtgttgggattcatctgttgaaaatacaaatacagaagtcacatcagtatgaagaactcgtaaaagaattaaaagtatcagctgaagcagcaaccaacaagtaccttctggaggcgcaggccaagtgacttctcaaatacactgcgagaaaaacacaaaaaggtaaaatgaaacgtcttgaatagactaaagtcatttttttttatgagaaagtaacaatcaaacagatctttacaaacatgacaaatcaaagaaacattcaagcagatctctgtaaacataaaatgagagtactacttactctcgcactgcaccaatgctaaggccgttgtagtgaagtaccaatctaactctcataggaaggttttccctggaaattgaagatacaaaacttcattagtccccggtgcacatgtaatcatccttttttggaaagaagtgtcacatgcacaagaagtatcaagttaagaatcacttttcataacaagtagattcatatagactttcataagatcaaaatatcaataatgtcatggatatatgtatggcacatgaatggacaagtgtgtacacatgttttgaaatgtacgtagatcaactagcacaataacacaaacagttcaatttttaatacatcctgtggatcttgtgagggaaactaaacttgtgcaaacagttgccaaaaaaaaggtgcaagcactaccacatttatgtgtgctaagcatatgaataggcagaattgtaacaacaggacaagactggagatatatatcgaggtcctacctcaaaagatcatcatagaaatctgggttgtccttcaagttgatggttggaacagaagcatacttaggtcccagcttctcagaaatagtattcggttgcagatctatcaagaaaaatgcatggtgcaccgttaaaaagaaatgatggaacatcagagaaacatttttttgtagaatgtacaggtaaacaacataatagaagcacaaaaaatatttactcacataaaccaaaagcgtacagatccaaatttttgaccctcattactttcacacctttgaaacccatcccaacaaggacctgcaattaattatcaataataatgttacatggagacgtcacactaagaattcagagaaaaatgatatgctgatagttcagaagtatcacattatatgtaaaatgaagactaaactgaactaactcaattcaattgtccacagatcatttgtagtagtgtacaattttctgtatacatattaaatcaacacataaaataaaactatgtgattcaaaattgtcagaaatgaattaatccagaggatttcatttccagttcataatacaagtatattggattttacatgactagcctgcacgcctattaaagaggaggtacacagagaagacattcatgataataattttacgacataacaaataagaaaagtgtaccaaaaggcagtacctgaaaaaataaggtaaagtatcccagcaaaataaggtaaattaccgttgtagatggactggagtcatcttcgagaaatgcaggaaacttgattccagtttttggttcaattgcatctccctgaaatattgtgcttggcactgcaacagatctactttttatgcatttgtcctccagataaggcttatccataggtctgctgacatagtccttgatatttcccagtgccattgactctgcgagcgtcttcagtgatctttttaattcatacagtgaaatgaacagtcagtgagatataagcatagagcccaagcaagagcagggcacaaataaagtgtcgtactgtgtgccttacatattttcaagagggggtacaatagccatggcaccagccagagtaagaacattgcaggcatgttgctgctgaaaatcattccagagtcgcccaagtgttgtgcttgcgaagttagctaaaagcagttgtacagcatgctcttctcttactagataaccaaactgcaatacagccaaattttgcatacgggagctcaaatgattgatatgtgactggcaagctccagagctagggccttccatactcattagcctacgtaaattcttgggattagacactctagaaagccagtagcagaaagctctggcaaacttgttgaggcgatcaaatgcttcctgaacaatcaaatttcctgaagaacagatctgcctgtgctgtcgcaaagaacttcccaccattgtaccggcatgcgtaaacaagctcaacccaagatcatgagacattggaaaatctgagggaaacttgtgtaggtatcccaaatcatggtcgagattggacaacattaaccgatcggccttcatgttaaaatgttattcccaatataatcttcagaatgtagaaagtcttcagagaaagcttttgaatgtacggcgaggaaaaactttgtgatctgaaaattttaacaaaactatggaagtcagctataaaacctcttttacaccgtgaattgcacaaacagcatctaataaggaggtgatacatattttgtgaaatttaaaaaaaaaacaaatttcacatcatctattgaaaatggacctgaaaatgagttgtccttcaaatttacccttacaattgccaggattaaatgataaaaaataacactagctttctttgttctcatatcagcaaatagaactttactttgggaatactaagaatgcccccattatatgaaatgcaaataccatttgcaaatattgacaaacagtatcaattcaatcaatctaatcggaccctgtaactacgccagcaaatgcacaaatttacgccctacaagccccggagaacaataataagcattcccgtaaaaaaagaaaagaggaaaaaagaaaatccaatttctcctgaactggatgcattcgcaacgatccaaacctggccgatagactataaatcgcgccgtgtccagatcagcgcactggaggaagaacacgagaggatccgcgagtgccaccccccctcgatcgatcggttgcggatcaaccaaccgaccgaccgaatccgaacccgggggagaagatgggggaggggaatgggatcaaaggcaaccgccctcctccgaatcgccctcctcctctcctcccgtgaggcgagagaggcgaggcgaagaacgcgtgctcctcctcctcctctctcctctcctctcctctcctctcctctcctctctctgttttgctcttcctaattcgaggagaaggcgacaaagagctcaataaaagttccctccctttttgttttccacaaaagttctagaacaaattgttatttacatataggtcctcgtcacgtgcgaactggtccaggggatggggaatagttttgtttttggataagtttagggggttatgcgtaagaatccccgatggtttcggagaaggtgcggtgcgggggggatattccggcgggggagatcggacggtggggagccgatggtggacggagatgcgacaggttaataataaggggaattgatccgcgtcgaccgtggagacggggcgtggacggcgcctgaaacacgtttaaaatggaccgttattttgtctttcttccttctggacacgtgttggcttctcctagtaatttgataatttgatttcacatattactttcccaaaatataaaaacctatgattagatagaacataccataaaattatgaatctagataggggcgtatccatattcgtagtatcatccggttttaggttgtaatattttggaatggatacagtaggactctacgtcacttttgacttctcgatttttaaatgcttcttcattcagacttaaagttaaacattttaattttcaccatcattttttttataaattcatatagtttaatatcgtaatatttgtatttcaagatttatataaaaaatattttcaacaattcatgtattatttaactacattaacttaaaaaattaatagttacagataagcatgtttgacttaaaataaacctaaaatgatagataatttgaaacatgggaaatcaaatcaattcaaaatcaatgcaccaaaatctcagcatttttagcaaatcaggtgcttaaaagggaaatcaaatcaattcaaaatttaaaatttaactaccaaggtgactcagagaatctttcgtctcatccttattttttgctaaacaattttataatgcttatattttagaaacagggagtagtaaaaaaaatatggcaattgagtaggcaagtgatattaaatgataagaaagtaataaattttgatttgtacgataggctaaaatttatgtatcatgtatatgtataaagttgatccccactaagtatagttaatgctaattctcttttctctcatgaagccacatcaacttaattgtttttagcttttggatgatttatcaagggtgtaaaatgcatctcttcacatcaccttaattgttttaagtcttttggatgattcatcaggagtgtaaattacatctcttcctcctaaaaggcacatcatacaacctaatcatttataacctatttataacctttggataattagtaaaggtaaagaaatatataaacacatgaaaaaaaatggtatagtaggtaacaaagaaaattttagaactcgtgtatactatattatcacacaattcttccgcagcaacacacgggatacccatctagttttaataagttttgaatgctagaagacaaagggaatagtatatacacccatactttaaccggatgatccatagtttggccctctttgtttaggcttaggcttattggcctagacttttaagtcagcttattggcttatatgatttataagccagtggatttaatgtcctaagtttagtggtggagtcatacatctatctcatataagcccaaaaaagcttctccaacctaacttttggcttaatagtgttagagtgacttatggcttaaaaaaaccaaatgaaaaggttgcttgtttgttttggcttagacttttcgacttataagttggcttaaaagcctaaacaaagagggcctttaactggttaagataaacaatagtaaacgaaaaagcttatccagattcatactattattagacgacgagcaccttatattttttggatggaggaagtattaggtatgattgttgagcccatcccttgttcctgtatttttattttctaccaagtcaaagcgatggctgcttatgtaccactcctaacaaacatgtcgagaatggaagttgacacctagccgctagtaggtactgcaagcctccaacagaagcggctacataccagccagcggggacgatgttccagatgacacaagaacaacaaaagctacataattcaggggaccaagcatttgctggctgcctggctccattgatccatacacaatcacacgcaacatgccagtcgatcattggaaggccagttttcagagaaaaacacagtaacaacagaaggttacagactacgggagactcgtccatgatcgcatcagcaagctgctgactcccaccctcaatatcaaaatcaggaaactaggtcagagatcatttgttgttcacagagaatgtgacatcagtttcagtttaagaactgatggaagtgcacagggcaacgacgagtgcacaaaaacactaggcatgtgctccggctccccagcacgaacaagaaacagatctacttatttcaggcaaaggattatctagtgacatgtcggcagcacatgagctttcggtgttaaaggcagagatagtctgcatgcgtacatgcttttctgagacacctgcaaaacgttaaggatgccatgagggcatgtctgttgatgatagatatgcatgatctgatcaatcattatgtgtattgatcaaaatttttaatcaagggcaacaactgtgtgcgagacattctgtatcctacttcaggaggaagattatctacctaagcaaatagcatggatttcacagcttctaatgcgacttgtttagacaattaattaggataaaaaatgaaatgatgacgaggagtggtataaggtgatacattgtgaacttcatccgtttgccatcctttctgatgaatctaagcagactgacagaaaaataacataatgttatggtctggagaaggatacgacttataaacaatcaaaattatattctacacagatgccaatgaaaattataatggcagatgttaagaagtcatgtagggtagtcatacaggaagtatccgtgtgcacggctgcatactagaggtgcacacagccacagggcaagagaagttgacatcttaccttcaagccatatgggtaaagatggctttcacatcttcaaacacctcaggggctggttttgtcgcatcaatctgatcaaacaatggattagctggaggtaataaaagcgcatgcgttgacaaaacataccaaccagaaactgatagagcacgtgcacaaaaatatggccatatctgatgatggtgatcgaagtagtctccaactgacagataccattttaacacaaagttcttgcacttacttaaccttcccctgtttgctgaactgaatatcatatttctttgtggcaatgggactctaatcatgcagcgcaaatttgttgctatatgtggagtttcagggcctttattgtacactttctgacatagcatttgcacaatgcaacaacttaatcgagtaatgaatcaagtgatgagaaaggatagaggccatatgttaattcaatcacaaacgatcaattaacataccctgaaaatgacaatctacatatatcagacttaagaaaacatccaatcagctcacaaatatgtgtgctctactcaagggttttatttttccccatggtccctgctaaggatatgatatgttgtgcatcactggctgattgcagtgcacaaaacgagatcagagtaaaccatgctttattccatgtgtactgtgaatttcaagttttgaccctgaaccatacagcagtttactatatgatattgtgtgattatcttaaatgatgacaagtctataaatccggtagggagaataaactgtactgcaagaagcatgcataaccattacaaatgtacacaccttcttaaccatgccttttgactcataatactcaatgacaggcaagctggattctacaaaaactttcaatcttttcctgatagtctcaatgttatcatcacttcttccctgcaaggcaacaagaaaaaaataatgtctgaagaaataaatactcaagtgattgtgtcaaaatttatttaacaaattaatatcagagaagaagcaaacctggttgcgacccaaaaggcgcctttccatttcttcctcagaacaatcgaaaaatagaacaaattcaggagatatgcttatctgaagcagttggaagtaagtaaccaaggtctgtaattgcttttaaaatgtaaaatatgaacactaacatacacataaataaaattctcctactgctctattcaaaacaatgaagactaagtaagcttacaacactctcaaatacaacacgattctcttcgttccgtggaaatccatcaatgatatacttgtcatttccaccttttattatggcttcttgcaaaagctttatggttatctcagatgggacgattttcccttccgttatgatagtgtcaatcatggttctgcaaaatatagaaccagtaactaagtgagtgaaacaataaatatggcatgtgtacatgggcaaatgcatgtgtgtgtttttacccgttctctgaaccagaattgatttctgcacgcaagagttcaccagcgctaagatggataaaaccaaaatgctctacaatattgctgcactgagttccttttccacttccaggaccacctgttcatggatgctacatcagattaaacaacacacacacataaatacagttatgaattaacaacagcataagaaggaactgacagcaagttcacttttcttctataaagtggcagtcaaaggcatgaaattacttctaaagaatagagaaaacaatacctagaacaaatataattttaactttcttgccacccaacatgttctcattaatatcctgcagaaggacaatttaacccatcagattgtatgaacacaaaaagataagcatgagggtcaaattcaggatccaaatcaaattggtaactgaaatggctggctgacttacaggttaaaagaacaagtatgcataaataaatactatgtaaaatacatatccatgggatgcatggatttaaccatattctctcacgatggaatgaactgcagatgaatcctccaggaatctgataagaactgcaaggtaatgtaagaaaaaactaccttcttttcagtaaggacgtctggatcatccatggctgtgctcatggctacaagaatacccccatgattcagactaaacatcaagttggtgcataagtattttgcaatagaaccaagaaatatgcatcattcagaagtataaagcaatagtgcaaatgtattcaacattgcacatgcatagcagaccacaaagtaagaactatccaattctaggttgatcatgaagtccagaccctttcatggtgcacagatgtgttggtttggtccaaatattgaatttagctcacggcgcaagagattatcccaccaatttcctgccaacaacagtacaccaatccccgaagaccactaaagacttcgttcgagggttttagtaaacctctcccccctagtaggttagaacttagaactaaataagcaaagcagtagttaaacatcgacgattctcacatcctgcgagaaattttcaatctaatctacggactacagcaaatcagatcgggaacaagaagcgtggcgcggagagagaagggccggaaaacacgcaccccctaattcctacctgctgagctcgtcgctggagaaaccaccggacgagagggcgagggagtagccgcgcagaggcgaccagacctccacgcatccgaggcaacctggcggcggccgggcggcgagccgcggcgaggggcggaggtcacttgccggtcacggtggcggtggcggcgacggcgaggggaacagagaaagtagtaaagaagaaaaaaaatgaatttcttttttggattttaaaaagtggccgacgaacaagtcaagtcggtgctcggggcttgctcgttttgattcgtcagacttggggtagacggttacgatttaagacaacaactagaaaaagcgcggctttgtcacgcatggtacagtgagcctggccaattgggcctgtaaaaaattaaaacacatatgtaaaagagccgtattaacagtaaagataactaagctgtttatattagagcttataagttggctataagattatctctatatttcgtttcctctctttatgttacttataagaatttaatatatttaccttaaagcatgtgtagagctagattttacttgaaagccaacaatattttttaaaaaaatctttatcctccacataagtttatagtccactattagtctattatctttgctctaagagcaaattttataagcaagttttatagcaaggtgattaagacctctaatttattcatatcatcaactaactaattaagatgtagcatactggtttcaatttgcatccaaaccacaccattcttttcttggagtttgtgaagaaattaccacttgcatgaggggtggttacttctcgtatactatcttagagctcatactacacctaactacaaatatgtagtctacttttgttctctcttcttcgttattcaatagctagcttattgctaataaagggacaaataaaggaaacgtccatcatttttcacccacatgtcggtgtgtttttacataaaaaaatctttagaaaagttaccttttaaagaaaatcatatttcaatttttttcatgtttgaaataattattagtcaattaatcatgcgataatggctcacctagttctatatatctccttaatatttttatctcctcttaaacatagcctaaggtatgtttggaactcagaaaaacaaaatacatgaaataaaatatttgaaatataaaacacataaatacgtgtgtaaaacagaggaataaaaaccatagaaagtttgaaaagatggatgtttggaacataggaaattttagtggatgatttaactatatcctgctaatccgtattattactttgatccacaagaaatagcggcctgcctgactaagctttgttgccagctgttcggtgggaatgtgagaaatcaacgtgtttgcactacaacatgtatgcataccatctcgtctcttccacgtaaaggcgacggattgggaagaaatttctggacgcgcacgcacgcaggcaagagcatttcatcgatccctgcacgcgcggacgcacgtttcgtcgtcgagcctgcaaaaccggtgttgccacgtggcaccattctccttccgttttttggcattgaattcgtattataagattctttcacagctatcggttcaagtggctaatatgtgagccagattattttaacttataaatagattcggggattagtcatttacatatttattattatgctagcttactgctctacgcacattgtgacagtgataagctccactagaacaaaagctttagttttgtgttgggtttcattgggattttaggtagatttggttcagtataatagttaagtttattcagggccacacaggcccccaatcttaaggggcccaaataacttaatacgtgtcacaggaccattagcccaatagattaaatctattgaaatgtgcaattggaaacaaaggctgagcgagcacgtcgattcgttttcggcgcgtgtgtcgatttgagcgtcctcccgtccgtctaccccaatccatacgctgcgccgctctcgcactcgcactcaccgtctcgctgtccagctcgacgctcggctgctcgtcgctcggcttttggccctcgtcgcttagagcaagataatagtataagataatagtatagctcactttttactattagactattttaaagctaacatacataatagattggctataaggttggctataattttcttcacttctctctatctctcacttatatatttaatgaatttgtcttggagattatgttaagctagctcttgcatgagagccaaccctcttgattttttgttacctctcttctccatataagtttatagtagatttatagctcactattattatacttgctcttaccgtctgcacgtctgctgacgtgccgcagtaaagcggcaaggtagcaaccagcgagcaacgtctttgggcgacctccccggcgatatggcagcgagcacaagcggcaagcttagctgccctgcacacaccagcaaggatgccgggtacatgacctaaatttttattctgatcgctaggtttatggtgtatctaatatgtatactagattaaattttattcatcttgtatctatatatgcatagatttaagtagtatttcaacttctaagaaatgtcatctgcaaatcattgaaaactttatttcaagaaatactaaaggaaaaagaaagatactttccaattggagattatgcacaaagacaatttctattaagtttatattgctaaaatatatcatggagtgtaagtttaccggtttattttatcgcttaagttagaagatttcacacggggcctccaaatttcatgggacggccctgagtttattaaggagactgttaatattatgtaattttggtcaagtaaagatatatggaataatatctattttggtttttatatacttttatagtgacattcgtgaaccaaacgagcgcctaagtcccaactcccaactagctaaaaaattgtcaaacaggcccatacactgctgctctagttagcagcctctggggctacatacacgacacgtcttaaggattacgaattacgatgaacaaataagtttccgccctctactgtcaacatgtatcaatacgatttgtctgctagacaactagagtatcaaatcaatgttagcatttcccaaccgatcaaagacaattagcagaagaatacttcgagtacgatggatttcttcgctattactgtactcgccgttgacatatgattccgtaagaaatctatgagctggacgcttgctcttgcgtcaagctttcttctttggtgccggaactccggcagctttacatgaatatatatatacactcatctgtttcaaaatgtatagcgttattgacttttcgcataacgttggactatttttttatttaaaagtttagtacaaatatgtaaaagtataataagttaatattatattatatttgaagataaaacaagccataacgaaataaatgatatttacataaacttttttaataaaacgaatggttaaacgattgtgtgaaaagttaacaacgtcatgcatttgaaatggtggaagtatatattaatgcattaggcagcttgtatatatcatgtgtttacgattgattgactgccatggagttgagtaagactctgttagtcaagcaagaaaactatggcacaaatggtatccatgcatgcacatatctcaagcgcgcgagtgccttggtgttcttgccagttgccacactccaagtgaaaaaattatgcaacgtacgaattgatggaggcgagcaaggcgaagcgcagcgtggccatcgtcggcgccggcgcgagcgggctggcggcgtgcaagcacctgctggcgaggggattccggccggtggtgttcgagtcgggggaggccgccggcggcgtgtggaggcggacgctggcgacgacgaggctgcaaacgccggcgcaggcgtacaggttctccgacttcccgtagccggcggcggcggcggcggaggagttcccgcggcacgacgaggtggccgcgtacctcgacgcgtacgcgcggcggttcggcgtgcgggagcgcgtccggttcggcagcaaggtggtgagcgccgagtacgccggcgtgccggaggaggaggcggcggcgtgggagaggtggtccggcaacggcgaggcgttcggcgacggcaggggtgagtggcttctcacggtgcagcaccgcgaatcggagaacctccaggttggtgaatacgtgacggcatgagcacacagaaaagtgtcattcctgtcggcttatcaccgtcagtttggcttgagccgacggggtttctcaatcactgtcggttcagcaggttgatcgaattttcccgcccaacccacttgataatcgaaactggatgtcaaataatcgaaacccattttaatgagtgttaaattatcaatctctcgcatagtatggtaacaaatgacttgtcaacggattcacctcgcttatcaatccacagacatataagttcgacttcgtgatcctttgcattggacggtatggcgttgcgagcgttccaacatttccacccaaaggagtacctgaagcgttccatggacaagtgctccactccatggactactctagcatggaccatacggccgcggccgagctgattcgcgacaagcgcatagccgtggttggttctggcaaatcggccttcgacaccgttgcgcaatgtgccgatgtaaacggtgagattgctgcaacagaacatgttcaccttgatcacattttccaaattgaatttgaatttgttatgacaatttttaccgtatgatatataatctatctatctattatattattaaaacagccttgaaagaaggcaccacattcgctgtgggggctagaaattcccacattaatcgaagaaaaagaaaaaaagaaaaagaagagtccaagtagaagtccaatttaaaaatagctgaaattcggaattaaaaataagcaatattgaaagaagtttccatataagaacccaatacgatattaaccaaaattcgaaataaaaaaaaataaaatccaaaattagaaaaggaaaggagagtccaagtagaagtccaatttaaaaatagctaaaattcggaattaaaaataaggaatatcaaaagaagagtccatataagaacccaatacgagattaattaaaatttaaaataaaaataaaaataaatccgaaattataaaaggaaaggagagcccaagtagaaatacaatttaaaaatagctgaaattcagaattaaaaataagcaatattgaaagaagtttccatataagaacccaatacgagattaaccaaaattcgaaataaaaataaaataaaatccaaaattagaaaaggaaaggagagttcaagtaggaatacaatttaaaaatagctgaaatttggaattaaaaataaggaatattaaaagaagagtccatataagaacccaatacgagattaattaaaattcggaataaaaataaaaataaatcagaaattagcaaaagaaaataaaagaagagttcaagtaggaatacaatttaaaattagctgaaattcggaattaaaaataagcaatattaaaagaagaatcaatatatgaacccaatacgagattaattaaaatttcaaataaaaaataaaataatatccaataaaataacaaaattagaaaaaaataaaagagagtttaagtaggaatacaattttgaaacaactgaaattaaaaaaaataaaaacattaaaagaacacaatacggtattaactatttttttaaaaaaataaattatgaaattagaaaaggaaaaataatatttaaattagaaatacaatttataaataactaaaatttgtgataaaaataaagactattgaaagaaaaaaccatctaaaacacataacgagataaattaagtaacaggcctataaaagagtagagtgatggcggttgatacgccatataaaaaatgttaataaaacaacaaatagaatcctaatgacgattataaggagggacgtcgggcatgccgtgaagcaaacaagtaaggcagtagccgggacttctagaaagtaaaaaaataaacccattgataatcatattcgatttttaaaatctcaatgacaataaaaaggagaagaagcgggcgggcgtataagagtatggttgcagagccgccgacggttgacgggacttctagaaaataaaaaatgaattccaacgatagttatgttcgatttttagaatcacaatgacaataaagagtaggcgacggacgggctgtagaggggcatagtggcatcgttcaaattttaaaggttcggaacttccaaaaagtaaaaaaaacctaatgataatcatgttcgattttaaaatctcaatgacaataaagaagagaggcagcgagcgagccgtagaagagtacaatggcaaagccgctgatggtttgacgggacttaaagtaaaaatgaacccaaacgataattatgttcgatttttaaaatctcaatgacaataaagagaagagacagtggacgggtcgtagaggagtataatggcaacgtttgacgggacatctagaaattataaaaacgaaacccaatgtgacaataaactctaaaactataaaatacaaattttaaaggttccaaaaagaatgaatagaaatagtgatagatcgagtaagcaaataaagaaagagatgacataaggggtagcaattggtgtgacttttaaaaactatataattagaaacacgaggatgataatggtgtgacttttaaaaactatataattagaaacacgaggatgataatgtttggtctttcaaagtcttaagacaatgagatagctatttaataaattttaagtaaaatcatactaaaaatatattattttgtttgggtgctagccgcataattacgcggccacccattctctattaaaaggacaaatttatcattttttataagttactcactttctaagtatctcacatacgtggttgtcagggagcaagtacccatgtacaatggtgtacaggagcccacagtggatggtggatgcagggcttgtgtggggtgtgaacctccagaaccttaccacgtcacggctggccgaggtgatggttcacaagcctggtgaaggcctcctcctgagtcttctcgccacaatgctgacaccactggtagcactcaaccacagttaatccatcttgtaagaagaaacgctaaatagatcgtcactaatcgttaacagttcaatttcacaacccattgattccttcagagatggttattgtcgaagctaacggagatgtactacaagaggcacacaccgatgcagaggcatggcatggtgccaggctacagcttctcacagtcaatcttggcttgccggctcggcatcctcccgaagagattctacgaccgggtggacgatggcagcatcgtgctcaggaggtgtgacccgtctttcagcttctgcgccggcgggctggtgctggacgtcgccaccggcgaccacatcgtcgacgccgacgtggtcatcctcgccactggcttccaggcggaccggcagcttagggatatattcgtgtcgccgtggttcagcaagatcgtcgcagaatcttcagacgccactgtacctctgtacaggtcattgcgtttcaccaatcactatgtatcgcagaatttaactatgtcagtactttcttaaaaaccataaaattactgtaatatatttttttcttttgaatcatctctgagtggtgtgatttattgatcgacagacggtgcgtgcaccctcgtataccacagatggcgatcattgtttacgcggagagcgcggcgaacatctacccgtacgagatgatggccaagtgggtggcgcaccttctcgatggtgcattccagctaccgagcattgcacgtatggagaagagcgtggtggagtgggtttgttgggcgcatgatatgaggaggtgtagcggcaactacttccgcaagtcatgtattggcaccatcacaacgtgggataatgatcagttatgccgcaatatgggatacaacccaagaagaaagaaagggatagttgcggagtggatagagccctatggagccgctgactatgctgatatctagtcaccatgtgtcacaaactgaataataataataataataataataataataataataataataataataataataagtggagagttaattgtatttcaaatgttgcacatatagaccatgacaaacatgtggcagcaatggtgaaatttcaagtataacttaaaagggataattgaagagagtacttttcatccgttctataatataaacatttctggttataaatctatacggaagctttgtcagtgcttaaaagtggaatatcgttatcccatcccagttaaaggaagagatgtgtaaaagtacccaaaactgttgcttgccagtttatgagcgctgcacgaggaagcatgttgttgtgaaccttttcagcttggtctagagcatggtgcttagggctgtgtttgcaatcctggatttccaacccctctccatcatattccgcgcgcatgtttttcaaactgctatgttttcataaaatgtttctatacgaaagttgtttaaaaaaaatcatattaatctatttttgaaaaaaaattagctaatatttaattaatcacacgctaataaatgtacactgtacatgttgggaacttaggattgcaaacacagcccggtggtaacggagccaaactttttaacctacaaaatataaagaatgggtccaaagagattggagtaagatttaatagatttttaaacttcccagaagtacggatttaaagtattgagatgggttctgaaagggcccgtgacccattaccacctactgatgctcgatggatgatagagttgttgtcctcattgtttatccgtagctttctgtaagacattattcaattattaatccccaaaaaaataagaaggatatggtgtaaaataattctcccttaatgccctctaatcccttctctaaggggattaaccccaacaagggcttaggccatgttacattactactatatatctactccctccgttttacgatgtaagtcattctagcatatctcacattcatattgatattgatgaatctagacatatatatctatttagattcattaacatcaatataaacatgaaaaatattagaatgaataacattgtgaaacggatgaagtatataaatgttcaggctggctagcgcttcaatattctatcgatggatgcgaccaagaagcgtgtggccatcgtcggcgccggcgccagcggcctgacggcgtgcaagcacgcgctggcgaagggcttccggccggtggtcttcgaggccgccggcgacggcgtcggcggcgtgtggaggcgcacgctggcgtcgacgaggctgcagacgccggcgttcgcctaccggttctccgacttcccgtggccggcggacgtgtcgggcgccgaggtgttcccgcggcacgaccaggtggtcgaatacctcgccgcctacgcgcggcgccacggcgtgacggagtgcgtccggttcggctgcaaggtgctcgccgccgagtacgccggggtgcccgatgaggaggcggcggcgtgggagcggtggtcggggaatggcgaggccttcggcgacggctccggcgagtggcttctcacggtgcagcaccctggatccgaagctacccaggtaattaagttcacgtgctacttgaatttttttgtcaaatttatttatgtttgatttgatcaattttatagaaatatttttaacacaaaacaaacatatattcaacgttacatttaatgaaactaggttggtattgtagatgtttctaattttctcatcaaattaagaaaatgactacgaaaagttaaaacgatttataattaatatgaaatggagagggtagctaccaatttcaagctcatttcaattggtttatcacaaattgcacacgtacagttaaattacagtaacatttcaaacggaacttgaaatatatgatcagaatatttcaaagagaaatatatgatcagaatatttcaaagagaggtatcttggtgtacagatacacagggtcgatttcctgatactctgcactgggagattcagtggagttgcccacaccccaacatttccacccaaccgaggccccgaagtgttccacggccaagtgcttcactccatggactactccaacatgggccacgccgccgccgacgagctgatcagaggcaagcgcgtcgccgtcgtcggctccggcaagtcggccttcgacacggtggcggagtgcgccgctgcaaacggtaagatccacatttcgcggcgagagtaattaatcgatctgtgatgaactgttgagcgtgcgtgctgcctgccatggatcaggtggcaggtatccgtgcgccatgatctgccggagcgggcggtggatggtgaacggcgggttcgtgtggggcgtcagccttggacacctcttctgcaaccggctggccgagctcaccgttcacaagcccggcgaggggcttgcattggccctcctcgcaattctgctcacccctttggtttgtgatgttacacgtttgtgaagtgatagatcgtacattaatttatacggttgatttttttaatttttttaattatttaggtgacatacatccctcgataatttagaataattttcccaattcaacttgattatgtatgcatttttacgatggtatttatatcggtatagtagaaaaaatttagatctttcgtcttttcttttttatttgactggttactagtattaccgtagctattgcttgtaaataaataacctcatcttttcgcttatgcttatactcagccaaaatttaaatctttagccttaaatttggagttgattttgaggtttttttcatcgaagtttatttttcagcctttgattttggatcgctaaggacacatatataaaagttttactcataaattatttttcgtatacaaatatgtcgtttggattattccatgaataaaccaaacgatggagccaaaagtagttggacctttttaagggacaacaaactattttggaccatttacggaacatcgatccaactaggcggcggaaagatatattgatattgaaagcatactagtatcaattattgcatcccaattatggaagaaacaatgtttccttattttaatgtgtacacattcgaattatgtataacagacaagtaaattcgaaaatttcaatatccatgttgtaattttaaaatgaatttcaaatttgtaattgaatttttagcatagttggaattattttactttattttttttagaactactactctatcaaaaaaaaatcaaaccctccgtccaaaaaaaaaaagacaaaccgtagatttccgtgccaacgtttgactgtccgtattatatgaaatttttttataattagtattttcattgttgttagatgataaaacataattaatactttatgcgtgacttatctttttaattgttttataatttttttaaataagacggacagtcaaacgttggacatagaaaccatggtttgttttttttttttgacagagggagtaggttatatcaatagtagtagtgtatttttcaccgggcatttcttcgatataatagtgatgataggattctactaagaccagaaaagtgctcacgaattttaactatatcaagtactagctgttttgatactgaaaatgcttttttttgtttcagagatggctgctgtcgaagctggcagagacctacttcaagatgcagatcccgatggagaagcacgggatggtgccggaggagagcttcgcgggatcaatgtcgggctgccggctcggagtcctccccgacaagttctacgacagggtggaggaaggcagcatcctgatcaagagggcaagatctttcagcttctgcacggacggcttggtgctcgacgacgacgacaccggcgagcgcgtcgacgccgacgtcgtcgtgctcgccaccggcttccgtggcgaccagaagctcacggacatgttcgtctcggcgacgttcaagcagcagatagtagcagctcctctgtacaggtgatactccgcacatcgccgtcaacgatccgttcgccggcgagccggccagcgtctcgccgccgatgagcattcattcgttcgtgcaggcagtgcgtgcacccgcggatcccgcagatggcggtgatcgggtacaccgagaacctgacgagcatctacaccttcgagatgatggccaagtgggtggcgcacctcctcgccggcgcgttccggctgccgagcgtcgtgcggatggaggcgagcgcggcggagtgggacgaacacctggcgatgaggaggcacggcgagggcggcggcggcaagccgtgcctcggcggcgttagcacgtggtacaacgacgagatgtgccgggacatggggtacgagccgaggaggaagaaagggattcttgcagctacgctggtatcctctgaagtctgaactcaagtgaaactgatcagtgatcgatcgatcactgatgtgttgatcacgagtatacgataaaaaagaacatgaactttggaattgttgggctttcagaaaggggaaaataagttgggctgcgatatgaagaggaaaataagtcgaggaaataagcgttgttccaaaactttgttgcatcgcccatcgttcttctgcaaaacattgttcgtgtatatctatttccgtctggctaaaatctaacagagagcacgataccttttcgagatatacatgtgtgatgtgtctgaaaaaaacaagagtatatggcctcatttgatttaaaggaaattcataaaaattttagagaatttcattcctatagaaaattttcctatagtgctttgaattaaagaaataaatcttatgaaatcctatgatttcctatgtaatgcctaatggcatgtaaattttgttggaaatctaacatgaggtagaatctcatggaaactttcctttgagttttttatttctcatctaattcctgcattttttcttacggtccgatgaaacggtcatttctatgttttgcaatcttctgttttacactcacattcatattaaaatcctatgtttttcatatttttatgttttcttaatcctactattcaaatgagcccaaaatggtgagtcaacagtgctgaatatccgtacgtgaatgactgcagaaacaaccggaagaagatcgttgattcttcgcctcttcggatcaaaaccaccctattgctcaacttgtcgcagcttgtgctgactgccgacatatgcattggaattgaatccatgaagagagactgtaatttgcatcagctctttgctatccgattgaaaatgcacagtcaagaaacacaactggtacttatactttttcctttttttgggggaaactggtgtcatctttgtgctttataaaatgtgtaatgtatcacatggaatctagacaacagatggtgcagctcaagaacggccatccaaagtgtctgaaagttttacatttagatcattccactataactatagtatactcccaaatcaactcctgctacagccaaatcgactctcaccacgtcggtgggagagaaggaaaagagacgatgattaagaggaccaaagttggtccccgtgtcaagagagatggcgtggtagggagaagatcatgggtggacctagggggtgtgcctggttggcaccggtatacccaatttttttggaaaaatactaggatgtagtacgtaatcagaggacataaaaatagaattctctcataaaatagaatataacaatgatcatggtttgcctggagatcttttaatcatcaaaaaatcaaatcaggagaagaggaaaggacttgatgaaaagaaacagtggaggaaaaaaagaaaaatatctagatagattaggatatgggattgattgttctgagtcttacagatatttactgaatgggagaatagctaatacggtccctaaagtttcgcttcgggctcaatttagtccttgaggtttcaaaacgtccaaataagtcctcgaaattaatcatttgggttaatatagtccttggacccacaaaaaatgccacatgagcatgccaagtcattcttgcatgcaacaatacaaatgaaatgaccattatagccttaccatataaaaagaaagaaaagaaaaaaataaaggaaaagaaaaggaaacaacaggaaggaacgaacaaaaagaccggcccattactctatctgtttgttttctccatctaaaccctgattataatgtgtgaaccatttatattatgtcatgcacaattatgtcatgcatgttggctataacttttatattgcaatttgagttgattgggtaaaatatagttgctacttttacctacttacacggttttgttatttctaggattttgataattccgtgcagtacagagttgaattgttctatatctgtttgcgtgcacgtttaactactcacaataaataaataatatatattattagatacaatacatgcaaaagaagataaatggttcacacattataatcagggtttagatggagaaaacaaacagatagagtaatgggccggcctttttgttcgttccttcctattgtccttttttttcctttattttttcttttctttcttttttatatgataagggtagaatggtcatttcatttgtattgttgcatgcaagaatgacttggcatgcttatgtggcatttttttgggtccaaggactatgttaacccaaatgactaatttggaggatttgtttggacgttttgaaacctcagggactaaactgagcccgaaacaaaacttcagggaccgtattagctattctcccttcatgaattatggacgacatttgaatagaattttcaaaaatccgaccaaaatttgccatcggaattgggttttttttttaaaaaaaaatggtggagtgatcgctagaatgggcacaccaagtgtaattttttttgggtccgccacgagagaagatgatccatgcatccggtgcaatgttattgtcaccgtgatccacgcacaatccgagatccaccgtccatcttcaagatcacaatcacgccacacaaaacttgcgagatcactctctccctatcgcatcttctatctcggctctaagaaactcctatccccaacgattgttgctatctaatcgtcagctcttcgcctcatttttcacgggcacagtggaagtggcggcagtcgaattaggggcataaagtagcaaagtggcctaagtgcaaaactttcatcatgccatgctggatagccacgtcaactcctgatccatctcatttgtattttgaacttcggatgatatattaaactatgattaaataagcatatgtgtatttacgcttttatatatctttcttttataaaataggataaacccggcctctacaacgcctttacgtatctagatgacacatagtctaagtttaatcgtccgaatatttcagttggtttagcgcaccagattgtactgttcacaggatttatttattgttctccttgcatccacagtgtttgtccgcggtacgatggaacatgatccggatccatgcgtgttatcctatatttctagtcgtccaattactactccatatcctaccagaaaactgtgacacatcattattcaaccgttgcacagaacgctgctcgcaaagccgaaacttgtaaaatgggggccagaaagaagcagtgccagaggaagaaaaagtctgtgccccaaatgtggagcatatggcctatatcgcaccgaagtagtaccatgtaaagttacatatgaagtcaactattgcaacaacccaacccacctgtcctacgttaaattcagcacacctgaagtccccaactttacgttatcccctctgtaatagcaatacacgttgtctttgctcagaaagaaaaaaaaaacccaccacagtatgataaaacacggtcaaaacagcacagaaaacgtgccaatttgaaagattagtcagccctggccagagtccggacacgaaccgcgatctcggtcaaggccgtcaagcgaggccccggctcgcgcaggcgcaggccgcgcggctgacggaggaggagtcgcggctagtccctccgctctcggcacgtgagtcgtgacgcgagaaggctcgcggcgcggagcgaaggagagatccatgtctgtttagcgtcggttagatagagctccaattataaatttagcttcaggatttggatctgaaataaagttgtggagcttcatctcattttgtaagagagctctaccaagcttcgctcttattttaggtggagctgtttggctgagctctagctccactatgccaaacagacctttagtagagctttaactcttaaatttaactttaaaagttgaatttgaagtggggttgtggagctgcctaaacccagtttcatatttctagttttattttataaaagagttttacctaactcaactcttatttgagattaagttaaaactgtttggctgacctctaatttgatgagaactagagctagagctagtcctgtgtcaaacagctcggacaacgcatcgcgagagtcgcgcgcgtcgcttgcgcccgttttgtcgtgtggcgccgcggcacggctcctgcctgcgtggctgcgcgcgcgcctggatcgatcgggttgagcacgtgtgcgtcggctgcgttgcgtgcggcggggactctgctttattcgatgggtttggcgcgagcgccgagcgagcgagcgatcgcgacggcgggacgccgacgcgcgtgtgccgggcgacggcgttttttcgttgtgaagtgtgaacacggtgctggtgctacgttttcaccggttcaccacgatttcggtgtggaaactgcgagcggtgcaacgttttcaccacgtgcgatcgatcacttcgctttccaggtttcgctgcccctgaatatgtgaattcatgaaccaaattctattgagaacgaagggtttcctaacgtgcctcaaagacaacatgtaactcccaattcgtctcagcctggtctaaatttgttaaaatttgaatcaaacttcgttcgaaacttttcaaactcatatattttggcgggttcttattatttttttcctttttccttttgcaatcggatcccagaaccctagccacacggtcagcacactgacagtggttcaattttttttttcattttacaatcgttcaattttatctgcttaaaggaaaaagaaagctcgattggtggtttaccaatccattaaactgtgaagctctccttgaattgtcaagcaattttgctaaaaatatgcaatcacattttcaatattattttcttgccttttcctaatgtgattgttcttgtacgattgtctggtttaatctaatttaggtggggatttcccccgtgttccttaaaaaaaatgtgattgctatatctcacctatatcctcttatatctcagctatttttggtgggtccgacgtttttaggtgtgaattgtgaacagtgctctcgttttcaccacgattttctgtgtgagtgtgagcagtgcttcgttttcaccacgtgctctgaaaatttgaatactccacttcactttgcaagtttcgctgctctgaaaatttgaattaatgaatcaaattcttttgaaaaggaccgaaagggttttcctaacatgcctcaaaagttttatctattggtgcacaagtcacaaacgcggtcaggcagacagtcgttcaagatttacgaacgttcaaagattttgtgctacctaaaagggacaaagaaaactccattagcctacgattgtacagattgagctctccttgtcgttcagttatactaaacactttaccaccggcataaattgccaagacatgcaacggtcatatagcttttcgtcaatttcggttggagattcatatatgggattcaataattaaggggtctttattttgtgtgagcgattattagcttgcgtttgcttcaattatttgggtgtgtttttttagacttgatgatgtgcgctggttttgcacgaatttatgtaataattggttgtagctcgttgagtaaagattggagttctattctactccctctattccataatataaggcatggtcaaatttgacacggttttcaaaactaatgtttatcttataatttcttatatattataaggtttgtagtagcaaaattataatcatatgaaaggaaattcaaatgtcaatccaatgatataatttttagcaagtaaaattaaatttatattgtactaaatgttggtcaaaatgttttgaaggtggaatcttgaaatacgtgaacgcattatatttgggatggagagagtattatcttaagaaaaatgccaagacatgaggaccaagcaaaagaatatgacattcccacttacttccttcgtttcacaatgtaagtcattctaatatttcttatatttatattggtgttaataaatctagatagatatatatgtcttgatacattaacaccaatataaatgtaggatatgctagagtaacttacattgtgaaatgaagagtgtacaacctaactatgctatcaacatgtttgataactttaccagttggcatatacttgcttggctacttcgacgaaatacaaggtggcctaaaagttgaagtgcagaaagcacgatcgcctctgttgttcttatttgtgggaagccactttctacccgtatatatatttgctaaagaaatgtgaaagtaaaactcgtacggagactgaacagaggcatgtgagaaacactctggaatggaaagtgtcaacgtgttaacggagtgcatcaagctgtcgtgtaatctgtacatttctgtcagaaaaaaaaaacttcacattgtttttcaaaagaattatgatctgtacattcctgtgatccgtttgacccggtcgtaaaagaatcatgcattttttttctcgacatgtgggcatgaagcatgcaggttatattaggtcattcccaacccaaaacactagacatagtttccataaactccatatcataaaaaaaaactagtactagacactactctttcaatgcaaacaccattatttcatacttgaatttaatgctacttatctcatatgatatcttatctcatatgatatcttgaatattgtgtagaaatcatgtctcatgcaagacatggtttccttctctttcctcatttattcacttgccgcatcatttttcattctagatggcagcttatttaatgctatggacactatcctaattattgggttgagaatagccttactacaccagatgcaataaactaccgagtcacattttaaatagaacagatagaacagtgaaaaaaccccaagatatacgaaccataattctcttaccccacgacactacgtggtgcctattccactgctcatccagccactcatgtgaaaggatcatcgatgttagatttgagaaccgacattgatggctttccacgagtaaaaaaaaaaagcactgagtcagatccatgaatcaagttaatatgattgtattaactaaattaatggaactgttaaaaaactaaatgaatggaagaatgacaaatcattcacataatatcccagaatatgtgcatgcttcgagccaaaagaaaacctaaatcacactataaattcaacatcattgtctagagccaagtggaggggaacacaatgaggtatctatgggtgaagtggagacaacgtcgctcatccatcgagctagagttgagcttgtagatttgctcctagcctctgtcaccccgccgcccacaccctatgcgtctcccttccccagctatcaaaaaaggttatcacttctctatctttgcttcgttgtttcatcgagctatgtagatggtaggatctggcctcttcgagcgtagcgaggatgaaggggaggcgatcaggatggatctagtcttgttgtcactacctctccccataccttgacgatgacaaaggcggatctgaccgctccccaagttcgagataactggatttggtggccacccgtcgaggagaggtggatttgttggccccattgctcgttggccaggattaggtggttgggagaaaatggagagagtagagagagagagagagagcaagagaggaggagagacgtatgcgctcggagtctcgagtggttgcaaatgaaactgatcggtttgatatatttttctagctcactaaaaactaggcactattttttttgttgtgttttaatagaaaaccaacatatataactattatcagtgccaaatttttttacagaatcagcatttataattatcattcgtgtcacggtgccagtttttatcagtcaggaaaacccttagcgccggcttttttttttcttcttcaactaaccggggtacgtttgggcgtttggctgcctggctgggtcatggaacggaacggaacgtgtcaacgagttggcatcaagttttgtcatgtactgtaatctgtacttttcggtcagaaaaaaaactgaacattgtttttcataaagaattgtgatctgtacagtacattcctgtgatccatttgacccggtcgtggaagaatccgtgcgttttttttttcgacttgtgcgcatgaagcatgcagaactgaacaagtatgcaagatgcaataaacggcggcgtcacattttgaatagaactgtaaaaaaaaaacccaacatattggaacaataattccattatgaataagattttatttacacagcttcagatctaaagtttttaaactgggtatttctaaccttataatttcatagatttagatctatgatcacgttaataacattttgacaaatcattttgtttctattttgatgaaatttaaagttttaaagcactataatttaatatacaaacttcaaatcaaacgtgaaccgaagtctataataacatgcctaaacttattacaagtatgaatggagtattcaaagtaccctatgtttacagtttgggagttcaatgcgttactcccctgggtaaaaaaaaaaaagaaaaaaaatcatgtttgaaccttttaacggttctttcagttgtggttttgaccacaatattttttataaaataaagttaaagattatcaaagtacttttcaacacaaatttacacaagacatttttatgttcgttaaactatgtatttcaaacttcattgatagtccaaagttaaaaatttggtcaaatctaatctaaaacatcatataaccaaagggaatatttgaaaagccgaacatactttttaccacccatactagaatttatttgggaaaaaaaatagccatgtttaaaaaatagttgccactaattttttttcctttattacaaagacttcagtcccggaggaaaaaaaaacaaaacggagtacgaaaaattggtgaggcctgtaacaattctaaacacccagccagccaatcatgttcgtctcctgttggaacttgtaacatcagtagatcacctaatatgatcttattatccatgtatattaagttgaagggccaggatcactcacctaaaacacagcaatcaactcccctaaaaattgataagaacaaaccactcctcttgttcctttccaccaaggaagtttcagtgggtgttagtgtgtcaccatccatggcaagccatccatccatggatgcaactcacatacatcacccatcaccaaagccattggtcccatattatgctttccaagtagctttcacccactaactaactgggaggaaaattcaagtacagcatcgccaatgattcaatgataaacacggttaaaaaaatgaaagcatagtcgattaattaattgtaagcccatcgaattacaccacctgctggaattaactttgagtaatcaggtcaaatgaagaggacatcccatctctttcctgacgagttattattaacccacccacccggaagccactgattcacgcagccacaagctgattagagtagcatctgatccaatccaaagccacccacttcttctttatatacctcccgcgccatctctccttctcccagctcgaatcggaggaccagctccgccgccgacgattcttgacttgccttcttctccggcggcgacgattcttggcttctttggttgattggtcgggcggagcagcggtcgaacagcttgcgggcatcaacaggcgaggcatggcgagggggctgtttgcgtgctttgggaggggaggggaggaggcggaggaggaagcagggaagaggccggcgctgcggcggcggaggacggtgaacctcaggtcgctgtcgctggaggacctgtcgcggacgctggcgaagacgaacctgcacgccttcaccctggacgagctcaaggcggcgaccaagaacttctccaccagcaacttcctcggcgagggcgggttcgggccggtgtacaagggcttcgtcgacggcgagctccgccccggcgccctcgagtcgcagcacgtcgccgtcaagtacctcgacagcgacggcgtccagggccaccgcgagtggctggtgagtttgccgctgtctcttctgctgccgaatcatacatccagctcgtctgatgtgatgatgaactgataataatgattttctcgttaatttttgtgatcaggctgaggtggtgtatctggggatgctgagccatcctcatctggtgaagctggtaggattctgcaaccaagatgatcacaggatgctggtctacgagtacatgccaagaggcagcctcgagaaccacctgttcaagagtaagtagttactaattaccacatgatttggggttaattaccgtgtgttagctgttgcagcttttgctaatcgagtgtgtgattcattgggtgtgcagatcttcttgcttcgttgccatggtcgacgcggctgaagatcgccgtcggcgcggcgaaggggctcgccttcctgcacgaggccgagacgccggtgatctaccgcgacttcaaggcctccaacattcttctcgacaaggtaaatcacacagcaagcttaatttacagcaaaattcgttggtgttgaccacatgatttgtgttgcaatttggggggattacaatttgagagcacagtttaaaaattgaatcattgttaagctgcagagtgtagggcaagtaggatgaattgagaatgtagtagtggttgtttattttgtatacgcgacacgcccaatcaggcgaatggatcgcacgttgtcaactgtttccagccgggtcaaaaatcgtagcttccaacagtaggattaattaaaataatgcgacaaataatgcgacaaattagcagcaaaacctttgattgtttattacacaagccggtcgttgggcgtagaactgattggctttgtctggttcgttaggaacccacggtttttttaagttcaacgatccaaactgccatactggctttgtcgtgtcagtacggtacatgccaaccactaccacaacgccacagcaacatcaatgaaatcaaaatgcacaacaaaatcacaagttctttttagttttgaacgaagttgcaagaatatttatgatcttaggtcccatttggcataactacagctttcaactctaacttacgtagagttagagctgtcaaacggtacagattcttcaattttagagcggagttagcggagctgctccataaatttatactatagaggtgtagctgggtttttgtcgctccacaactccactccatcttaatagacccattaaaataggcacactttgatgccaaatttgctgacttgtcaaatgggaaaaatttgcaggattacacggcgaagctgtcggactttgggctggcgaaggaggggccgcagggggacgcgacgcacgtgacgacgcgggtgatgggcacgcacgggtacgcggcgccggagtacatcctgacgggccacctgacggcgaggagcgacgtgtacagcttcggcgtcgttctgctggagctgctcaccggccgccgctccgtcgacaagcggcggcgcggccgggagcagaacctcgtggactgggcgcgcccctacctccgccgcgccgaccggctgcaccgcatcatggaccccagcctcgagctgcagtactcggcgcgcgccgcgcacgccgccgcgaaggtggcgcaccagtgcctgcagagcgtgcccaagtcgcgcccctgcatgcgcgacgtcgtcgacgcgctcgagccgctgctcgccgtcgacgacgacgtgcccatgggcccgttcgtgttcacggtcggcggcgaggaggcggcggcggcggcggccgggagtagcgccgccggcgacgccggcgacgacgagccggcgagggggagccggcggggaaagaagcacgtcacgtcggccgtgcacgcggagagcccgctgcgcgacggccggtacgcgagcagggtgaaacgaccggagagcccaccgagtgtgatctgatgagtacatagaacaaacaaactgaatttgtacatagcaaaactacatggtccttgattcatttgtattatactacctttgttcgtgatgttttttgtctaaagaatttgctaagggaaacgttgattaatagagttgtttaactccctttgtaacttgtaagaaagaaaaggggagtatttttctagattttaggcgcatatgcaatgtgcaacttttgttcattttaactacgatttatctaactttaaagacttttaatgtttatgcctgtaattttgtaaatgttatgaacggtaagtttattacatgtaattagttttttttgctacaataatttaatgctcaactttttttatctacaaaaactttgtttaaataagtaacaagggactttcctaaaagaaatccacatatatctagcaattctttgggaacttactagtattttatatttgaaaaactctaacccttggtttcaatccaaagggccaaatgttcctatcaggtttacatcgtacagaattcctccccaagtttttttttaaaaaaagctgaatgctcgttctttgttgcggataaaatatatattataattttaataggtaccagaaataacatgtgttttgccataaaatgtgttacctatcatttttcaatagatcaaatctattgatagatttgattgatttttagtaaatagaagtttacgggggtaatttacaaaactacaatgagagcagatggtggtgtcagccagacaaccaccaccgctacttcttttaaagtacttccttcatttcatattacaagtcgtttgacttttttcttagtcaagcttatttaggtttgactaactttatagaaaaatataggaacatttttaatacaaaacaaatatattatcaaaatatattcaatggtaactccccgtcaagatggcgacaatgacgtcgagcgcggcagcaacggcggagggacgatgagccatcttctggagacccgattagagcaccgcccgccgccaccgccgccgccaccaccaccgattccccagtatggcatagtcacggtacagagtgcacaggatgtcgacgcagccataccttcaacccttgttggtgaggttgttcggatttgggtgccgttcgatatgcccagcttcaacccttgttggtgaggttgttcggattcgggtgccgttcaatatatcattgggcacagtgttggatataggtgaaattctcaaggacaatgttcttgggcagtccctggtggaggacccagctctgctggctgcgaagctaagccaagcgaattggcttagcaatgagctccgtttagtgcgatttcgtgtcgagcagctgcagcatgcagatactgcatctgtctgcctgactccctcctcatcagggaatctgaaactttggatagtttacctttttttgttgttcctgtaaagaggagagcttcatatgtctggcccccattttgctgtgtggcccccattttcctattgggaggagtagttcatttctatatagatagttgaagagaaatatcaatgtctcccttagttaaggatttggcaaatatactcattttaaattgaatttccattccttttagctccagatactagtatccctcttattcatctcacctctgttttggaataaaggaggtacaatcgatgtaataattagctaaagcctacctcttattcatctcacctctgttttgaaataaaggaggtataatcgatgtaataattagctaaagcctaaggcaacaaaggttcaggttgtcaacatgttcatattcacaccggcattatgaagttatcattaaatcgatgacttttacaatgggacctttaatatagatagactgaaccatatggtaataactcaagtgcaaagatgccattcagatacataaatttatacttatttgttttttaaatgtcactcatctcctttatggggtagcgatgctttataaggttctgaattatctatattttagaaagagaaaatgaattctttttaaagtagattttaaaaaagcatctgacaaaattaaattgcctttcatctatcagatgatggaatcaaaaagatttcctaacaaaaactagtgatccgatatttcccttgctatctagctatagaaaaaagagttatagaaaggagatacggaagatagggtagctattatgcaatatgcatatgcctctgaggagtcagcaaaaaacataaaattcatactttgcctcttttgaaaatatgtctggcttaaaaatcaactttgataagaatgagctgattattgttggacttgaaaaagaaaaggaactaaattctgttctatattgacttgtaaaatgtagtgccccgttcaatctcccgtttgggagggtggatttttgttgcatgcaaaacgagaaacatcattagcacataatcaattaagtattaattattataaatttgaaaaatggatttatttgcttttttaaacaacttctatatttttttaaaaaaatacaccatttaaccgtttgaaaagcatgctaaaggaaaacgagtaagttgaagtttgcagtggaagttgaagtttggagttgaatatatagggctaagtagtatacctctatacatgttgtctttttatagactaccaaaaggtgtatacctctatacattatagaactagatttttatggtagaaatatcaaggcataaggaaatatcacttagtccagtggccaatgatttgtaggccaaaagatcagggtggcctggggattcttgatttatttagatactatgaaagtagcattattggggaagtggctttgaaagctggagaatgatgagggtcttcggcagagtatgttgtatgacaagtacttgaagaacaaaactttgtgtttagataaacacaaaacaggagactcacaattttggtctgggctacttgagagatgagatacaagattttttttttctgaaatattgtagaaaggaagtaaggaatggcactatgactttgatttgcgaagacatatggataggagacaggactttggctgaacaattccgagagttatttaaggaggggactacgcatcggtcacccgatccggagtggccaaaatcggccgctgacgtcagcatgatccgattgcatcattaaattcgttacaattaaatcttcaaaacaagaccacacatggatatattctgacgaacatttttttagcttattattgaattatttttaaatattgcacgatgttccaccaagtatatcggaattgtttcactgagtagatcgaaaatgtttcaatcgtttaaatcgggcgttgtttcaccttatataaaaaaatattttagcaaatagagaaagaatatttcagttcactgcaacattagatctatacatagtgaaacattgtaagtacactaggtgaaacatttttggtggaacaaaaaataaaacgaattccctcgaattcccttaatagagggtttgcaaaatatgtgggtgatttgttgcaaaagaatgtttcgttcactgcaacattagatctatcaatagtgaaacattatgagtacactaggtgaaacatatttggtggaacaaaaaatgaaacgaattcccttaatagagggtttccaaaatatatgggtgatttattgcaaaagaatgtttcgttcactacaacattagatttatacatagtgaaacattgtaagtacactaggtgaaacattttttgtggaacaaaaaatgaaacgaatttccttaatagagggtttccaaaatactatgtgggtgatttgttgcaatggagtatatagtggagacacatgacaggtgggggcagaaaacatggtggggcccaggcgcctgcatgcacccgtgtgggggacggggcgcgcggggggagcgcccgatctgctccacccccgtcgggcgcccggcctgcagcattttcggttatataatataactttcactaaaatagtaacaatagcaaaggtctttgagatgggttgggatgcctttgaattcagaaggacactaggtggggatatggctgtgaaatgagaacattaataaaagctttgtaatgggaaaattttgcaaaatgggaaagacaagctcatttggacacttacaaaaagtggggtttttactgtcaaatctttttactatgcaatgaagggacacaggtcgtgcaatactgcaggctgacatgtgggccctgtcagcctacagtactgcacatgcagtactgcaggggatctcaattggcaatgaagttgcaagatagtggttatccctttaagaaaatctggagattcaagattcctattaaaattaaagtgctcatttggttagctctaaaaaatagtattttgacaaaagacaatcttataaaaagaggatggaggaagggtactgcaaaatgtcagttctgcaacaaacatgaaagcataaatcacttgttttttttagtgcagtttagcacgttttgtgtggcataccatgcattgtgtttttgcatgttctatacctggggggttaaaagaagtaatgggtggatggttaagcaagttctctaaaaagaataggagcctgctttcaataggaatagctgctattttgtggagtatctggaaaatcagaaacagggcttgcttggataatataattccaaatgatctgtggaagtgatttttcagattgcacataatatatcaaatcgggctattttggagaacaaggaggaagaggcaagaagcttgctggagggggccagggtgttaaagcaggtagccgctgaattctacagtgctcggcatggctggagcttcagagctggaaggatccaaggatgacagaaggaagacgacgtctctcaagcatggagggtttggaatatgagcaaaaatggctgagtttttttgggtgctattaggaaagtatggactgttaagttcttagatgtagaatggctgaaatggcgttttgaatgtgtgttgagcaggttaagggactatgtataaggggatggcacctagattaggtgggaggaggttgtggtcgtctcctgttatgctcttttttcgcttttgtaatgaaaaaaaaatcttgcagattatgttcagtggcatgtctcgcgacaccaagaatcgcagtggctcggtcgctggctggcgccaaggatgatgccaatatcctccggcccgctgatagtcacaactctgaacggcggcggcggaggcggcaacaaggcagcgaggacttcaagaatggattatgtgaccaacatgttctttgccgcctgaacgccatcttcaacagcagtcgcggccgcactcgtggactcgacgatcagatcgccatggcaggcgggaccgcccactgcgacgcgttcttgctcaccgccagcctcctcggcggattcttgcggcttgtcatggaagcccccggtgcgcgcccggcatgtcgttgacgctcgcgtcctggcccgccatgtgctggacgcccgcgtccgcttccacgcccacggcggcgacgccttcttgcgagttgccggcactttcttgcggcgcctgcgcctgcgcctgaagactccatggttcttgaggaacgtcacggaagcccgcggccatgcacagcaggtgttcgacgcctgctcccgcgggcatgtcccggccggccacgccttgttgagcctgagacacgtcgtcgaaggcgctcgcctcatcttgcatgttgccccgtatgcccgcgccctgtcgcgccatcttccctccgcacaacatcttgttgtggtcgcctcccacgtggccgaccccgacgccgacggcgctgctgctggtcgctgcctccgctccaagaaaggaagcaactccctccggaaacaatggaacggggagagcctccaacgccttggaggcgagaggaccgtacgccgcccccgacctcgatcttgtgagtcttgtcgtcctctgctccccggcggctgcctccactgctttcttgaagacccgaggaatccgcacccggggcgttctgttcttaggtgcgggatcgaggggattctttcggagaggagccattgaggcggggaggaagggggcggaccggaggcggggagccggggaacggggaaggagtggaggcgccggagttggggaagaagagttcaggtgagcgaagcgggtgggggaagacgacgccgagaagattgaaaatcgactctttcagtggtttggaaagtggttctctgatgttggcaggttgattgtggttgacccgttgaggatcagaaaagatgctgtacacacagaaaaaaagcatttccgcataagcgaggttttttttctatggcaggtatgacttttggagtcaaatggccgctaatgaaaataaaaaccggggtgaagctcgccacccgcttgcaaaaattaatttttccacctttatttttgcagctctcctccctctcctctctctcagctctactctccctccgcggccggtcgcgatgacgctgacgccgactgcgccaacaatgctgacgatgacaccgcctggatctaggaggagaggggaggcggcggcgacgaggagctgaggctgcggtgcggccggagggggtgcggcggtggtggagcggctccccttcctcttctctccctccgcggccagccgcgacgacgccgacgccgacgatgacgctgccttgatctagggaggggaggggagcggaggcggcggtgtggccgaagacggcgtcggcggtaatgcggccggaggggaggtgtggctcccctccctctcctatccctccgtggccggccacgacgacgccgacgccgactgcaacaacaacaccgacgatgacaccacctggatccggggaggggaggggaggcggcggcgcggctgaaggagaggtgcggctcccctccctctgctctctggcagctctactcctccgcgcccggcagtgacaacgacgaccaccgcgactgcaacgaccgcctggatccggggaggggagggtaggcagccatcggctagagggggaggccggcagagccgctggcaggttgggggtggtggcggcggattttattttattcgctaaaaatattttcgcaagcgggtggttctaccgtctatgaaaatagatgccgcctggaaaaatgagtttcacaggcggaccgctgagccgcctgcaaaaatcatctatttttcgtaggcctttgcgtgccggtggtcctttccccgtatgaaaaagctatttttggccgtctggaaaaacgatttttctagtagtgacacatttcgcccagggtttacgattccgacaagcccttccgtttcgggcgctggcggaattcggaatttcgcgaaatccggtggaaaactgttaaattctgaacaaatttaataaatcaaaatttgaatacaaattccctgaatttgccgacaagttctcgaaaaccggtcggttttggtaaaattccgatcaaattcatcgaaatttcgaccagtaagtatttttctttttttcttaattccggtcggttttggcccatgtaagtgtttccttttttttttgccagtaataataaaatccccaccgtcaatcgggcaagaaaagaaattacagcccgagtcgtgcatgttgaaaatgatcgcgagttaattttctttcgatgaaaagataaaaaaaaaaaaacaagaagggagcccacccagctaccctgagcgctccgtcctccggctcgtcgcgccaagtgaagtacacactgtacactcttccgccgccacttaagaaagaggggggcgagcgccccccccccccccccccccccgcgccgccggttcatacccctgccaccttggtccgtccggagattcgcgcgtcatcagcctccttctcaggtactatctctcggctcattctccctctcagttatttgcaccagggaaagacccggaaggagaggaacatctctgtggttgctctcgttttcgggtgaaatttttttgtctttccgattatactgggagtaacgatgaggattcgattatctctgtagaataggatccgattccggctaggtttcggggtgaaccaatccttgtttccggacactgcttgcctactatatatgttggattgcagcagattgattgctttatttatctgcagagttcagaggagtccggttgccagctcggagagcagctagaggatcgcaggtaatctctctctgccagccacaattatgctctgatttctcccccaaacctatctgcatatcagtatatggaacaatctttttttttttgttgttgttttgctagaaattgttttatttgattagggggaaattgaaaagaaaatgctaaggttgaaacacatcagtgagttatgatctttttacaatagtcaataggtactaggcaggatattaatgattacaataggtactaggcaggaagtttgagtaggatttctcttaatcttgatttttctctctcctcccttccagtctgcgcccttactaaatctggccatctatgttgttgcagaacaggaatggagaacaatctgattcgtagaacaaaaaggctgaagcgatgccatcagcagcccttcaaacaaagcagggcaaaagttcagtttgcagatcttcctgaggtgtgtttagaaacgagaaaccttcttcaggtttctgttttcaaaaaatagcttatcgaaaataacttctaccatgtccctcttgtgcaggatttgctgtgcacaattttctcaaaaattgccactgaaggatgttgtgaggaccagtgttttgtcaagaaattggaggcacatgtggacttgttgcacaaaactaagattcgatggtgttatggtatccagggataatattaatgcaatcttgcagcagcactctggcaagattgttgaagagtttgaggtgaagtttgaattcgacagcaagctagttgatcacctcaatggtttggttgattttgttgtatcatcacagacaaaaaaaatggcttttgatttagtgccaaccaatcctgttggtcttcttgatcgatacagatttccctttgagcgtttcgacaatggaagcatctcccgtctacagcatattcagcttagctttgcatctttggaactacctccccatttcagtggttttctaaacctaaggaatcttgaccttcacttaatacgatctactcagaaggatcttcaagatttgttatcacaatgctttaatattgaatggttgagtttagttagatgccatattggtggtgaaataaaggtgacacatccattgccgcgccttctatacttacgagtcacatactgtgatataaccaagttataacttaatgccatcaacctcaaagcttttatgtatgatgggatgcgacatcctattgatcttgggcatgctctggtactgaaggaagcaagccttcatttttttggctctgtacatcttgaggatgctcttactacactcccaagtatgcttccatgtgttcagtccctcagtttggatgcctatgtacctctgactactctcccaagtgtgcctccttgtgttcagccgctctgtttggatgtctatgttcctctcgaggtttgttgctacacctttgaagtcatatgcaattctttgctcaattctttcttactatcaccttttcaggtgtcctcgctgctgaagaacacgtgcaagttttctcatctgaaatatttacaactaaaattacgtctatattatcatgattcgggcaacatcctctctttggcctcttttctcagggccagtccttgcatagagaagttagaaatacatgtgagtactatatgttttcctatttgcaggaaatgcgtttattccatatttcttctttaatcattctggctgttagcaatgcagtactaagattttgatgatctgtcaattaattatccatgcaatacaagtcttcttatcaattcccattttcactcattgcagttcaattcgtatgctttgtcacacttgtattatcagcctatcaggaggcttccacaaggtgaatacggctatctaaagaacatgcatattactggatttgttgcatcgacaggcgagcttgaatctctgctacatgtcgtggaaagtgcctctatacttgaagttttgactattgaggcggctggcatgttagggaaagatatagattatgaaggaagattaaaagttgaggaattgacaagaagataccttgatgggataatgttacgaaatacaaagctctatatggcataagttattgtagtatagaagaggtgtgcttgagatgtatttgaggattcctgtgtgcaaggatctgttgttagctgtgtgcatgtattccatggatcattagtaattttcgcaggccatatccttgataactctatcagctgatggatcatttttgatagctaattgtctaattgattagaaatatatagccataattggaaatgatgcgatatttgttttttttaatattaaatgatgtgttgtttgtaaaatgctatattttgacctacttaattatgttaatggcgtaagaaaattaactcaatgcatgaatttgaagggattggtgagaagatcaatgaacatatttggagggatcgatgattatagatttaagatccttcaaaatttacttggtgcagttcaaatcatttggcctcagtaattttgttgaccccatagttcgttgatgtcttgcttatcacttgttctgcttcatcttttgcttataagaaatgtctttgtgcctgtcggtggatggcgagcgaaaaaagaagttatgtttttcaactgagaaaaatctttgtgcatcttttgctgtccttttggatttaggatctgagttgtgctaaactctaaaacccaagaaatccatttgataaagctggttattttatctttctggaaactgtcaaagaactgactatcttgtgcaggttacttgcctttagtttggtgaaggatcgatacttgcactttggtttaaaatgttctatatattgttgtctcacttgatttattgtgtaaccatagctgctttcagtttttgtaagtgctaatctgtaaccttgctttgcagttcctgaagttgtgagtcatggctgccaagctggcttgcctccatagtctccatgaacgccttggtaccaccttctcatctcatcctaataagttgattgcagtcttttctaggtgaagatctcctttgaatctgctcctggaaatggttgagttcttattgatctttatccgcataattggttagttcttagtaaattgagtagtgaaatgagagcatgttactgactcttagctgacaaggtgatccattcctttgggtttatatagtttttcctgagattgttatgatggtgtatgtaatgatctttgatgagatgtaacatattgattatgagtcatggatcttggatgatgttaaaaatattgtttttagctagaatcagtaagaatctggtctatatggtaatgccatcaacacagttcagccacaggaaggatgtgagatcgaagcattcgttctatttctcaaatatcactctatgcaggtatgttaacaagggaaagggagtgctgtagcatcaccagttgcttgctgagtttgatgaattgatgccttgatcgaagctgacaaagagaaatgtgcttcatttgaagacgttctgcgtgctgcccaagtatatttggcaatgtgcctactccagcatggcgacgatagtcaaatcgaagtcatctaccagcttttctaatttaatttccttgactgcatgtaggaagccattgtgctgcccccatgtgttgcactggccatcaggcggccaaggtctggtgtctgggactacatttgggtgaatgtgagtgagttggctgtggaggagctgagtgttcctgagtacttggaattcatggaacagcttgttgatggacagtaagttccagaaagacgatatgcacattataactgaagcaacataacagtctgaattcaacctctccttttcttaaacagcaccaacagttgttctcgagcttgattttgagcccttcaatgcctccttcccgtgcctgttcatgtccaagtccatcggagatgggtgcagttccttaaccgtcacttgtcgtccaagttgttccaggacaaagagagcctctaccccttgctgaacttcctggaagaccatgaccactgtgggcacggtcagaacctaccaaatgcttttctactgcatattttttcttgtttgaattgcctgttgttagtcctttagaaagctgacattctctgaagttggcgccggacaaaggtggcgccggagccagagcggcagcgtttcccgcgttggcgcgggtctagatggtagtgcaaagggagctggcggcggtgggtcgtcttcctcgttgccggtcggcaccctcgcccttcctggagctcctccccttctttgtggggagtttctaggctggattgaggcggcaacttgtcagcgggggaagcctaggttgctgaagcaatgccacccagtcccgggttctccttcagctagatttggcgaggagactggcgggtggtggatcggaggggtcctgggccagctctcagggatggaggttcgttgaagtcagccgatggcggggcgtcggtgcggtgtggtggtagtcctgtcgttggcaggactggaagctggccggcggaggggcgtcggtcgggtgtggcggaagccatgtgccgccgatgtttagatggtggattcggattgggcgatggaccacggcggtaggggattccgagcgaaagcttagcccaattttttttgggccaacagtgacttcgctttcgggcgtggtaaccctcctgagggcactgttgaggtacccctcctccctcggcaaggagctctgggtgaaaaccttgtccaaggatgacgacggcgtctttcggcgtcgcaaccctcgtgagggcgttgttttagagtcttcgtgtcgtggtggtgttgttggcccggtggcgatcggtctcgcatagcgatggccggttcggtgcttggcttccctctctgtagcatgtgtttgggcggttggcacatggttcggggcgtgtgctctggtgcatatccttcctcgacagccagctgtcgatgtaaaacttttcttgtaaccttttcttcctatcttaattacattgaatgacctccttcggtcattccggcaaaaacattctctgaagttccactaaacgataggatctgaatttcctcaatcataatatattgttttctgttacagaccatgatgctgaatgacagaattcagagtgtacatatgaattatagagtaatgtgcagacatgattttacttgatgcaggtaaccaggttgttgcctgatgttattgggactacatgcagccagtggctggagaaggttattggaactgagcacactgacattcttcgtgttccattcagaattcatctttctttttttctttctttttttgctgcaggatgttgcaaacgaaattatgagggaaatgcaggccaaatataccatttttcgtgccaattaactgctgatcatgccatgacacacagacttcacatcatgaccagcacattccaagaaattgctagaaggtaaaattttactattgagcagtagaatatcgctgcattgtggcaacaactgaaggagtatatgatgtttgattcctctgtttcttcagcaaggacactgttcggcagtatgaatcacacattgcattcacccttcctgctcttgcaataagacagtcagactcggaccatcgcatattacgctggaagttcacaagagaatgcaaacaatccgatgaaaatggctttcataaagcatatcatatttcaattggcatcaacttgcaaacccattgtaggcttccatcggatggcctaatcagccaaagaaaaagccaaattttgaattttcaaacttaattttgagatatttttaacgtagtttcttttacaacattggcttttaagtcaccaagaacacatttataaaagtttcacgtacaaattcatttttatttcctaataagccgttttggcttattatggggaccgcagtaaccatgtctagagcattttgtaacactagaacaaatttgattggtactaggatatggtgaagaacaatggatcgagtagcttctgaccaatgacattttctatgcagtctcaaaaaaataaaaaagggtctcttcggagacatccgataaaaaaatgaaaaggaaaaaaaaatgaaggaatcgaaaacgacacttgattttggattgatgatctggacttaaatggcagcacccatttcagtggatctgatcaaccaactcttcacagacgcctggattgatgactgatttctctctttccaaatttcttagacgatgagtaggattagggtcagcataatgccattcaagaatcatcctaagccattgtgtgaagagcggaattcattgacagcttcatgtagtttgatccacctcaaatcatctctgcgaatgcaccaactgaatttggcagtgggaaatctaaagagaatatgtactgcatcatcatgcgaagcacatacagcacaaagatcttacccaatccaattctcaacaacgtagactgaattctttctctccaacctctaaccacaaaaaatgcttaatttccataggaatgagtgctttccagacatcagacgagatataagatgaaaacgctaatgctctgtacattgatttagatgaaaaacatgtattactctctaaagccccataagatctggtaactattcttacagaaagaaactgatggagtaaaaacgatcaagtaatcaacctaataatttcattctaatagatcatgagagccaaaagatcttcagaaagacagattctctgctcgcctttctaacatctcagagtaagaacatcaaatgttcaagattctgcaaacctgaagcattactggttgcctctcacatggtaagaacatcaagcggtcaagattctgcaaacctgaagcattatttttccgtggtggctagtatgaagaacccaagattgggggaaaaaagagtctaaactgctagcaatgcacatgctcattttcctaaaggctactccctccgtttcataatataagtcattttagcatttttcacattcatattaatgttaataaatctagacatatatatctatctagattcattaacatcaatatgaatgtgggaaatgctagaatgacttacattataaaacggagggagtaacattttttgtggccaacagagaaattagtgacatcagactgtcaaagcacatcgtttggagaagtgaaaccagttttcacgaaatgttcaatgatctcagtctgagtctcaggtgatcaaacattcaaacctatatcttaatcgtacgcaagggataaatggaattacatacataggcacgtagctaagcatcctgaacttacacccatggcacaaatcctgaactaacacatgccataaatccttatatattggctgtgtttagatccaaagtttggtgtcaaactttagtccttttccatcacatcaatctgtcgtacacacacaatttttcagtcacatcatctccaatttcaaccaaaatccaaactttacgctgaactaaacacagccattgtttccttcagattaaaaaaaaatgtaagatgcctgcatacatggctgcatctaccatttggataacatctgaaaataatattttttttaaaaaaaagcaaatacattctacatagaggagatggattttcatgacctatcttctttctatataaaaaaaatataaccatttgggtgggccaaatgcaaaaataaagggatagtgtgttcttaattaagggatgaaaatactttcccctacatatagaacacattgtacacatccattgaccacaaatcttaactagtacacacgaaaagtacgaaagaaagatacccacatcaccatcaaaaattaagcaaacggagcgacgaaccagacacgatataatgctactgcaacatagtgtgcgctataccacaacacgagtccatcaaatccacaagccattaataagtatcgaagagttgcagctggtcacatacaaaatgaccagaaaagcacacttgcagcacatataatccgatcttgttacagcacaggatgaacactaactctcggacaagtctgaacattgtcgatcccataaccagcacagatgactcaagaaaaatggctcaaatcgcttaccagcagtaggaagaaactcagctcgtcgatcagtcggcgtaggaggcagcaaggacggtggaagtgagggtaagaacgaccgtgacaagcgcagcggcgaggaccagcttggcgaggagctccacggtggtcgtcgcgatcggcacgttcccggcggcggtggcggcggcgccggctcccccttcaccgcggccaacagcacggacatgggtgtagatgagcgtcatggagaggaagaacgtcgtcgctgcagcagctggacggagcacgtggacaaccgcgacggcgaggggtagcaaatcttggccgccgtcgatggcgcctggctgaggagccaagaagacgtgaagcacgccggaagacaagaacaggatgaggtaaacgacctgcgggcggatcatcctgtccacggcaccgccgcctccgccgccgatacgggcgtagatgagtgcgacggatgtgtggaaggcaaccatcgccgccgccgccgccagcagcatcgtgtggaccgcggcgtcaagcggcggagctcgaacgaagcaactctcgccacccgactgcaggtcgacgtaggggaagaatccggtggcgtacatggacaccagcagcccgaagaaggcggtgaccgagggggcgctcgccatgggggatgagcacttgagcagcttgggaggatcaagattctagagaggtgcggggttgcacgagtggagaacggtttggatcggggtaaggttcgcggaggaaggaagaagaaatttaaagtgaagggtctcccacaaaaagcacaagaagaaatcgcgagcggcaataaggcatccgcggcctggaggcaaatattgcggcaaaaatcctctctcaagttaaagccagaggaattgaaagggacgggttgttccgtcgttgggtggggtgccgtgcaacattgcactgcagccagcaggtcggctgcattttcaggcagtggctttatttttctaatttttttatggaatactactattattgcatggcaaccatgataaggttatgctatctttgaccaacacttttgtagtatccatccacttattagatttaagcaaaatttgacagtaacagttaattttggagatttaattgagtctttttctactgtagaacataagcttattactcagatgtacacccttcgttaaaaaaaaaaaacaaatcctgagagtacacagaggcagagtcctagaagatggaatgtgctctttttacacatatatatatatataggcacacctgttttttttttatatatatagagtatacaggctctttttactttggttgtggcttgtttttttctccacgtgtggaaaaatcaattgatgctccgagaaatgactccacagcaatacaacagtacataaagttgttatttcttcccaatacattgacgctcccctttatatgttgggtaattggcctcactacatttaggggttcgtttcgagaagcttttatctttcatccatattaactgagataatactacccgtatgaccactagagatgggtgtaaataactaacttaaagtgattgtgatccactaatatcaacttgtcaattttggctttgttctgacggatttttactccatgaaccggtcactgttctttcgcagaaaggcgcatgacacggtacaccgtacacatcaattgcatctacatgattcgcgtgagaaaggagcgcctggattgagagattcttccatttcactgccgcagaagacatacggcagcaacaaattcctcgttttaaatcagggctatgcaccatgtacgagtacttgacgtttttatcagagcaattggccggatctaaaaggcaactactctccatttccccagctgaatcgtgtcgcatggcagaaagccaggaaggcaaggcaaatcttaacacaggtagaaccgtagaagtactagaaaacgagcaggagatgcagagcgaaaggagcactgaaatccagagaccagagaaagggcactgcactgacctgaaatgtctgcacacgtaacggctgcagggcacgcacggtcagctcagctatagctccggccatggaaaccggctccaaatctgcaaccgagctcgcagattggcgaccccggaacatggagaggcgagagctaggggaaagctcgattgagcagcagccagtggttgacctgaagaagtggtctctcctcctagattaaggtatttagtaaagcaaatggtcaggacgagagcggcagccatctttccccaccacaagcacaccccactgcaccatggcaccacctaggacgcagacagctcagaagacatatagtatgacaaagcatgtgtattttttcagagatccaagtagtagcatcgtactagttcactttagcttacagacaggcagctaaagttcgtttgttaagtttggaacctagaacaaactcatctgggtgaaacacacggagtttcactggagttttacaggcagacatgtcacatgtcatcgcactaggagcagttcttggcaagggacaatcaagcatcagggggacgttcaaacggaagaaggtttcgccaaaaactcattttgctctgctcatctcactttctcacttgacaaaaaacggtggtggtgtccaatcaccatgtgagcatacgaacccaaacgaaaaggagaatctgcaacttttgaagggcctactccgtacatcaatggggggaaaaagaacaaaactaacacgaaagaggcggcgtcgcggcgatggacgctgtcaaagtcgtcctcactcctcagcgcgaagagctctctgaccggatcagggcggcgcggccgtgcagtggtcaatttgcgacacggtctccgcatcaaatcatcttgtgagtgaggactactgtaaccaaccagatgaactttaggattccttcgggggaaaaaatacagaaatttcaaaggatttaaaatcctatagaaaaaaattcctacaagataaagaattgagttcctaaaattcctttaaaaattcctatatatagattggcatgtatcatgaaaattttggagaattcttagcatgtgctgtaacctcttgggattttttgtctacctctcttccaaattccgtgattttcttgtgcttcactcaaactgttttctatgtacgtagttctcctatggttttcattcttttagaatccaaggaccataatattttaaatcaggtgttttatttattctcgtgttttgagaattgagaatcttacgtttttcaagaagtttgtaaaagctagtactccttccgtgtttatttgtatgatgttgtttttcttttaagcaaaggggcaaagccctccatttctattatagaaatggtgcagctattacagagagtcatcccattaaacactagtgaagaaaccatatttggtgggtcgaccagatttcacaaatagtcccggttgtattaaaaacagggactaaaaacacctggtttaaaagctacagggtacttttcaaactttagtaccggttggtgttaccaaccgggactaaagatatatttgtagtcccggttgataacaccaatcggaaaaaaagatcgccatacgctctactcaccaaccgggactaaagatctatttatagtcccggttggtaataccaaccgggaaaaagatcgacgcggagatcggagaggcgtgcgcgatcggatcgaggtatctcctcctctcctttaactcgtctctcgtcctctcctcaaccttatctcctcctctcctttttaactcctctcctcaaccttatctattattctccttatctctattcctctccttctctctactgccaggccggcgtgagggtggcggggcgcggagggccggccggcgcgggcagcggggcgcggtgggccggccggccggcgcgcggtgcggcggcgcgctgcgaggcagcggctttctttttttcttttttcttttttgaagaatctgagattgttgtgtgatgtatttgattggatatgagattgttgtgtgatgtatttgacttatgtgtgatgtgaatatgtgatgaattttgtagaagttgtgatgtaattttttttaagattttgtgatgtacttgagtatttgagatgatcgatttgtggatttggaggcaatttgaggatgtttgatttgggattttggggacaggatggggtgaaatcaatatatttaaaaacaatgaagaaaagaaaagaataaagagcaaccggatctagcctctttagttccgattgataacactaaccgggactaaaaatgctttatctttagtccaggttagtgttaccaaccgggactaaaaatggatttcactttcggttttttcacccgagactaaaaataacgatctttagttctggatttgtagtcccggt

SEQ ID NO: 4948 - DNA, 10421 bp, Oryza sativa
  unsure (1)..(10421): unsure at all n locations
ccccacttttatcctacgtggcggctgagtcagcatgggacccacgtggccatgtcatcaccctctctctttccctctctctttctctctctctgttctctgggaggccggccggcgagcggggtcgtggggaggagacggcggccggcgacgcggcggcggtgacgcgggagaagggaaaacagcggtagcagaggccacagccgccgtcgagtgaggaggtggggccagcgagggggcggggagaccggcggcgagcgacagagagggaggaggcaggtcttgcgagggggtcggggaggccagtgagctcgccctcacccctcctccaatgccgcgacgctcgcctccgcgccaaccaccacggagcaccgtgccggcgtgcccatcgtctgcgtcggcaccgcggggacagagcaaagaggacggggggagcacggtggcgccagcatccgagggcgtcgcggcactggtcctcaatagctgggggaggagctaggtgcgggcggcagtcgccgagggcgtcgcggcatcggtcctcaagcaccctcatggcgtcactgttgtcgccgcgttcctcccgcctcgccgccgccgccgatgctgtcgccaccgccaagccgacgccgacgctctcttcctctcatgatgccgccaccaccgccaagccgacactgacattagcggcgaccgtgggaaggcgctggcagagctggaggaggacgagatggcgctcccagtgactgcgccgcccaccccagcagcatcctctccccctctctcgccggattggatcgaatcactggcgcggatcgaatcaccggattggatcgaatcaccgacgccgacgctctcttcctcttgcgatgctgccgccaccggcaagccgacgccgacgccggcagcgactgcggggacggggaaggacggccgtcgtcccgcgctgtccgcgtcatctacatcagctcatgggagctcgcctcttcgcgcgtcgtcgtctcccgccttaccggcttcactcgatacagagaagagagggggtgagagaggagaggagagaggaagcaagttggagaggagggaagaagaggctgacatgggggcctacgtgggtcccacgttgactcagccgtcacgtaggacaaaatcggggtcaaaaccaccgaaggacctatgtggccggttttgattagttaagggacggccgatatctagttttgcgattgggggaaaattttgtaactcgataaaagttgagggaccttcggtgtactttttcctaatgaagcttacactggctctgctaatcgtcgcgcggcccaacagcccgtgagggataacgtgcgccaacgatcttgctggttggagcaggaggcccaggcccagctgctagtgatcgggagtagcagtaggaatgtactaggataaaggcattggctgctcgttgaaaggtttacgcagcaatggtcatatagttctatgtagttctataaaacaactatagcgaacagagcgtacacgatacagcatgagaatgtattatttattattgtgtttctaccttctaccaatactgccttgactcttcatctgacctgtagtgtaggccgtgtcctgtcctctacgacatcatctttatttccgtagaagctgtcaccgagcttttacacacaaaaatgtccgagaagtgacgagtccatttcaaaactaaacaaaatcaatccgaatttaaaacaaacaaactcctgcaagccgggagaaaactttgcgtgcgcgagtcaaagcccaacgtgcggcccggcccgcaaaacaaaccacccgccgtggcactggcaaggaagaaagagaaagaggagagagagagagagagagagagagagagagagagagagggggatccccgcgccgcaaccaagtggggcccgtgatccgaaacgaagcttccgcgaagcagcaacggttatgcgtgtcctcctcaaaaaccgccatctctctcactcccaccaccaccaccaccaccaccgaactcgatccgccatgtgcccgcctcctccagatccgatctcgtcgccgccgccgccggcgatggactccgcgctgccgtccgccgtcctcgccaccatcctctcccgcctagacgtccgctccctcgtcgccgcctccgccgcctgccgctgcctccgctcctgcgcttcccacgccctctccttcctcccctccttccacctctccgtcagtaaccacccaccccccctgcctctgctctctcgcatcgccatcgccatcgccaccggctacggatttgacggggtttcgtttcctcttgtgtctttgtctgtgattgaaggaggtggcgctgacgcacgagctgctccgcccgctgatgccgctgaacccgagcctgcggagcatccgcctcgactgcgctaggctcgaggacgccgccatcgactgccttgcccgccccgacctccatgagctgatgctcctcaactgcgataacattagcggccgcctgctctgcgagcttggagccacctgccaagaactcaggtactcttctactgctctgttaactctgcagggtgacatcgctaacagaaaatactgcagtttatgatcccaataaaacaaaatgcagtgaaccagcgttactgtttgcttagagtcgcttctgttctgaactaaagtttgattcagttgtcaaatatggtattgagaagtacatttctttcccgcttggatgtagagtgctttccctgaatgcccttgctgagcgtaggggactaccgataagcttctctgatctgcagcaattgcttaatggctgttctcaattggaggtattgtttcgctctcaattactattgcaacaactaatttgtgcaatcatgttttccattagttgaaaacaccgtagatatatataattctagtttttattaccgaatcagttatgtgaaaccaaaggtgtttatattgtgattgtttagttttctattactcttccctattggatcataagtcactatgaacataaatctttgtgaaatttctactactttgaagtatgattatcttttgctttgaaatccaattaccttttactgttctggactggcaacttatgtccctcttattttcagtctctcaggttggcccttgatttctcaatgttnnnnnnnnnnnnnnnnnnnnnnntgtgggcatctgcttcagaagccctgacctccctagaaatcggatatattccaatgacaatgttgcttgaacttcttactgtggctatggaatcgcaacgatgcatgcatcatgtaaaggaacctgttttctttcctagcctccaaaagttatgcctcaccgtggacttcatcactgaccatttgattggttcactatcaactgcgcttccatcattgacacatctggacctgcaggatgcacctataatagaacctacaacatcatcagatctcaccaatgctggtcttcagcagattaatccaaatggtaagttgaagcatatttctctcatgagaagtcaggagttcttattcacctctttccgccgagtaaatgatcttggaatcctgctaatggctgaaaagtgctcaagtcttgagagtgtctgtcttggtggtttctcccgcgtgacagacacaggttttagggctatcatccactcttgttctggccttcataagcttagggtgtcccatggaagccagttcacagatcttgttttccatgacataattgccacttccctttgcctgacacatgtgagcctgaggtggtgtaatctccttactgacgttggaattgagaggttgtcattcaacaaggatctcaacgtattggatctcagggactgcaggagtctgggtgatgaagctgttagatctctaagctgccttcccaaattgcagatattattcttggatggaagtgatatcagtgatcaggcattgaagtatctgggccttggaacatgtccactagcttccttatctctgaggggttgccgaaagttaacaaatgattgcataccactcttgtttgctggttctgttaaacagagcttacaggtgttggatctctctagaataccaggtattactgatgatggtatcatgttattagcaaggagtcgaactcctattattgaactccgaatgagagagaacccgaaaataggagatgctgctgtgatggctcttgcgtctatgctagttgatggtggaacccatggcagtagcttgcagctgctggatctttatgattgtggtgcgattacaccacttgcaatccggtggttcaagaaaccatatttcccaagattgcgatggctaggagtaacgggcagcttgaacagggttatggtggatgcccttgttcgaagccgtccattcttacatatggcttgccgtggtgaagaattggggactttcaattgggatagatcctccgattggtatcgacatgatgatgatgatcttgatgagcttgaacagtggattttgaatggtgaacctgtatctgacactgaaaccatcactgaagaataaggcatcactctttaaggtttcttgacccacaataatctccctgttctagcctgctagtgttcatctcctgttgtacctccaccatttcatttttctttcttataaagctactgtgttatctgtcttaaccagttgaggtattttcttgcggtgtatgcatatgcaaacctatccgttgctgtatacttgtatcacgcaacacgcatacacgatatgcatgttgcattcagattccctgggcttatgtatgtacattgtttgctttcctgacctgatgttgtactggtatctttttccaggtttcagcttttctcatagttaagttatttatcgaccttatgccatataagatgtttacgattgctggctcttatacgatatcttaagtgggcacctttattgtggatacgctctaattgtttgttatgcgacatgtgcttcatcatatgttagtatcaaaagatcactttggtaaagcgccaggtccactacctctagttagtttcagtttccttgccgtagttagcataaacaagcttgtaagctatacatccgcttgtttgtttctcactatcctcgtttgtggctgtagagccaccgaaaccaggttgagccgcaccactctccggagcaaaaccaaaaaaaaaaaagtgcgtagtatgttttgatccagtactgaaagacgaacatacaatagattttttttttcagttaatggtgtctctatacagtatggtttgtagtaaaaatgtactactactgagcaggaatttttttaccggtgttaggccctgtcatccgaaatttcgatacaaattagaaagtattaaatgtagactaatgataaaactaattccataattttagactaatttgcgagacgaatctattgagcctaattaatttatgattagcatatgtgatgctaaagtaacatgtgctaattataggttaattagacttaaaaaatttatctagttttattagtagtagtctatagagtatttaatacttatatatttagtgtccaaacatccaatatccaacgtgacaagaaaactttagtcacgggatccaaacgcttagcacaacttgatatcctaggtagaatgtctaattaaaagcttttctgtgagtttttaccgtggataaggccactcgagcccatctgtcagtgtgtcagactgtcagtgtgccgctcactcgcgtccctccgtctccggccagctagtggagtggagtacattcactagtggtttgcttccagttcctatccaatctctggtcttccggcaggtccccgaagaaggagcggcggcgatggcggcgcctgtgacggtgtacggtccgatgatctcgccggcggtggcgcgcgtggcggcctgcctcctggagaaggacgtgccgttccaggtcgagccggtcgacatgtccaagggcgagcacaagtccccttccttcctcaagctccagcccttcggccaggtccccgcattcaaagacagcctcaccaccgtcttcggtaaaaccctaatccccccccgtttcctccgctaatttcgttgctcctccagtttccttttattctccctttctcttttgttcgaaatacgtactgattcatcacatcaatatattggaaaaaggagatgcaaataacatgtagccgcgtctaattagtaattacctagaaatttccccaatcactagtgccctttgtgaaaaaaatgatatagtttccatgttctaaaatggtccttgaatgcaaaagatgaggagatctacatatggtttaactgattgtatcatatcatgtttggcagagtcgagggctatttgccgttacatctgtgaccagtacgccgacagcggtaacaagaccctcatgggcaggaaagaagatggggcggttggccgcgctgccattgagaaatggatagaagctgaaggccagagcttcaacccaccgagcttggcaatggcattccagctcgcatttgcgccgttcatgggtagggccactgacatggccgtggttgaacaaaatgaagcgaaacttgtgaaggtgctcgatgtttacgagcagtggctgggggagaaccagtattttgcaggtgatgagttctcgctggcggacctggtgcacatgcccaacacagatcttcttgtgcgcaagaccaacaaggcagggttgttcacggagagaaagaatctggcgaggtggtgggatgaggtatcagctcgtccttcatggaagaaggttgttgagttgcagaatgtaccacggccctcatgaggcttcttgttttttcccctctgagcgtcttgtgttagttgcgttaaagattcggtcttgttcagttgtttgtatcatttgacaaaatgtgcaagctcttcctatgggtccctaatattgtgctaccatctgtaccttttagtttggataaggttgaatctattttcaggttctcaagtttacttacctaacagttcccttaacaaggtaacaatggtatagacaaatagttgcaaatgccatactgtcggcactgaattcttgacagacatggtatcctaccacacattcataatatgcaactattagatttacatattcttgatatgtctgctagcaaaaagaactgcattgtcctgttccttttagtagattgttctagttcactattgaaatttaagttgcatatagcttctttttttaacgactcatataactttcaggctacagctgatcttggagttggttttttggtatgagattggaaaactggaaatgttttggctcctttgtttatccatacgttctctaattactagtgttgagattgagggtaaatgctttagagatttcaacgttagtaggctgtcagcaaaacagcactgctgagatacaaccattgagaactattctgagtttattgtgattattgggcattgcctcaggaattgtacagtgaaaaggccctaagcattccccgatattttgtgctgctagcaatccaagatgaggtggaaaacgaattgtcatgaatcatgattcccttgctcagaatgtcaataatattgtagatttccaattcatttttttttgctacatcatggtgcaattattacaagtaatatgcagagtcattttaagttcatcttgtagtattgcaggcgtaactcctgacagcccgctaatgttattctaagttaacaactagtagtccttgtttaaagttgaagaacatacaggtatgtcttttgctcaacattaaagattaagcacatgcagatgtatcgttggttaatcttctataggttaaacagctggattatatccaactctgtactagggacgttgcttttgttgaaaagcttattcttataccctggcggaagtcacaacatcttctttgtatgtctagtacttgattccaatcttcttcttactgtcctatataaattctcataaacaatataaaagaatcttgtagtactgtgtagcaagctccttctatgctatatttttcactctagtgctgaaggacttcatagatactaataaagaaggctgttttgtaggatttgtttttgttctagacaatatgattgttgcaagcaagaatccagatcttcctctttttctttacacttttccttttccatttttgtggtgcctggtagcaaggcaagcatagaacttctccttttgtttctataaatacctgattaagaatcctgctgtcatcatccctcgttgtcgttttaaacaacttgatcaggtgatcaatcaaatcaatagaaacgatggctgcaggcttgcaagtgtttggccagccagcatctactgatgttgccagggtcctgacatgcctctttgagaaggatctggaatttgaacttgtctgcattgatacattcaagagagagcacaagcttcctgagttcattaagctgcgggtacgatactatttatttatttttatttagattcattctctcgaatactaagttaagctgtgctctttttgaccttttcaggatcctaatgggcaagtgacatttaaacatggtgacaaaaccatcgtcggtaaggccaccatggatccacattacaatggctactttacgttattagttttactttctttttttgaggatttgaggacaacgtgaaccctatgtgcagattcaagggctatatgccggtacgtttgtactcagtttccagagggaaataagaccctttatggaacgggatctctagaacgggcatcaatagaacagtggcttcaagcagaagctcaaaatttcagccctcccagctcggccctcgtcttccatctcgcatttgctccccatctgaacattccccaggaccatgctgttattgcagaaaatgagaagaaacttcagcaagtcctcaatgtttatgatgagatactctcaaagaatgagtacctggctggtgatgagttcaccctggctgacctttctcaccttccaaactcacattacattgtgagttctgagagaggaaggaagctcttcactggcaggaagaatgtggcaaggtggtacgaccaaatctcaaagcgcgagacatggaagcaggtggtcaagatgcagagggagcatccgggtgcattcgagtaatggcctgatatattgcccaagttcatcgtgtccgttgtcgatcgatctggcttctgctgtcctgtgttgtcatcgtcgctagtttgcctgttccctgcttatattgtcgtgtgaccaaataatatgaagcctcttcttgttgtgacgtagtttcataccatgtacctcgttgctttacaggtcatttgttttctcccttgtttagtgattaaataaaattgttaatcgacctggcagttctaaatctgttgttttcttcgcctgaataatagtattcttttgtgcttggattgagcttttgagtggcacataaaacgagaagagtcattagactaattgaatactattataaactaaaataatgtattttttaaaaagaaacttatgcgtagacagatttttaaaacacacatcgtttagtagtgaagcgtgttcactaaaaataggaagcgtgttcactgaatatgggaaagcagttaaacccttaagcggaactgaaaacaaccttaatgaaatggaatgctgaataggtgaatgattgatgataattatttgaggctacaaacaaacgatgaaatgaattaccattatagataaatagatttacacacacacacacacacacaaaaaaaaaaaatcacatcgtttaggagctctagaagcgaaccatcattccatgcctaaggatcctaaggatcttggatgtaagaatgccacaacacaaatttgtaaggaattcattggtgaacgagtagatttgaatttagatagtgaagtactgctatgagttgagttgtgagcatatgactctatatctattagaatttaaattgttcataaatattacacagatgcatgtttttataggaatctagtaaagttagagatttgtgttggtcgtccgttttttagtgtgttaagagaccacttgcggatgtgtgtatagtattagtatggtcttgtatatcctgcaacggaaaaaaaattaaatggtatgcacaattaaggggagaaaggcagacagagtagaatcgtttaaagtcttgaaaccgctggcaactagacagggtcttgctgccgatttgccgaccattcgccaccagatcaaccgatcatctatagggtttgatgtgttgggccgaacggtcaggctcaggttatcccgaaaatgctctgggtcgtgcgaccggcgcg

SEQ ID NO: 4949 - DNA, 8920 bp, Oryza sativa
  unsure (1)..(8920): unsure at all n locations
cacctaatttatctataatgtttcactatttatagatctaatgttgcagtgaattaaaatactcatttgcaacaaaaatcccacatattttggaaactctctattaagagaatttggtttattttttgttccataaaaaaatgtttcacatagtatactcataatgttttactatgtatagatctaatgttgcagtaaacgaaatattccagtgcaacaaaaaacccacatattttggaaacctcctattaagggaattcgttttattttttttccaccgaaaaatgtttcacctagtgtacttataatgtttcactatgtatggattaaatgttacaatgaactgaaacaattttttgctatttacttaaatattatttttatataaggtgaaacagcaccagatttaaacaagtgaaacattttcgatcaacttagtgaaacaattccaatatacctggtggaacatcgcaacatttaaaaataattcaataataagctaattttttttgtcggaatatatccatgtgtggtcttgttttgaagatttaattataacgaatttaatggtgcaattggatcatgatttggattagtaatttaagagaaaaatcagtttaaaatagttttgcacgtaaatcgggcgctgacgtcccgattttttcccacccacgatcgggcgcccgatttgtaggggtccaggttatccaggccaacccgttttaggaccggcctcatctttacttatgcttatacttgttagtcaaaatttgaatttttaacattaaatttagtattgattttgaaagttttttcatcatagtttatttttcagtttttgcttttagatcgctgagaacacgtatataaaaattttattcataaatttttttttgtttgtaaatataccgtttgtcttttttctgtgaataagccaaacaatgaccctgatttcgtgtcgtggttttatatctgacaaattttgatgagaaatttgatcaaaaaatgcatagcaaaatcgctcatatgatctgatgtatgtgagccacaactttgcaagtggtggacgagccgattgaagtcattgaactcgttccctcttctacggttctaccccaacactgtccttgcaactttatcggttagaatgctaagctaaatctgtgattgccgttgcatctagccacgtcgtcatacacgggtagcagtagcaccaaaaggcactctcgtacttcaagatatacttgttttctcggacggatcaaattccattgttctagaatgtcctgtttaacatcacactcgattggacattaccttttttctctctcaaaaacaatcggaatgaaacagctctaaagaacgtgctaagtgtacctactgaatccaaccttaaatccgtagcgtacgtaacccctgctccgttcatcatcccctgccagtatgccttgtgtaccttgttcgtttctttgcaatattcattccgacaaatgcacgcagcctcttttgtatcggttaccctattgataaaagatcacgccgagacacatgggggatcgtctcttttccttgccggagatgatagttgctccaagcaagaatcaggggctagctcttctttatctttgagctttctcttttcctcgccgtcctgtaatcctctgcagcaaggcaagcacctaatccatccctataaatacccatcggcgtctctgcctcctcacagcgagccacacaggttaagtcactttcacctgcaaatccacaagcacattgctcgatcaccgaggaagaaaactagctagcttaatcaccgggaagagttgagcaatggcggcaggattgcaggtgttcggccagccggcgtccaccgacgtcgcgagggtcctgacctgtctcttcgagaagaacctcgagttcgagctcatccgcatagacaccttcaagaaggagcacaagctccccgagttcatcaagctacgggtataaataaaatcatcatgccatttcaatccattcggttaattttaggctcttggaaatgaaacaatcacgcacgtacattggcttcattctgtcccctcccatgttcttttgcaggatccgaccgggcaggtgactttcaagcatggcgacaagactcttgttggtaattactgctttctaaattttcttaatcacctgaattattaacaaatggattcttgtttcttaatcttcttgttgttttgtggcatagattcaagagcgatatgccgatacctgagcactcagttcccagacgacgggaacaggacgatctacgggacggggtcgctggagcgggcgtcgatcgagcagtggctgcaggcggaggcgcagagcttcgacgcgccgagctcggagctggtgttccacctggcgttcgcgccgcagctcaacataccggccgacgaggcccgcatcgcggagaacgagcggaagctgcagcagatgctgaacgtgtacgacgagatcctggcgaagaacaagtacctcgccggcgacgagttcaccctggccgacctgtcccacctcccgaactcccactacatcgtcaacgcgcggtcgccgaggggcaagaagctcttcacctccaagaagcacgtcgcgaggtggtacgaggagatctccaaccgcgcctcctggaagcaggtggtcaagatgcagagcgagcaccctggcgcgttcgagtgatatgcgcacgcgcagctcaaaaactctcttgcattctgcggcgagctctgctttgtctcgtccacggctttaattcgtcgggcttcatgcagtgatgtggttgtcgtctacgttaattgtcgtttcggctaagaataatatgaagccttcttgaggtctcctctcagtgtattccttttgcaacgccatgtctttcgattcaataaatataaatgtgtcccagccttttttgctcatgtgcaggcagtatatgtagccctccgaaaaaactaattttactgcaagtctagctagcatgggccaacaattgagtacgtagtttgacctagctaacgcctaggtcaatacacaataatactttgggggatccattgtactgctgtctacttcctccatcccataaaaataaacatagtacatgatatggtatttccagtaatacaaatctggacaataatctattcagattcatagtactaaatatgtcatatttcatattagtttttgttttatatgggacgaaagaagtatgcaataagaaccacgcgcatgtggatagtcttggaaatgatagcatcaaaatccaacccatcatactacattgagtttatttttgtcatcatgttcttaaaaaaaactttttttttctaaagagtaaaatgcatgaagggttatttaacttgtttaggtgtatcatgtatatatcactttactttcaaaatacacattgagtcactaatataagttaagtgagccatgtgctcatctaattatccacgtgagtatatcatacatttggcattccacctaaaattaaaaaaaatacttctgaaaatgcgtagacctaacaatgaaagctgctagagtttgatgccaagtgagagaggactgggaactagaactcgtcaaaataggtacaagtgaaatgatttgattacactagtttcgtgtattgttaattggtagctgtcgatttctaagactggtaataaaatttatagagtacgctagatgctagaaagaaatggtgacatagtgatttatactagtttagactctcgggatgaggtaatactctagtccagttgtttggtggattacctatgtatgagtgttgaatgaagatagtgcgtaacccccaaggggtgctgtcgattccctttatatagcagcagggtgatcggcgacaaggaggatgcgatatcccttaaattctgggtacctgccatctgtcaagattggtgggataggtttttatctccctattcgccgccatttatagtaacagattacatgggcctgggcttgtatcacgctagagatctatacttcgagtactgtgatgggctaccccggtacgataactctcatagtaatgctatgtgaatcgaaaaatatatgttttctgcatatttctatatgcattttttttcaaggcagcgtatcgtatgcacacagctaggtagatgcactcatgcacacacccatcctgagcctttggatcaacatcctgcggccaagacctcgagtgtggtatttttgcaattagccgcccgcctcctccacttacttttacgaaagacccctccacaactctcttcttcactcatgcagttcattttgcaaaaaaaaaaaaagaagaagaagaagaagaagaagaagaaaagaaaaaaaatcgcccatttcattctggatcttgcacaagcactcccaccatcggcggagacagaaatctctagcaacggcttgtattcgtaggcagcgaaaataacatgctggccatcgatgacgacctcaatcgacggttcgccggcggagacagcaatctggagcaacgccgcatccggagaggctgccgcagtgctgctactcttgagtatcgctgtggcagagattctgttcaagtttagtggaaaaaaactttctcaactagttggcatgtagctaatggctaaatatcttctcacctatcagttgaggatgaactgatgattgatgagcagcacaacttactggttctgaaactctaccaaatacaactaaaagaacaaatttctctgcgaaaaaagtggactggcaattcagacttcatttcagacaagcacacaggtagccgaacccaaaagatgataaatctcaagctaaaaaaaccaatagaaccccataaaaggatacgatccaatcttgacaaaaaaaaacattgtagcgcccgttccgtcgtggcgcctagcaggaaaatttaaattctaaaaaaaaaccctaattgcgaaatctgtttctttgcttgttgtaagtctccatgccaatccctgatctcgaatccccgatctatcgtcaaattcaaatcccgaatccaaatccttcccaaatcaaattcctccgcaaaagtctattttccctccctcaggttcggtgggctgatttcctctctctctccctcagctctcccctcgctctgcccgcgcgccgcgtgcgcgtgcgcatgcgcgtgagccgatgccgagccgagctctccctctctctctcgttctcccgctctccctccccgctccatccccggaaaactctccgcgcgtcgttacctcgcgcgcgcgcccgcgcggtcgccgccgtcgtcagccgcctgctgcctgtgcctgcgccgtccggccacgcgccctgcggcactgcgccgcctgtgccgcgccctaccccacgagccagcgcgcgtgccctgccgcgcctgaacccgcgcctgccgccctgtagccgcgcccttccaaaccgcccccgccgtcatcgccgtcgtcactacccggccccgccaccaccgcgcatgcttccaagggttggaggcagagctcctcctcccactgcctcgtcgccctctccctccttccttcttttcccaaagtggcaagaggcaagtctcctttccctctgtcttttcttctcccccttccccccctccgccggcgtcatcctccctgtcgccgttttggccgctagccggagagccagctcgctggcttgaccgcccaatgtcagttcctccctcccaaaccgacattgctgccctataaacccgagcccctccccaaaccaatcttccccattttcgccctcgccattgccgcaccctgccctgttcgccgtcgccgttcgtcgtcgcgcgtgtcggaggagccggcacgagcgaggacgcgtgacgtggactccgggcgcaccctctccttcctcttccccggcccgaggccagagcgatcacgccccgcgccgtcggccatcgtcactgcgccccttcaccccgcactgtagtgcctcctccccgttctccctcctcgttcctcctcttccccttagctttcggtagaagctcgtatagcctccccgtagctagctggtgccgcctcgaccgctgccgccgctcgctgtgtgctcgccgccgtcgccgcccgtgctccgtagcgcccgcacgtcgtcggcctctctcgtagtgtctccgtctaatccgatgctagaaacggacttccggtggccgcgtagatgctctagtccggaggaatcgaaccctagtcgcgtcgttgccgtttccctcttttctcgccgccggttgccgccgccgcaatccgccgccttcgaactccctccggcgaatccgagccgttggctcgtctcccctcgtctcgtgcaaccacccggtgtgctcgctntcgcctgtatcgctgtggttcgccccgccgttcgcagctgccgtcagctgtccgttccggccgtcgccttcttcaacctcccgccggcccgcgtggcagccacgtaggcgccacgtcggcgcctgctcggccaagatcgggtcaagccgaccccggtccgccgctcccttttgccccgctcgcgcgcgcagtccaccgcgagccgtgaggctgcgtgtggggccgccgcatccgcacccaccacgagccgcgcgcgtgcaccgcgccccgctccaaaccctagcgccgcgttgcgtgctcctcgctcacggtgagccgagccgccgacaagcgggtcccactcgggaccacgcgagatggacccggcccaccggctacctctctcctctcctcctgcgcgtgccttgggccgccttctcaggccggccggcccattaagctcggccgaccgcccctttctctcgggtcgtgccctagccacccgagggaagtctgtttcccctccctctttcttttcttttcaaaagggtttaattaaatcctttttcctttagaccaaaaatccaataatcttagaaattcaatatcttctcaaccgtatgtccgtttgactccgttcaacttgcaaaattcctcaaatctcgagatctatttaatggcacgtttagaggtcaacaatagggctttattttcgccgtttgttgagttgtcccgtttcgcgtgtagtttcgaagcccgaagacccgcagtgcgaggatttcgaggatcaagctcaagatctcgagcaaggcaagtcacctttgatcatcttgcacctataatttaaaactaagtatttcttttctgcaaatattgcatgaataggattaacacaagtaaatcggccgcggcttgcgagatagcctgccggtcgcaatcctaattgctgcaattaccctccttgaattattgaacacctaaacctcctttgtcaactgttgtgcttcgatgcacgggcctttgggcacgggcatcggaacacctcccctcaaatttaaaatatccaatgatgggtaaaacttggggttttacaaaagacttggaaaacccgacacctgggtcggtgcttgcgaactaaaatgaatttccaaaatcgcggaccgggggacgtaccgggagtacggtttcctgctcttgcacttaaggaccgtttccttggaatttcatccgaacataaggcaagtgcgaccacatgggtggaatgggacacccctggctgagtaactagctaatcgggggaaccatgatgccaagagacatgtcgattcaacggggtggtgttggggagaacccccgggcttcctggcacagtatggtctgggacctaacctgttgttggtctgggacccctctcgttggcatatggtaaccctgtgtcggctttcgaaatgccttgacgtgaaagccccaaagtcaccagacgtggctattctgcacaggctgggtgaccaaggctagtaatgtcatgtgggtaaagtgtaccccctctgcagaggttattaaactgttcgaacagccgtgcccacggtcatgggcggatgtgaggtgattcctagcgtagttttgtttgactactgcttgtgaaattactgttgtggaatgggttcgatgtttgaaaaatctgcggctgatgggatcagccaggcccgggtggccgtttgaaagctgttggccaggtgctaaccttgaatcaattcaaagactgatacgttgcacatactccgaccggacgagacacactgtctcatccgtgtcgtttgagaagcactcacttagttgtttcaaaaaggagtttaaataaaaccagttgcaaaaacaacagcctttcctttgaagcctgcattaaacacttaattcccatggcttgctgagtactcctgtactcacccttgctctatataaataatcccccccagttgctgaagaagatgaagtggatcccgctgacgaggagttcttccaggagcaagtcggctacgatgagttttagggtttcggtctagttcccaagtcgcgcctgtgatgattggtccaagtcttggcttccgctttccctttgtaatgcagttgtgagctcgagatctgtccgcagcccaacatgactgtactcctactctgtaataaagagacctctgttgctgtgatattctgtcttcctatgatactagcactgtttcctaggactggtatcgattaacaggttaatttggagcgtcacgggctagttccgtttggggctagttcggggcgtgacaaacatccagctccaatcttcaccaggcaccaaccgagctcagtttccactctcctcacaaactttacgacgatgagagcagcgacagcctctgaagatgagccgtcgctccaaatctctggctccaaaggctcaccgtcactgttccgtcggccacgctgattgaggtcgtcgtctccgccgatgcgttgtagtcgtcgccttcgaagtccgaatacgg

SEQ ID NO: 4950 - DNA, 5571 bp, Oryza sativa
attatgcccatctattgcattggctgcaggcatgtgtccattccacattccattgagagcagtagaatctatactaatgtatggcctacagccctctaagaatccatctatgcaagctttgaaagcacaaagaatctgttaaagtgaaccttatctccaactctaactatgtcaatctcaactacactaccaggggatctcatttctatctcagccttgaacctatacaaccaatcaaatgaatcatcaaactttccaaataacttatctttagccctctgcaaaccataccacgttgtctgatagcctatggtggtcttgtatgtctcctgtagcttaccttgaagttcctttgcacccatgtctttcttcttcttcaaaaatggaatagccctttcagccacccaagcttgagatgccatcttcccaagaactctgcttcttgaagcacaatgatgatcctcctcatttatttggatctgcacaagtaaaccatattagcaacttattaggtaaacaaaatcaatgcatacagcataatgtacaatttaacaacaattaaatagttagtataataccctgacacttttatcagcctgtgtctttgctctgattttccatgggcaaccatttgcagaacactttcctcgaaatctatctggatcagatttttcagtctcaagctcaaactcactaacaattgcatgctgtttcactgccattctgaactcattcattgatggatactttgtccctacttccattggtggatcatccctatcccaaacaagttctgggtcagcaggtacctcatcactaactacaatggctgcatctatcatatcttgttgaatctcaattggaataacagggagtgcagcttcttcttgtattgctgttgctgctgctctctcatctgtttttttgaaacccatagcatcaaatagttcatcctcatccaacaatgcatgagcatcaccatctaagccatccaaaatgattgccaacttactccagtccacaagagcagctgagtcttctacatttggtgcatggttacaagtgtcaccagtatcttcttcattggtcatttgaactggagagcaaatatcaattgaatctgaatttatcacaccacatctagcaattgactgaccagttggttttgcacttatcacactaccttcagcaattgatggaaccccaagatctacacttaaaacactagtgacaacttgagttgttgactcaactcgatctacatagctttcagcaggcttgtatccctttttagtaaccacttctaccccaagatataccactttctctttccacccagactgaaaccacttctcaaactgttcattgttggttaccttccattcagtcccactatcaaagtctaatccccacactacaatttcttggctaggcccccatattaccttgctagtcatatcatcacagaatttatctaaactataacctttgcatttatcaacccaccaatcatgctcttgctctgacattgatagcaatccatactctaagtttgctacatatgaagcacatttaacaacaactctaacagcattgccaggatcaatcctgacaaaaaaaatggagccaggatcaattctaacagcatgctgcacacctcacacaaagtcaagagaaggggaatacagagaaggggaatgaatttaccaaggaggacactccgagggcttcatcacgatcagatccacttcacctccgccagctatacgtcccggatgaccggccgatgcgttggcgtcgcgtgcaggcgcggtggaggggaggagctagcggggggactcgccctgccgctgccggctgggtcgtgagagccggccgcgacgcagtggcgtcagggccggcagcggggcggccgcgtgaggctcccgccggccgcgacgggactcgctctgcgtcacgcagtagcggcctcgccggccggccggcgcgtgtgggttccaggcggcggcggcagtagggttcaggcggcggcgccaatagggatccaggcggcggcggaggcggcgggggtttcaggcgcagcggcggcggcggtagagtttcagggcggcgacggtagggtttgagcagctgtggtcgagagaaagagatggatgccgatgcgtttctgtttccccctgttttctcgtttctgcacaagggcacaaaggtaatttcgccaggccagtccacattggcatgatgatgtggcgctccaactcagcgaaagtggcaaaaaattaggatgtaatctctctctagtggcaaatatgttaggccaaatctaatagtggcatatggagagttggcactcataagagtggcaaatagttaaatttcccggtgtggaccgtgtggtgtggatactctcgtcagtcatggcaagttttcccttcggatgcgactggtcaattggtcatgccacgcatgaaattcgcgcaccagtgtcaatcctgttcctgaggtcagcaatcaaaaattattgaccaaagaagatcctacttcctagggtagtttattttcggattggttattcaagtttatctttaacagcatatacaatagcagagtataaaccagctgcaaacatattttaagaagataaatgtggagagagaagtgaatcgggctacagatttgtagccagctgtagcacggactccaaaacgtagtgtgtgtataacaggtaggatcagatattaataagctattagattagctatatatgaattggagctagtacttggctataatattaaacttgctctaagggtcactttcaaaccgcaaatgaaaatggctacaccgtagcttcctataataacgtttcccaaactgtaggtccgtttgatataactctaacatttaaaactaactccaaaagtcaaatcgtacatgaagcagcctaaacttagcttcactcctagttaattttacgaaagcgcttcagtcaactctattcccattttagttggagctgaaatgttttaccgggcttcatctccagaaaagatggagctctagctggaaccgtgcccaacagatcatacttaacagcatattccgtaaaattttttatataatattttttaaaacaaataaataagttagtttttaaatttataatagctaatacttaattaataatcactccgtttctaaatatttgacgttatcgacttttttaaatatgtttaccgttcgtcttattaaaaaattaagtaattattagttttttcctatcatttgatttattgttaaatatacttttatatatacatatagttgtatatatttcacaaaagttttagttattataaaattaaacaatatatttatttgatattttaaaccacgtagaaaattttcacatgaaacataagtttaaaaacgtgctaatcaaaatcgtgatgaaatcggtatgataacaagaaaagaacaatattactactccttccatccctaagggcgttcacagtgtgtcgtcgtggcttctgcctcgactcactacatcggagattccatgccacgcatgcatttggcgtagccaagtgaagaccgcggagccaactttgggcacgcgttctgtaacggcccgcctctctcaggccggacccacttacatctagctgctcttatatgttcaccacatcggagattccatgccacgcatgcatttggcgtagccaagtgaagaccgcggagccaactttgggcacgcgttctgtaacagcccgcctctctcaggccggacccacttacatctagctgctcttatatgtgtcgtcgtggcttctgcctcaactcaccacatcggagattccatgccacgcatgcatttggcgtagccaagtgaagaccgcggagccaactttgggcacgcgttctgtaacggcccgcctctcccaggccggacccacttacatctagctgctcttatatgtcatagactattgaagaccacggagctaactttgggcacgcgttctgtaacggcccgcctctcccaggccggacccacttacatctaactgctcttatatgtcatagaccgcctctcccaggccggacccacttacatctagctgctcttatatgtcatagactgccctcacagatcaacacaagtcttttctgcacactttgtcctcactcgtgtgcactcaggaagaatttcctgattggttacccatcccgaaattgctccaggccaagtatgcttaacctcagagttctttcgagatcggcttctggaaaataagttgcaacttgttgatatgagtattctattaatcctattaagccctggctcgggatatcatacgttcttcctaggcttggcaggcatgcgtcagagcgagaggtgaggaaagacgaggaacgggatgcacgacgtgttgggagagggcatggccccgtgcttcatcgcccccaaagattgcgctagacagatcaagcgaggtcgacggtgcagcgtcgacgtcctggagagaagagaaggcagcggcggtggaagaggaggcggcgaaggaaaaggcggcagtgaatttggcgcctaacctcgtcgtcgtcctcgttccgcgccgtcggtggggtgggtggaggtcgacggccgcagtgggaggagaggagggggcaggcccgcggggaatcgtcgtgcgccgccatccctctccccgtggcggtcctcggctccgcgacgccgccaccagatcgggcgagctcggcaacgacatcgatggcggcttccggccccggagacggtggcttcctgcccgccaccgtcgccgcttggcctcctcgacccttccgccgttcgtcgcccgccttgttgagtagaggggagaaagagaggggggaaaggcacgtctcttgaggagagaggaaggaaaagcttggggagagagaggaaaagttgtttcacatcgaccctactcaaggctacttacactggagtatgaggtttgtaaggttctttgtctatgtggcatacgaggaacattaaaaatcgatgacatacagtaaacgtcctagatgatactagtaatctgcccgtgctaacgctacggaaatatttaataatacaaatcaaacaaccaaaataagatatatgttttgccaagcatataatgagatagaatttatagtaacgtgcatgcgtacaacacattatttacaatatgtataagaaaaataattacattcaagatgtaaaaataagatataggacaaagcgaattcatactttaattacatttctgagttcaattgtaaacaacatacatcaaattttgaaaatgtttcctacttaaggaaaacaaacttcacaaaaagatttaccatgatacatcttgatttgtcatgtaaatcatcactttttgccatatccatgcacatgggccaaattaattaaactaaggttttccttgccatggagcttgtgaagcgcataagcacaattagatcacaaggaactacttcacaatgcggctcaatagacaataacatactccctccgtttcacaatgtaag

SEQ ID NO: 4951 - DNA, 36166 bp, Oryza sativa
agaatgacttacattgtgaaacggagaaagtatatgacaaacgccggtgcccagggtattccggctagctccacagggtggtgggctagaagcctcaccacttctaagtatttgatattaggtcctaccctaatatccgcatctttttgacaataagatatcaaagccataatattcgcgtcttttgacaataacatatcaaaggcagctttgccggtgcttcatcgctatgctctcccatcaactccattcatcgcagacataacttcgttatccatgagctttacagtatacaataaataggatatagattccaaaatactaagcatgagaaccccatcatataaatgacaccaaaatcttagtatatcaaataagtgtcaactgtgccaattcgaacagcttctccatggtctcaccagtcgcacactgcattgagtaatccagagatatgccttaatactttctgtcaaccaacaagtacgttagcaatgaaagtagaaactcacacaagcaacagcaggaatttaaacccttacattgtcatttcctagcagcgctcgacatcatccatcagatcatgcatgttttttttttctctaaatcggaccaatgtaagcctgctcctcccatgtgttgcaaaatgccaaaccatagtgagcctgaagtccatattatccatttactttgatatctgaaatcaccatgccagggttttgaatcaaattaacatattagaatcatgtgaattaagccagggactccatgcaagaggtaatggttaaaccggcaagagttaaaatattttgattaacagatgactttagctaattgtgacaaagaatgacataaaacaaatatcaatttttgatttctttcatgatattgaagtatattaattgaagggatgatatatatttacaggacacttagggcttgatcggcaagcatagatttctcaggggagattccctcccaccacccaattgccctccactgtgggattgtgattgtttggataacagggagaggcggggatattgtctcacatcaaattcagaatttacataggactcatgcattatagaagtctggccaaagtttcattatcctcaaattacagaaataatttgcaacggaaaataaaatgcatggtattaagtaatcatggtggctagacccttccaataatcgttgactgttgttggtcacaattgagctgccgctagccccaagcattatgcccattcgaaccattttcatgttattatggttagactaatgtatatgctgccatagatgccattgcgtgcagctatgaaaaagctctgtaaccaaatatcaactaaataatcaatgcagcaaattaaactgtggaagagattaatcatcacctagaaccaaacctgttagagattaattgatcgggagggaggcgaggagccgttggattgtcgtcatcagaaactctatactctatagaagcactccaaaaatattcaaatcttatcggaaagcactccaaaacttccgtgttcatatccctatgtaaggaccacagaaaagtgcagttgttgactctgctctcctaaaaatcccactttacttcaacttcctttttcaaagtggctagaaggttaaatccaggcacctcaaaagaaattaaccaatacatgagttctaataaaaggattaggttgtggtcacagtagtaatctgactgtgagaaatgagtcatgcaaaaaaggatgaaggattagtgctaaaacatggcaataataaggcagcactaacctgagaaatatcaagagcctttcttccacttcatcagaaaaaggattggtgtaacaattttatggggaatattgtcgataggaaacaacttactaaaattctgcatgaaaaaaatttagttcctttccatcaatttgtttagaagaagcatatatatattagtcaaagtagggcaatacctttcagaaaatacgaaaagttcaaaccttttttttttcgccaatgccaaaaggttcaaacctgtaggaaaggcaaaaacatgagaaggattcacatagtattgtggtaaaaattgtgctcatcctgcatcagggcgtccaccatcgtatagagagtatagtagctggaacaactattaccttaaatacatatgcagcaagccaccacgaacaagtttgattattttgtttgaagtcattccacaaacacttccgaagcacttcttggtactgttgcagatgcagtgatgcaaacaatcatctcggacttatttgggctagggaaagagtccaagctgtgcactgatttttatctcgtgttctaatcaaaacaaatgaaaaactgagccatgctcgggccaagacaatgaagatataccaatcaatcagggagcagcaaatcgaaatgctcacatgtgttacttgcctccatgtgttttggccgccgtaggtggacacctcccattcttggatggctgcaagctcgtccgttccggttgtcacgtcggcgctgggagtcttgccggcgaccgtggtggcaggagactgagcgagtgggcggccatctggctgcgtacaaccaaagggttcagggacagccgtcggtcgaggtgaatctgggatggccgccggtgaaggcgatccgatctggagggaggcgcgatagaaagaggagggagggcgcggtgattttactgggggaggggaggggaggcgaggtcggatcgggagggaggtggggagccgttggatcgacgtcatcagatgattttcgatcgttggatgtgtcacacgattaataagtaaaaccatttatttaattatagggtagattttggttggagtaaaacatagccatccatatcctcccaccgtcgactccgcgagtgctcacagtccaccaaacagcaacccaccgaaaataaatcgcgaatatccgcagctgctttgcatctgtggcgcgccgcgctgcgtcagatttctcctcttcggttcccctcgccaacgtgtcccaccacccaccgtctattttgtcccctctaaaaccctccctttcccccgcatccacggccctccctctcgccgccgccacttccccctccctgacgcttcgccgcagcgaaaggcggagagagcggcgcgcgcgcgggagagagagagagagagagagagagagagagagccgagaggagcaagcgagaatgtcgccgatgctggcgacgctgccggacgtcacggccgtcctccactccccgtcggcctcgccgccgtccggcctccgcgcgccggcggctgtggggatggggatggcgaggacgcgctttctcgctccgcgggcggcggcttcggcggcctccgccgtctccgcgaagccggcggcggtggcgccgctgtacgcggaccgcacggtcgtccgtatcgggctccccagcaagggccgcatgtccgagcaaaccctaagcctccttaaggtctcgcacatcgtctccgttcctgcttccatctatcgaattctgtatttacgtggtgattttgttgactttgtgttgttattatgctgttcatgcctcgtggtgcagagttgccaattgtcagtcaggcacctcaacccgcggcagtacaccgcagatatcccgcaggtgaggtttccatctccattcattgtcttctatcagttcgtcatttctgtactggaaattggcctactatcgaattagtaggccacttaggctctctgattcattgataagtatacgtatgggctagtccattttcaaagcattgcagtttaccatttcctgtatatgcactattgttagtatgaatgcccttttgatggttgaataaatacgcaatagcaattccaaactaaggcccggtttagttccaaagtttgaaccccaaaaacgtcacattgaacttttctacacacacaaatttccaacttttccgtcacatcgttccaatttcaatcaaacctccaattttagcgtggaactatacacaccctaaagttactttatcccttcgacagtatgagtgaaatactgccatcttatacaatattatatttttagtttatttcttcccttcaacaattcgaattttgtctgaacttctggtgcactgatggatgaagcaacagaaaatttgtcccttaaaatgattcaagcatccttgtcaatttaataccccatcgatcacattgtgtgttcacaatacaaggagatgtccttttagaaacagtagtcatttttaatgaaacctagcatagttattgtaccttttccacacttgcatatggttttaaagtttggagagattttagttaatttatttcatttaatatgggtagcattagcagctttaccttcctatgactttgtccctgcatgatctgcagctatttgtggaaatgtggctgcctgtttagaaaattagtattggaatataacggtgtaggagatagctaaggtaaaaagtcgcagtgctatttaaatcacatgttttgatttttttctttcctttatgcaggtcccaaacttggaggtttggtttcagaggcccaaagatattgtccgcaaactacaatctggggatcttgaccttggcattgttggttttgacatagtcagtgaatatgggcaggtatattttgggaattaatgctcaatgttttagctcgggttgtgcatgttagaatttcaatggttactctcattgagaagaggatggcactcgagatggggcaattttctggttttcttcattcactaaacacaaaagccatatcctcccaaagaggattggatacatatttatagctgcttgtagcagccatgcagccatgctagtctaagagggtgctgtcagcatcccaacaaactgtcctagagcagagcatcccaacaaactgtcctagagcatctcaacaaactgctgtcctaactgtcctagagcatccaaactgaaagtagagatgctgtcctagaaagctgaaaaacaggaaaaaggcaccacaagaccaagaccaaccagccaagacttattcctacattctccccctaagtcttgtgcgctgtcttgtgggagagttgagccatcccgatccgggagcaaagctcaaggaacttgatcctcctaaggggtttggtgagcaaatccgcaagctggtccttggtgttgatgtagctcgccttgatgctcccttcctccaagtagcttcggatgaaatgatacctcactcggatgtgcttgctccgttcgtgaaaaacggggttttttgccagggccagagcggacttgctatccaccctgagctccaccgctccagtatctctgccgaggagatcactaagcagtcgagcaagccagagcgcctgggtcgaagcggcggatgccgccatgtactcggcctcgcagctggacagggccaccacctgctgcttgattgactgccagctaacgaggcactcgccgaggaagaagagaatcccgctcgtgctcttgctggtgtcgatgtcgccggcgtggtcgctgtcgctgtacccgacgaagtgtgccttgccaggacacctcgggtagtagagaccgtggtcgagagtccccgcaacgtagcggatgatcctcttcacagcctgctggtgctccgtcgtcggtcactgcatgaaccgactgacgtagccgacggagaaggccaagtccggccgtgtgtgggtgaggtagcgaaggctccccacaagacgtcggtactgtgtagcatccacctcctccgctgtgctgtcgcggctcagcttcagtctctcctccatcggagtgagagctgggttgcaatcggtgagcccagccagctcaacgacgcgcttggcgtaggcggtctgtcgaagcgtgatcccggagttgtcctggtgcacttcgatccccaggtagaaggagagaggccccagatcactcatctggaaggtggccttcatctcctccttgaacgccgcgacctctgcatccttggtgccggtgatcactaagtcgtcgacgtagacacccaccagcaaggcatttcctccattgccccgccggtagatggccgcctcgtgcgggctttgctcgaagcccatccccttgagcgtggaatccaacttggcattccacgccctcggtgcctgccgcaagccgtagagggccttgtgcaggcgtagcaccttgccctccttgccggggatcacaaatcccggcggctggtgcacgtagacctcctccttcaagtcgccgtttagaaacgccgacttgacgtccatgtgatggacgccccagccttcctgagcagccagcgcaaggagtcgcacggactccatccgtgccacgggagcgaaggcatcgtcgtagtcgatcccctcctgctgcacgaaaccgcgtgccaccaagcgagccttgtgcttgacgatggctccggcttcatccctcttcagcttgaacacccacttaagggtgatcgcgcggtgaccacgagggaggtcagcaagctcccaggtgcggttctcctgaaccgcgtccatctccgactgcatcgcggcacgccatgccgcgtgtttctcggcctctgcaaaagaccgaggctcaccgtcgtcgcacgcaaggtgcaactgcgcctccaggttgcgaggcaccagtcccggcaccggctggtcgccgagaagatcctccatcgtacggtaccgtagctgctcgccgtcatggtacgcgtcgatgcgctccccgtcgtgggagagcggagtaacgaactccaccgggctgcgctcaacacgagctggcgtcggagtagacgtgcccggaggagtggctgttggtgctggagcgtgtggggacaccggctggggtggtgtcgacgaagagctcgtcgtagtcgaagtcgtggcccgagggtgtgttggtgttggagtcggtggaggctcggggactggggtagacacgctcggtgaagaagagctgcctactcccccagctccctcgaagtggacgtactcgatggtgaagtcgtcgtacgtcggagtcgaaccatcatccaccgccttgtcccatacccaccctcgcccttcgtcgaacacaacatcgcgcgtaatgcgcacacgctgtgtctccgggtcgaggatgcggtaggccttcgagccctccgcgtagccgatgaacacccctggggtgctcctgtcgtcgagcttgccgatgtggccaagctccttggcgaacgcgaggcagccgaagacccgcaggtgggagaccgccggcttgcgcccatgccaagcctcgtacggtgtcctgccatcgagggccttggtaggcgagcggttgaggatgtaggcggccgtcaccaccgcctccccccagaagatggccggcatccccctctgcttgaggagggcccgagccatccccacaaccgtctggttgcgccgctcgacgacgccgttctgctgtgggctgtacggcgcggtgtagtggcgctgaatgccctcatcagcgcagtacgacgcgaattcagccgccgtgaattcgccgccgttgtcggtgcgcagcacgcgcagcttgcggccgcactccgcctctgctgcagcctgcgcatgcctgatggcgtccgcagcctctcccttgctgccgaggaccatcacccacatgtagcgggagaggtcgtcgacgagcagcaggaaataacgtcgtcctcctggtgtggccggtgtcactgggccacacaagtccccgtgcacgagcccgagccgctccttggctcggaagctcgtctgctggggaaaggggagccgccgctgctttgtcaccacgcagacgtcgcagagctgctccacgtggtcaaggcacggcatgcctcgcaccatctccttggcactgagctgcttcagggcctcaaagtggaggtgcccgaagcgctcgtgccactgccacgcctcgtcgtcccgacgagcggcgaggcaaactggatgtgcgacttgcgcgctgaggatgtagagtcgattagtgcctctggttaccttggcaagaaggcgacgacggcgatcccaaatcctcatgagtccgtcctcgaccaacacgcgtgagccgttctcatccagctgtcccacactgatgatagaattcctcaacgcggggatgtagtagactccggtgagcagcctgtgctcaccggacttggcggtgaaggtgacggagccaacacccttgatctccacgccggaggcgtccccgaacttgacggtgcctcggacgctggagtcgaactcggtgaagaactcccgtcggccggtcatgtgatgggtggcgccggtgtcgaggtaccacccatcagccttgtcgttgctggagccgtcgcagagggagacgagtaccttcggctcatcaaggtggaggaaagccgctgcggccggtgccgctggaggtagctcgatgcttgcgtgagctaggagcagagccggctcttcctcctccacccgtgcgacgtgggcctggccgcgtcgtggctgtcgacagtctttggcccaatggccaagcttgccacagttgcggcaggtgtcgtctcgtgccggcttgtggttgccggtggcaacgccctgggcgcctctgcgggcgccaccctcggcacgtcttcgcgcccaccgtagctggacacctccccgcgccttgcgcggcttacggccgcctgtcggggaagatgactcccccttcctcccgtcaccctgagaggcctcccactgctcccgagtgagatggagcttcccgccgatggtgatgggccccgagagaggccgtggctcatcaccatcgacgaccttgaggcgacctaacgcctcctcgatcgacatcgtggagaggtccagcagagattcaatcgagcgagcgatctgcctgtacttctcagggacgcagcggaagagcttctcgacagctctctcctcgtcgtaggtgtcgtcgccgtactgcaccattttttgcaagagagtgttgagacggagagcaaagtcatcaacatcctcacctggcttgaaggccaggttctcccactccttgcggagtgcctgcagtgtggacttgcgggcgcggtcgctgccgatgcgtgccgcagcgatggcgtcccaggcctccttggcagtccgcttctgggaaagcgagaactgcatctcgggcggaactgcagcgatgagggcatccagtgcccgccgatcctcgtcgtagtcgacgtcaccgtaccggactgcctcccacatgtgccgcacctggagcctcaccctcatcaccgcggcccactcgatgtagttggttttggtgagggtaggccacccaccgccgggaccaaaatccctgaccaccgtctggacgccgtggtgaccatggcgccggtcaggggagagggagccgtgccgcctgcgagggccgcgtgcgggctccgggctgccgccggcacgcccgcgcccgtctgggttcccgtcggcgggcgcgcggtcccttgggccgccgccgccgccgtggaggtgggctgctgcccaccgctctgctcgctcccgtgcccttcctcttgccagctcctcaagctccctgtcagcggtgatgtcgccggcgatggagccgttgatgctgctgcgcaaggtctcaacctctacctccgccgcacgtgccgcatcttccgccgcctccgcctccgcctccgccctggctgctgccaactccgctgccgccagtctggccgccttcgctgctgctgcagcggtctgagccgttgctcgcctgcgctcttctgctgcggcgagcttggcgtcctgctgacgccgagtgctcgaggcgaccgaacgctgagaccgagcgtcggacatggcgcacctccggggggctgctgtgtggagagggggaagggaaaggggaaggaggagcaaccggtgctgctgctgctgctggctgagagctcaaccgagcttgggaaggggtggaacaagagatgtttagcctacaggaaagtgtggctctgataccagatgttagaatttcaatggttactctcattgagaagaggatggcactcgagatggggcaattttctggttttcttcattcactaaacacaaaagccatatcctcccaaagaggattggatacatatttatagctgcttgtagcagccatgcagccatgctagtctaagagggtgctgtcagcatcccaacaaactgtcctagagcagagcatcccaacaaactgtcctagagcatctcaacaaactgctgtcctaactgtcctagagcatccaaactgaaagtagagatgctgtcctagaaagctgaaaaacaggaaaaaggcaccacaagaccaagaccaaccagccaagacttattcctacagtgcataccgcatacctctagtttcatactaagtttcttctatacttatttatagcatacataatgttcttaatttaatatttatttgactttcttagcaaggctttaatagatttatacttgtacttatctgagatttcctgtggcagggtagtgatgatttagtagttgttcatgatgctctcgagtttggacattgtcgtttgtcccttgcggtatggtgttctagaattgcatccatgcgtactagttgttacttggttgaagtttgtatctgtctgaaactgtcaaattgcatgatcaggttcctaaggaaggcattttcgagaatataaatactctggaggatttggcaaatatgcctgaatggacacaagagagaccattgcgtgttgttacaggatttggatatgtatggtcgtgaataaactcaaagttgttcaagtgctccccccctcttggacattaatttgctgttcatttacctagttattttattgtattgcagctaggagaaaagtttatgagagaaaatggtttcaatcatgtttcgtttttagctggagatggagctcttgaatcatatcccgctgtgagattgcacttctctaataacttacttaggtttctttgtaacttaaacttcctttcttttttgtacttctttgtttatctagttgatatattgatggcacaattctgttcctccataatagttatatttagatcctagtaaaaccaaatttgcatatttctgtcccaatatttcagcttacaagattggtatttgcatggtattgtctgtaccgctgtagtattgtttgttatttctattttattatgatgttagtatgttacaaagctgcatggaatttaagtataccaataccatactttactgtaatttgaatttgaattgtaatagatctgaactgaaatttgtctttacttctttattctatattggcatgtttgtcttgattcttgatatgtgaacttgtgtgttcttacataatacacaattagcctatcaaggttaacaaatgctaagaattcttttttcctcctgtgaagatgggtatggctgatgttatcgtggatcttgtgagtagtggaacaaccttacgtgagaataatttgaaggaaattgatggtggagtagttttggaaagccaggtaagcctaacctctccctcccttcctctcacgcgtgcacacatgcatgtgggagagcagatgcctggtattttaattgacatttgcttcatcaaaagataaattgtgctcatttacaagatatgtaatatcacgcaggccacgcttgtcgcatgtaggagatcgctacacaaacgtaatggtgtcttggagattacgcatgagatgcttgaaagattagaggctcacctcacagcaactggggagataatggtaaaccaattttgtagcttaaattgggtgattactcaattaattgcttacttattatactttacattgccatataaggtcacagcaaacatgagggggaacagtgcggaagaagtggcggaaagagttctcagccaaacatcgttatgtggattacaggtatcactaaaagtatccaaagtagtattttacctttttatatactgaccatgaatatgtgcacttatgtggcagatgctaaaatatctctttaaaaataatattattttccacattcataaattagcactctataatcttgaactggaaatataattgtattgtagctgctctaatatctagacctgattaatcttcatcataatctgggcaatttaaagcttttaggtcctttgaaataaaactagttttgcatttcaaacttatagcaaaagctttgctcatgattatctgactggaaccactgtagtttgaaatactgatgtggaaaatcactaaagcttatgagttgattcactcattttgatttaaacagggcccaaccataagtccagtctaccgctcacgtgatgggaaggttgctgtggaatattatgcgattaatgtagtagttccacagaagtctctttacaagtccattcaacagctgagatctgtaagatattttacctcaatacttttaaacggaaatgtgtgcctatctccccttattctcccttttccttttctgtttcatgtgggcaattgtctcttatctttagaaattttctaatgttgtagtaaaaggtatatttatgtgcttatatgagtaattatcaaaagatgtttctgtgctattctcactgctgtcagcgcaaaagataaatctgatatgggagctcataatagaacttattgtcagaacatatatggcccttgctatatattttttgaacgtgtatggcttagttccattgataaatccaattgttttaatgtgtactcattaacttgtaactgcagattggtggcagtggagtcttggtgacaaagctgacctacatatttgatgaggaaactcctagatggcgcaaactactttcggagctggggttgtgacttggtgtgaagtctgccatacttctctgtcaatgacccttttagcatcggtttacttatgctcgctgaagtatactacaaccataatcagaaatgagctctcgtttgaagtgtctgcggtgcttatttgagaggaaattttggtctgtgccatcgtacattgtgctcgtctagttatacctttgacaagcatatgggttgaaataccctttatgtacctgttgatataattgtgagaccttattgccttgttggataggtgtgcgtatgaattgtaccttttcttgcgtgacgctgaataaattgggctttctgcaataaagatggatggtgtaattccaccccgtagcaaatctgtccgcctcctatgatgcaaggctcctgctatctttatccttttggggttgacccggggttactatggaagagtttgacaccaaatttgctcttggtgctggatctgggatgataagggaattccaaattaccaattctaatttttcttgtcaagttcctttcctcctttctttttacttgtcttgaatattgccagtatttacagacacatctgtacatttgctttgcacggcaattttcatggtcaaattgatagagcagagacagaacacctaccatatacatgatgatattgctttcagaatttaagttccatgaaaaagtaatccaatatgagatggcgaccctttgcacgtgcaggtatagtgtagacatgacaaacagtttacataatactgcacacatattatctttgatagatttttgcatatttttacacaattggaagccttatactcactcagtcactgatggcgcacacacaataaaaactgtttaaaaactgaaccaaattcagagcagagctggtgcacattttctcccagctgcttatttactatcggcaagcacgagggtcacggctacaaactacacgatcaagtcatggtgcatcacgcctttagctgcagacgtgcagagcctcacacatttcgccgtgcgcttacccggacctcgagcggcactgccatctcgcacgacaggcggagcacctccgacaagtcgacggcgccggacgccggcgtccactcgaactcgtgcagcagcgttgccatccaggcggtcacggtcgtcatggccagtgacttgccggggcagctcctcctgccggacccgaacggcacgaggcggccgtcggcgccgagcacggacacgccgtgcgccttgccgccggggaggaaccgctccggctggaactcgagcggcgcgtcccacacgtcggcgtcgcggctcatcgcccactggttcaccatggcggtggtgccggccgggacgaggtggccgtcgacgtaggtgtcggatatggccctgtggcgccacgagaggagcgggcccggcgggtgcatccggagagcctccttgagcagcgcctgcaggtaaggcagcgacggcacggcggactcggcgaccgtgttgctccgcccgaccaccgcgtcgagctcacggtgcacgttggcttggacgtcggggtggaggacgacgcgagctagtgtccactccatcagcacggccatggcgtcagttcctcgaaagatcatctcctgataatttaatgtaaccacggttttattatttactcatttggttatgtaatacgtacgtcagggagtaactgctaccatccgtttgtatgattctttctacatataaaatctgaaagaaatagggaaaaagttggtggaattttgcatgggggtagctttttctaaaaaaaggttttattttgtttttcagatttgatcacaacaaaagttagttttgcatgatgtgtttacacctcttttatagaactgtttgatgccatattaatccaagcacgccaaaatatcaaagcacacggatcgtacccaaagcacggcggcgatgtcggcgtcggcgagcccctcgctctcctgcagcgagagcaatatgtcgacgaagtcacgtgcctctcctccggcgatcgccttgccacggtgctcctggatgatgcctcgcacgaagcggttcacccgtggcatgagctcggcgcaccgtgctccgacgccctgcgggtcaacggcggcgagccccgggaagtagtcgcaccagttctccttcccgaggaggtcgtacccttcgtgcaccatctcgagcagctcctccacctcctccccggactccggcgcgccgcgcgacacgtcgtactccttgccgaacacgaaccgcatgatgtagtagagcgacgcgcgccggaggacgccgcgcacctgcaccgcggcctccccgcccgcgccgcgcagcgcggcgaccacgccccccgcgacgcgcgcgcggtacggggcgaacgcgtccacctgcctcgggccgaacaggtggcccgcggcgacgcgccggagcgcgcgccagtacgggccgtgctccgcgaagccgatggagcggtggaacatgaggccgtacgcggcgtggttgagcggccggtcggcgaacgccgggttgtcgaggatctccttggccacgtccgggtgcgacgtgacgaccgcgcgtaccgggccgagcgacagcgccatgagcctcttggcacccggccggcgcgccgcctcggcggccagcgagcagtgcgccagcccggacatgaggccgaggcttccgacgaccgggagccctttcggccctgggatcgaacacctcgggctctgccccctcgccctccggtacttgccccatgcagggccacccgggtgagcccagtagagcagagcagtgcctgcccatgcaaggcatgcaaagatcgcgaggtagacgaagctcgtggccatggctgacagtgtggcagcgctctcattttgccctgagatgggcgggaggaaggtcagtggcagcacccaccagttctcagctgctgagctctccatttgcaatattgcactgtgctgctgctgtgaagttctgtgtgctctgagctgcagctcggggagctgtatttataggagttttggagcgaacattccgtcattcctcctccggtgtctcctggcaaagatgattcagttacaatcattggcaataaagaagactttgcagtgcaccgttgagtatagtccagtacagtggtcctggttcctctgtttttccattcaggtgatcactgaccaggtagttcagtttagagaaaataatcaaaccagcctagctagtgtatgtaaactgcatggaaatcgaggagaaattggtctcagtatctgctaagtgaaaggttcaacgagcggtatacggtacaactcctgtgttgtactactacttggtctccaacttttattctgtcgcaatcctaactggccacacgtacgttcttcagattagtctagcttcaattcgcgacacctgtactcctgctaaccatacatttttggcaagtcctaaattatgagaagcctggggtaccaacaaaccatagcccaataagtctgcaattgcagcttacgtgttgctgatatatagatctcactatattgtgggtgtagagtcgttgagagagcgttgcggctgcttgttttctcgacagagtttgttttcacatgctttgtttagggcgtcatgaggacattcacgcaagacgcaacgactgcgcatgcaggtgctaactaaaattttatattgtgcatcagttggtgtggaacacaataggagttagttaggcccctttcatgttacacatgcatgcttgcttggtttttatgctttatgcatgaactgtcctacactaggatcagtcagcggtagcgcatgtacctgtcagagtagttaattatacactaactatagtaccattattggatggaccaaaagattaattacactgacttgcttagcctcgtcattagcagtacgtatgtgggagtaatttcgtcaccccgcaaaatcttctatgataatgtccccatccctgcaggcagggatatgtacaagtacaactggccaaactttatgtatgcacatgtacgtatagtatcacctgtgcaatgtgtgagcagttgcgcaggaacttatcaggaacacgagagcaaaaacaaatgaaattaatgcattctctccttatgaaaatataacaacttctcgcttttaaaatttgtcctaaaatataacaatttcttcaccaacattctctttttaatcaatcacaattccccaccattcaattttcccacctaacttcacttctcctccaaccgcaacactcgatctcctatttaatcctaccaactttcttaatatctgtatctaactctaaaagtacttatattctaagacggatggagttcaaattaagactgttttaaatcattcaacacaatcggaaggtaattcagctataagtttaccaaaacacaattgggcgggcggaatctaaagtggattgagtacgtggttagttccgcaaatcgtctgcgcccattgtttcatcgaaccaaataacttcgtttcgtgccgtttaggtgtttagctgctgcagttctacatgcataaacagcggatccacttaaaaaaaaaaatccaaaacaccgaactgaacctagtacaattaggattgaaatactctgactaaaatgtgaaccctctaccgagcagaaccacatatcaatgactttgtcttaaggaagtactcccttcatttttttaataaataaagccgctgacttttaaacatatctttaactattcgtcttatttaaaaatttatattagatataaatcaataaaagtgataaaacaatttacaacaaaaataacttataattacgtaaaatttttaaataagatgaatgattaaatgtgtgatatatataaaaaatcaacacgtcatctattaaaaacatgtagtaagtcagtacaccacatgtcctactgtcttgcattggatccgccactatatactggaacgcacgcgcacggcgcacaaccacctgagagcaaggatactagtatagctcacttactatctataggctctctccaagagatctatgtcaacatattttcctacttggaagagattaaatgaagagagagataaaagctatctattaacctggagatagtttatagagaaaaacgaggcaatggattagagagctatagatacccatgtatatataccatttaagtggtttcctattaatctagtctattgctgagatgtacatgttttatagatagcaccttattttactattgtgggtgctcttagcttatcttaaagctaacatatatataatagattagatataagtttggctataattttcttctcctctctctatctctcatacatttaatgcatttgtcttgagttttcatacatttaatgcatttgtcttgagattgtgttaagttagtctttgcatgagtgtcaatccccttgatttttttttgttacctctcttctccacataagtttaagtttataggtttatagtagatttatatctcactattatacttctctggaagctgaaagagctgacccgcgaggccgcgactgttgcctaactccttgggaagtacgcggggacaaccgcgcgcctaacataacgcccctggtgccaacaccatcgcgcgcatggacagcgctcccgccgccacaaacacatctatcgggcggcttccgcgcgtgatccgccaccgaaatgcacccgccgcgacgctctcattctgccggagcgccggtaccacgcgcccggcggaatgaaaatgcggccgctactacgtgacaggacgccactttccagcgaactcctcgtcaacatccgcgcgcatccccatttttttatctgagcaaaacaagaaataattttttttatctaagcagggcggtgtgaatttttatttataaacaggacggcgtgatttggtagcgtcccgttagcctaattagagcaagtttaatagtataactcactactagctctaatttatatatagcaaatctaatagtcaatttatataatagttacttcctatactattaatatatggtcccttgtcatatatgcattgtatcttacagtctgtgttgcagctggctatagatctgtagcccgctgtttttctctctcatcttttatctcactaaaatatatttatagctggctaatagtctgctattgtacctgctcttagacggagtcttttacccctatgccattaagaaagttggaggttacgcgtgtgccaaaaaaagttttgagttacatgtattaccatgacacaaactttcgtttacccgtgtgccattccatccaccatctgttagagaatgagctctgacatgtgggacccacgtatgaaaatgactaaattgcccttgaagcattttcatctctactactcctctcctccagtgcgcctcgaaccctagccgctgctgccgttcgtcgccgtcgccggcacggtgccgccgcctcgcctcgtttatccgccgccggttgtcgccggcacgccgccgtcaccacctcgtctatccgctgccgcctctctagcagccgccgccgacggtcgttgccgtcgccagcacgccgcctcgcctcgtctatccggcagcgcgcctcgtctatccaccgccgcctctctagctgccgccgccgccagtcgtcgcagtcgcccgcacgctgctgccggtcgtcgccgtcgcccgcacgctgctgccggtcgtcgccgttgccgccgccttgcctcgccggcacgccgccgccaccgccgcaaaagtggctgaaatagaacaatggcaaaatagatctttcaaacctccgttagtctccattagtgctgattccatccaaagtggcgcacagttaaacgaaagtttgtgtcatggcatacaggtgactcaaattttttttatggcacacacgtaacctccaacttttttaatgacataggggtaaaagattctcttagacgcggtttatctggagcgtccagtcttccagcggacgcgacgttgttatagcgtccaaggtttctaaaaacacattcatctgctcacagtaccccaaatcagaaagggaaaattgaaaccatgccattataattttgcaaaatttaagatatgccatcctgacccacatgtcattgactcatgtgggtcctatatgtcattgagatatcgatggcatatctcaaactttgtaaaattataatggcatggttctaaattacccaattagaaacccaccattgaagcaccgatcatgagcctcggcggccgcggcggtggcggctaccagtggcgctagttcatcacgatcgagccttggagtgtgtgcccgtggccgttctgggtgcgcatccacgagactgagtctctcggcctcacgcgcggcgtccggccatctggttaattagtcatcctcttacacggccatgtactggttgtatgattacctcttttcgatttttgcattcaagagtaaatgagtaaatcccgtgtggtattcttttctttattcatacattgcactgatactgcctcaggcgatagctgtttcgtgcttatgttttagaggacaatgaccgaaatatgagcaacagccatcgtagcaagtgcttgtaagctaatttgtctgtccattctggcctgttttctcaacatagcaagatgattaaggagacaatagacaatagtgtgcacataatctggaaaaatgatttagttttactgtaggaccaatcaccatacaatcctaatttttgagttgcagaaaaaaatataccaattgtaaattgtttgacacgctctattaatttttttaaggtaactagtaagatgagggctactcaagatgggctaagtcggtcagctgcaagaagtgatggagtgcaagaagtgatggagagctaggcttattagatggagatcaaactttagttcagcaaactgaacaaagtgtttcagaacgtttcagtagcactgctgtggatgccccattgccagctcaaaatctcaaaagtttagaaaaatgtaagttatagcttgtttcgtatacttgtttccaaaaaataaaataaaatgattgactaatttttaccctatgtatgcaggctaatgatggtgtgtaagagtgtcaggtttcaccgtacgtgttggtagcattctataccatttatttatgtgagccgctattgaagaggcttggattttatcaagttgcttagatgggtggaatgggtatatatgtgcagtctataagtataagcgatgtatactcaatgcaaaggactactgtgcatattacaaaggagtacatctgcatctagcagcatcggtgatgatgatagttatttgatcgatgcactaaagtttttaatcataatctccatctagcgctgcaaccattgcaggatataaatagaataaatctaaaaatccgctacttgattagtactgatgtctaatcaattcgaaacaaccaaaagaaataccttagagcaaataatctgcgatccccacttgaattctgatcatctaatgtaagatttgggcattattagttctccagtaagagaaaattaggagagaagattagggatatgaactgtaggataatgaagaaagacagcaataggccaggtaccagaactcagcagcgtgcaattccgatccgtttcgttatctttgttgcgtgtgtgcagttgctcgggcaaggccgctattatgtttccgcgtccaggttcccgttcaaggacacggtaaacaccaggcgtccaagttaggcgctggcaaagggtagcatccccatgaaaacaacaggacgctacatgaccacaacgtcctgcttattaatctaatttaatttctatgatgctaaaacaaaaaaaatatatttctcatcctgctcagagtaaaaaaaatcgggcgcgcatccgtgtgtgcgggaaacgcgcgcacacgtaggttacgcagccaagcggcccgaatcgatcgcaggttgggtgaggtggccgtgatggtacgtactacgtactaccgcaactccatcacgatacgaaagtgggatcgtccaagagcatctctaccagcctctccaaatcaaactctccaaacactcatatagccaactctccatctgatttagagcatctccaacagtctccttattcaactctttaagttaaattttagcaattttaaagcaaaatcgtgctccaacagactagctaactggatggccaagccatccggctagccaaactactcctcccgccggccaaatttggccagccaaaatagcctagccaaatcgtgggtcccaccgctttcccccctctctctctcgtcagatgaacgccggcgccgcatcttcgccgcttcgcgccaccgcccatccacgctggcgccgcccgtccgccagctccgcccctccgcgccgtcgcctctcctcgccgcccctacgccgccgccgcccctccgcgccgctgcccctccgcgccgcccctccacaacgccgcccctccacggcgctgccctctgctttgccgacgccgccggggccgcccctcctccattgtcatcctttgccggcgccgcgccctccgtgcgacgatgagaaggaaggaaagagaaaaagaaaacgaaggaaggagaagagagagagatgggaagaagaggagtggagactgaaatgggggtgccgtgtagtttggaagagtattaatagagagttcggttggctaagccaaattagatagagagttggctatatgagtgttggagaggctgttggagatgctcttagctagtcaaactacatgcttactccaacaaactctctattaatactctccaaaataaaatcggacccacatgtcagcctctctccccccttcttctttctttttccttcttttcccctttccttccttcctatcgaggtgtcgaccacgctgttgccgacggcggccgacgcatggcgtgcggtggtgcgatgacgcgaggaggcgggaggcggtgcggggaggctgccggatctagaggccgccgctggctttgcggtgacgaggcgacggcggcagacgaggtgggaggcggtaagcgatggcgcccgacgacctcgacgacgacctcaacgatgacgacggcgcccccaacgacctcgacgacgaccccgacgacgacgacgacgccgcccctgacgacctcgacgacgccctcggttgtagatgacggtggcttcggcagtggggcggaggggcagtgccggcagagggagggcgccggcgcggcggaggctagaggggcgccgaatctaggggatgggtagagaagttgcgtgatgaggaggaagtcgtgatctggggagggggagagtgtacgggatggggggggtggggaaaacgcgtggggcctacaattggagaggcgattttggctggccaaagttggccagcgcgagaagaagtttggccagtcggatggcttggctagccagttagctaggctattggagtgtgtttttatccaaaattaccaaaatttaacttgaagagtgggataagaagtctgttggagatgctcttacgccagatttggctttacagcgaccccaattctctgcaagcggacttccgtttgtctgaatccttcttatggttttgtacttcagttcagtgcactgagcctagctaaccacggatccttaataagatgggtagtttggcctctgaatacagatcgtacgcttgcaatttgtgagcgtgatacacatggttcggcacatcgcaatgattcaatggatcatcatcattgcacgcatgcaatcagaaaaaaagatcaagtacgatatattactcctagttgttatcagtagttgttgcagggtatattgactggctatacatagtgctgcacgcagggaaataggggcatcttccctgcagatggtgagacactgtgcctaacctaatttgctgagctaagctccagtgcagactagctcccctgattctagctacttcagaatacatataaacaattctccgctctatacgttttaggggtcaaaattcggatagaattggattcgatcaaagatttaagcgagcaaagtaaatctgatcgaggcaagccagtgcacgcacgggcttcgcaaaagcgacatttatggttaaatttgattcctgctccttggccaatgcgatgatccattgctttgacttgtcaatatcaggaccagatgcgcaactaactgatgattttgtcctcagcaatgcaaggagatatccatttgtcagtggagaaccctaactgccaaaaagtcgaaagtgaaaagacgggcatgcgattctgatatacgcagctttttcgatgataaatcgaaagcaaatcctttcttagggccaatttgtctgtataaatatttttgaattgaatagaattgattcgatctggcactcattttatatttggcagaatcgaactttcctgtttctgcacacttgcggagcaattttctgttgctgctgcatgtatagcccacttcctctctcctgttacgtttgatctactctatgatccatacaataagttaatgaaccactttgtatacaatacaaatggaataatcttcctgaacttttttcacagttattatagctcaacgacccaatccaaattatccatcaatcaggccatgtattcttaggtcttcgtgttgttgcctacaaatccactctagtgaaaacaaaggacgccgacgttttataaaaacaaagaggtgctcttacacatagcaccacttactaatctttagctgttctcctcaaaagttgccttgctacaataatctttcaagctagttaatgatcacacagaatgtggcttttgattgatccaaatacaactagtaccaaagccttataatcagttatatgtgctcaataagatatagcaatgccaacactacacctacttgaaaagtgtttatttcactatgctcctgtcactggcccataggctcttagcatatattatacatagaagcatatgcaagatcagtagatcacactaaagtttgcatggttcagattgagcctcaagatatttcaggatccagtgtgaaagcctccttttctgttgccaatcatctccattgaatgcaatctgtagtaaattaaggtggtgtttggatccagggacttaactttaatccctgtctctagacactaatttagagtattaaatatagactatttacaaaaactaattacataaatgaaagctaattcgcgagacaaattttttaagcctaattaatccataattagagaatgtttactgtagcatcatataggctaatcatgtattaattaggctcaatagattcgtctcgcgaattagtctaagattatggatggattttattaatagtctacgtttaacatttataattagtatccaaacatctgatgtgataggtacttaaaagttttagtcccatctaaacagggtctaataaccgatcgaacagtatgattgtttgaactcatggatatgattatgaagcgctatggacacgccaagccacacgcccacacttgatttgattttgcttatcaccgtggcattgattcgaacaatgtatctggagagatcacatttttcaaaacaaaaaaaaaatctggggagttcagttcagacgtagcacacgcatatgcccctaaacggctttaggggctgtttggatggactaatttttaattcttatcacattggatgtttggacactaattattagaagtattaaatgtagattattgataaaacctaatccataaccctggactaattcgcgagacgaatctattgagcataattaattcacaattaacctatgtgatgctacagtaaacatgtgctaattatggattaatgaggcttaaaaaaattgtcacgtgaattagctcttatttatgtaattagttaaaataatgtccaaacatccgatgtgagattagaatttagtccctgaattcaagcatcacctgaattccttttcagctagcagaaggttatccattgtttttggttgcatcctttatggctaaacatacagaaaatttcagaggcaattacctctgttaatctacatctcacacgttgctaaaaaaaaatccgggctagaagaaccagttgtagtgttgtaccagtaataatttacatgtaactcaaatatattctagtgaaaaattcatccatgatcagtatgctgctaaaaaaaaatcattcatgcatatttgtgagttttcaactgtggcagtaaacttcttaagaacttccatactataatctataatatctcacataatctgcagcaaagaatttgttcctccagtgcatgggcaacgaccgaaaaaggcaaatcaccatgaaattcgcgggctaaaaagaaaaaggcaaaacaatctggctggaatggaggggaaatggagcgaattcttgctgttgctgccgtgtagttgtgcacttgtgcgtgggaatcatctcgcgcggccggggagaagaccgcatctgaatcctcacagcgacgtcgtggtcagtcagccgagccgttgtctggcggtggtagtggactcgtgcaaggtccaactgatcgatcatcgcgtgacttgactagacttcacttttgagagggagacttgcctggcaatggtagctattgacttagacttcatatttcgtcaactgagatgcaaaagcgctctgtagaattgaattgcagatggagcagttaagcaggtccatctctgtctctgatttggagccctgctttgtataagtttaagggtttattccacgtaaattgttcaatagatctaatagctagttttaatgttagatttgttgattctttggtcttctcattctctttggtgatcggtggctatcgcatttgtaaggtctttgatgtcgggttgcccattattcaattggcagcatcggctttatcgttcagatcaccggtgtgtttgatgacgttgtttgaggatttataagatggtgatcgatttcgtttgtatacttctatatttttgtttgtacaggagttgatcaaaactgtggctacgctcatcagctcgtatctcttatgttattctagcaagcagactatctttatttcgttttggtagttgttcttatttgactattacgtgtaaaaacactaataatctctatacaaatgtaatgtacattgtttcaatgagaaaaaaaaaagatccaaagtagtaccaaagcgcaatgctaagctggttaggtagcaggttacaagttagctataaacacgtggatgagatcagagaagagagaaaaggaaattgggctacagatttataaccaacttcggcacgaacttcaaaatgttatgtgtgtacgagatgtggcactatgtattaatgatgcagtatatatttatagataactattgcatgaatagattattaaattggctatagataatttgaagctaccagttgactatactattaaacttgctcttagtttgtgttcgttgcttgaagttcctaactcattccttctcgttttacgtgtgtacactccccaaactattaacgatgcgttttttcaaaaaaaaatctataggaaagttgtttgaaaaactcatattaatctttttttaaaaaaactattaattaattatgcattaattagtcgctccgttttacatgcaccgcaaattagttcccaaccaccaggaaaaaaaccccgccttatgattgaatctgagccatccagtttaagttctagacacatgcatttatatttgcggctaattattatttcagtggtagcttggtaggtgacatatgcatcgacagcgacacgcttgtatcaacttcatcaatatgaagatatatcgtacaacgagatgcttatgctaactttgttaatttcaagatatacatattgttaattttaagatatgctagataataaaacgtcggtctacgatgatttcgtcaatattaaaatatgctgaataataagacgtcggtctatgatgatttcgtcaatattaaaatatatttatatgctggcttaatttttagaggtgctaatagagataagggtgtgcgtgtgtacgtttataaatgcaagtatgcgtgtgtataataacatccgcgtctgtaccgtatttcgggggaaaaaagtagtgccaaagctgaaattagttgacctcagcatcaattaccttcagtctgtaccgaagttcagcttcattcgcacccccattcgcatcaggcagagaagatcataacgcgcggtactcataactcagggaatctgttgttattattctccacaaggaagatgggccgaaatcccagaggccggcctattctagaatcagtaatacgggcttcccgtcgaggcccactacatcaccgtcgaggcgaccatcaccgacacgccaacgcggcacaaaccaaatcgatcgaaaacgaagcagtccccagatctaatcccttctatcaataaagttaacctcgtgcttccacgccatcattaaattgtaaccgttggatgaatgtattagatcgcttcttagacgttggatgaaatgtaacatatagcccaacccattagtcaccgggtgagtctcttcgcctcctcagtaccaaatgtagcccacataaacacattggcccatctccacacacatctacatgtatccagcccgttaatccgtataaaagagctttatggctgaacaccccttcagttgacatgtgctatctaaattatctacaaattttgaatagggctgttaaaaagaatttctccaaaaaatctatttgtttcttcttgagattgtacctcctatctaacaaattgttgttaaccaagtcccgcagcaacgtgcggggcatcctctagttatccaatacgccctagtcctcaccgacgcttccaccacgcgtcgacgccccggcggcacttccgctccagatactcctcgcgcgccgcgccacgcccttcactcagcaagcccgccttgcgccggagctcgggtacgtgaccgactgctgggagataagagatcgcccgagcccgggattaaggcagaaaataggggagaggaggaaggagtctctgctactttggcggcgtttttttttctctattgctcatgaaagccggcgtgatctagggttttgggcattggactcggtgagtcgttccaggtgtggttgcaagatgttgtagtcagacccagagttttggccgtggcaccatgtcaaagagtgggggattgtgcgcaagcctgacgccaatcctcttggaaggagcaaggggacatggctgttccgctgatttcgtaccttcgtgagttttccggttcccctccatcatcgttatgtgcttttgttatcttaggtcctgttcagtttaatattattttcaaccattttttcgtaaagttaccaaaattttggctatgtttagtttgttgccaaattttaataaatacatatgaaatcttgctaaaatttttgacaaccttaccaaaatttggcaatgtcaaaacttggtaagattgaaaatgatagcaaagtaaacaagcccttatttcccttggatggatattgtcaaattactctaagctccatgcctcatgtactatctgtcttttaggacaaacaaatggttgcaattatatgcagtgtgcttgcgctaattgccaaacatcagttcaactatattataagttcatctatcacgattatttactcttatttttctgtactagtgatcaaccgcccttcatttcagaaataatgcatcaaagcaaatatgcggataagtagaactagtacaacttatgctgtaccacccatccatggctcacatgttacatcctcccacgttgcttatacaaacaatgaatgaataaactacagtctgttcgatctcacgcgcaaacctcaaataaaacgaccataccgacgggcgacggcccgacgccactacgccagctttagagttagaggcgcgcacatcgcttggatttgctctgcactgactcccatatataccacttcgccggctaggcgacccagccatcctctaactcgcaacacgtaagcctgcaccaagaacgactcttgcttgaccatgccgagagcgcgaggtctttcctgcctcatgtcgccgctcagcggcaagcgccacgccggtgacgcacgccgcagcagcgccgcgtgcatatgctgcatcggcccacaccacaagccgtcgtccgccgtcggcggtggcggcggctgcgtgccctgcctcgctccccacgccgaccacagcgtgagagcgcctctcaccagctgctgcggcagcggcggcggcggcggtgacaacaacctccgcggccgcagcagcaccaccaccagcgcgcgcacgccgcgcacacccaagacgccgtgcacgcccacggccaggcgactctgcggcgtccgctcccgcaccccgcgccgcgggcaggtcggctgcttccagtcgtcggcgcctgccgccgcaaggacgccgcggactcccacgacgcagcgcgcgtgctacgtccgtggcacgggcacggctcagggcaacgcgaagctgggcaggcggcgccgctggctccggtccacgggccagacgccacgccgcacggcgcgcgcgggtggcgacgtcggcaacggcggcgacgtcaaggtttacaacactggcctcgtggaggccgccgccgaggagtcggtaacaaaggaagaggagaccagctcgaacgacgagtacgcgctgctgtgcaggcagggcttcccacgcgaggacgtggccgcggtcaccatccaagcctacttccgaggccacctggtgcgcgcgtagaaaaacaaaaaaacttatatctaaccgagacctgtttgtttcggccattggtaagaggattttgcttgtgttttgcaggcgaggcgagcgttcaaggcgctgaagagcctggtgcggctgcaggcggtggcgcggggggcgtacgtgcggcggcaggcggaggtggcgatccactgcatgcaggcgatggtgcggctgcagatgcgcgtgcgcgccaggcagatgctcaccaagcccaaggaagggcagctcttgccgagctgatcatcaaagccgtacgtgtgcagtgcacgaccacgttaccgtgggaaataaacgtcgcctgaataattctggaaatctatcaagttaagatgtttggcatttgttgctgccgagaacatcgacatgggctgttggcctgttgctgtgatgaacttcccgtggatttgtaattctaaatatctgtaattcatatgttgtccttggttttttttacccgtggaaaatgcttaactgtttcgtttgggaataacccattttattttgttttcttttgattaacttgatcctgtgacccgaagaattatttgacctatatggaagtagtttagttgtacaatctttaagatttgttttcatttatcacccaggctatgtcgtgcccctcatgttgcacaagttaattagagcatcaacaacaagctacctatatgatttccaaaactaattttgagggattttaatccaaaaatcagctccaacagatcctctactctcctacccgagttttggagttcccttcccccggttgctcgctccgtttatatgcgggcgcgaaagtcgctcccaatcacgcaatcctgcctctctccttcgttcccgcgcgtgggagatagcgatctttctgcgcgtgaaagaaaaaaaatagaattttctcttggtagtttaacagaagggcccacttttaagttttagggattgaatttaggctatctattggacggaggtgttttttcacttcctattttcagtttaggaaaccaaaaacgaatttttaaaagaaaattatagataatctgttggtgatgctcttagtcaacttgtatcatgaaatcctctgtttcgtaaccggttttccttattgtcatgcattaattagtgcattaccacatgatctaaaaggaaaacggcttatggataaaacagtcaaactaaactcatggaaaggacacaatcaaaacttcactttcatatgaaaggggctggccaacattttattacaaggacgataggtaaactgcgactgttacaacggtagaaaaaccacgatgccgaacaaaacacgtagtgacgacgtactggaggccgggccagacaatctgcgacaaattaatcgacacggcgcgcaaatggcaaaggcgcaagtaaagtaacagtaggaagcatacgtgacaaccccttggaactcatgcagctcgatcgtcgatatgcccatgtttagttgttgtagttctcgacttgctcgttgcggtagtgctgctggccctggccctggccctgctggtgctggtagttgttgccggcggacggcgattgctgctgctgctgctgctgggcgttgccggcgtgcgcggcggacggcgggcgctgcaggctcttgacgtactcccacgactcgcggctggagatgttgttccaccacctgctcacgttcttgcgcgcctcgaacatgcggcgggagcgcgggtcggaggcgaggcggtcggcgttggggaggtgggacaggtcggcgatggtgaacttgtcgccggccaggtacgccgcctcctccagccgctgctcgtagatgtccagcagcttctccaggtccttcttgctcttctcgaacaccttccgcatctcctcctccttctgctgctgcttgttgccgttggcgccgctcgccgccgtcttcccgtccgtcgcgccggccaccacgcgcttgctcgacgcgttcgccacctggacctccctgccattgctgttgccgtagccgttgccgttcccgttcccgttgtcgttctgcttgggcatgttgggcggcaggaaggcgaggctgtagaccatctcggcgctgggcacgtcgaagctctgcgcctccgtctgcagccactgctcgatggacgcgcgctccagcgcgcccgtgccgatcaggtccgggtttccctgcctcgcgtacttgtgcgctatgtggcgaaggatccccctcgactctgcacgcatgtacgcattccacaccattatttacagtcgttcaagtgtcaatccgtactacaaatctcaatgctaattaccggacagggtgaggttgtcatcttcgaacgtgagcgcctcgccgagcggctgcacaattttccccagacgtgtcagtccgagaattgcacaacgacaatgtggtatgcagagcatgagtatacctgaagcttgagatattggggcatgcgctgcgtgccgcggtacgcgtcgacacggacgagctggaactcgacgtccttctcgaagaggcacatgagcacgcgggcaacctccgccgaggtgggtgacccgaaaaccttcacgctcgccggcgccatttcagttgcagtgggcggctagtgactctactgcaactgttggttgggatttgagaaggaagtattatgcagatggtggtgtgttcctgccgtttggaggatagcttgggtgtgcttatatacatgccaaagtggggagcataacacgctttgcttgccaagaggtaaatctaaagacaaaaatcaaaggggggaaaagagctaaagagcaaagcgctggatgccaaagggaaagacaaggctcatctctgctgccaaggttgtcttgtgcatcatatcatcatcacacccgcaagcaaccaggcgatgatgttcattagaaaacatcataatttgtgtgctttaacaagatctagtcgaaaatagcaaggtctgagaagatttcagggtgaaaaaaaggaaagggaaagattctgtttcgccttgatttgttcaagatctgcttaccaaaggaagtttcagattattctactactatatgtcaagtgcaaatatcttcagaaagaaagtatagtgcaaaataactcctagtaattctactactcatgtgctaaggtaattaagttgttgcaaatatcttgagagagtgaacatactacagcagacgaaatatatcagattaaaagagtctccagatcattttttaaagaaaagaagaatctccagaacaaaaacataacatgacaacgtgacaccctgatacatcaaacaaatctcgtttaataaagaagtaggagggaaaagagttcaacaaaacatggaacattcccctcaatctcaaataattatacactaagctgatatcatcaagctttaataaagggtatccttttcttctttttttttattctctgttcttctgaaaagaaatacagggattcatgaatttaactcttcaactcttgttactgtcatatgctaagggttgcaataccgcctcgcaacaagtttaatagtatagccaactactagctctaaattatctatagttaatctaatagctagttcatacaatagttacctgtaaacacaattaatatatgattccacctattatatacacatatatcttggagttcgtgctgcagctggctacaaatctatagcccgttggtgctctctcacatcctttatctcctcgaaatgtatttatagttgacttatagtctgctattgtacttgttctcagtttttttaacacctaatgtatagtgttaaactcaaataataaactcatctcaaaatataaaaacatgggagcattcgtagtattaggataagtctactaggttactgtattctacgataatggaggtagcaaaaaaagaatctttacatgtttttgaggttggtgacaatctcaataattgtgaggcgatttacaacaacacccttcccaacaggccaacacacgaatatttggccccactacatcgtctaagctttaatcattagcatatctgttgtcttaaattagagaccaccttatatacacatatacacatagacacgttaagaatgtgctgtcttttgcctttaaccgtattacacattaaaaaaggtattgaggcgctaggctcaaaacgtaaatatcagggttgtttggttgacaccctcaatttaccacaaaagttttgacaaaatatggcaaaccacatattatgtggtaattttgtgaaaaaaatatatgataagtgggcctaatttcttaaaaaagtgaagtgtaacatagttgtagcaacaatcaaatactaggctaacttatcaaaagtggataacacaaatgtggtaaagtgtggctatcaactaaacaatccctaatttatcgcatttaatttgaaattttagtgtaaacattttatttgacctaaaaagtaacacccgatttacagcgtagtttgttcatgttaaggagtactactcctttttaacttacgagccgatgcgagggtagagtttcagttcatcatattaacaatgcctttttctagttgacatgcagattaattaattcacatgaaaatgtccatgaactcgggactgagtccagttttcacgccataacgaaaaatcggttatcttttcacccgcctctgtctaactacacacaacaagacacggtgaaactatttggttgtcataagcactttatgaaagtttttacaatgtgaacggttcgcacttaaatgggttttaacattgttgaaacttacttttcaagtccgtcaaaaaccacccatccaaagtgtagttatttattttggaggatcttaatttaaaaacgagtaaaatgaatggaatatcatccaacttattaggtgtgtcggagtcatacagatcactctactttaaaaatacacatttgagtcactaatctaactatccatacaagcatatgtgcatatgttgtaggtatgtcacgtagggttgaaaaaaggcagtgtatcgtatgcacgcacacagcaaggtagatgcactcatgcacacacccatccggagcctttggatcaacatcctgcggccaagaccccgagtgtggtatttttgcaattagccgcccgcctcctccacttatttttacgaaagacccctccacaactctcttcttcactcacgcaatccattttgcaaaaaaaaaagaaaaaaaaagaagagaaaactcatcccattctggatctggca

SEQ ID NO: 4952 - DNA, 155172 bp, Oryza sativa
  unsure (1)..(155172): unsure at all n locations
tcttccagctcaacattattacattacacgtagtgcacagaatttacagataaaatagaccaccgtatctcttcagagattgccttgcactttctgccttcaaaaacatcgtcaacaagtgtaaaggagctttcaatagttaaaactcaaaaactctactaagatggtccttcattcacttgccatttgctaattataaccaaaactcagagggttggcattttatggtgtctttctggaagggttttaaggggaactagggctcagtgggttgtaaaggggtgtcatgatcagtgcactaaactttaattatgtgcccatctcaatgaaaagctagtgcatctttgggtaaaaattcctgtgatcattcatatcaagtgcccccacaggaacgtgtcatgtgaagttgctgcttgcttgaaggataagccctactgaattaggtggtggcttggcaacagtggtccaaaatgctagatgcatggcagagaagagaccatctttgtccatgaattgtttttacatggatcatagtacgagattgagaagcctaatctatttttatactctctcttttttaataggtaacatcatttgcatagctgccgctgatgggattttgagatataaaacaagtcttctattctcttttgagttttgtaatgcattgcctggggtctgcttgtactacacttcaggatcagagaagatatatatgcatatagaatcagttttattttgttagtgaattataaccagtggcttttaaaatggggttaataatctgccagcacaaaatccaattcatgccgaaaaagtgagcatgcctcgacccatgaaactatatgatgcatttagaactgaactatcccacatgatttatcactcaattcgtcattaccattttagtagtcatatactctggccaaaagaaaccaaaagttttttttggggggtaagaatttgcttgaagtctctatatctagtcatgttttgtgcatttctacaattcaacatgagctcatctaagctacctggtcatcgtttaaagagaaaaaaaatataaatattaataaccaatgcagtgcacaccggggatgcataactaaactaacaggcatcatggatacaaaatgtgcagcaataatgacctagtagcaaatgaattgtgtatagtgtgtgatactagtggcaaatgcactgcatgctaaaggcattatcacaatttggaagcaagggctgtcttgaggatacaaatttaactgaatgaatttaaatacatggtcgaagaactaacaaatgctatatatttagatgtatccagtgagtacaacaatatgactgtctgctcacctttccaaggtcggtgaacttgaaaaaaatattgaggtactacaatactttcttatttgaccaaacattctgttacaaggctacaagtttatggggcagtcactaaaggagcactcttctttcgcattaagaaaaatgcagttttatgcattataaaaaatacaaaaagcagcacacagggggcagcaaatcaccttttctgcaacagactgctcaaatgattgtagacaccttctctcatggcatccctattaccagtatttaaggtgtaaataactgctccaggatgattcctcaacctcgcaactgcattttatgtggagaatatctagtcagcaatactttatttatttatttttgcaagtgtgtgggttcaggaaatcagaataatgactcatgtgtacatctgaagaaagctgtggcacaaaaatgttgttcttgtaagaatattggagttatccttcttttgatgtttgacatagcatagctggatataaggtagagtctaaaaaaaatgtgcaacttcataatacacctataattgaattggtattttagagcaaaccaccatgtaaatggtacttcgtaggagataatgtacagttagtaaaatcattaattagaagcttctgtcaagatgttaattattaagtgatggtacctccgggaatgtctcggcccaatcttggtacaggaattgtggctagcactggaatgttcgattcaataactctcattacagcagggaagaatgccgaactaaacagctccattttacccacttcatcaataatgaaaagatcagtgtcgtccttgacctgatgtgtaaaaagagttattaactccagatcacatgataaataatttttaaaccagctattctgatcattgtacaattaatattacatgtatcgcatgaatgtgctaaaacaatgtgcatcccttactttattttatacatctttagtcagaatggcttacctgcagctccggcaatgctagagactccagagaagctatatctactttgtacctcccaacagtaggccatctaacagactcgcggctgcaggaaaaaaaaacatagatgacatggacaggaattcagtaagcacacataaaaatcggattgacagtgaattcaaatataagtatttaacaaaggtcataagtcaaaccttacaaatttagttctgagataataagtagagcagaatgttagagaggacaataaggaaccgcggaatttcatgtacttataaatcagtattttgcatcggaactttcagaaggagtaatatcaaattttcctggtgatggccagtgacattaactttttttgcaactacggtggcgatgagaagcgtgtaactttaatccatttttctagttggatcatttccttgctatgtatacaatttgtcagtcaaacggatccaagttcagcaaacaagggaaaatgtcagatggacatgaggctgcacatgatccgagacatgaataagtagcttaataagctggataccagcagtggggcgatattctaccatcattgtcattgcataagtgtgcaggtaaaaaaaatacaacagatataggtaactagattataccgagtttatccataagtaagaaaaggcggcactatttaacatggacatggatgttagctacctaggattgcagctaaagtgcctgaaacttgatcatatgcaggaatacagtactccagattttgaaaacgaaaatgtccaaactaccacatcacaagtaggtggtggtggcacaggaaattgcgagcattctatcacatattcttttagcttgtcacaacagccagatgcacttgatttcagtgtatgaaaatctctcgcttcatatatgtcagaaagggaatcataatccaagcatggtagcaagatgaacccgacctggaaaccttggaggaggcgagcggcccggttcgcccatcgagcgtgacgacctcgaacccgaccctttccccactctccctcacctcgcctacacaacacgaaaacaggtgagatttctgatcgcgaaacagcgcgagcgagcgcgcgggggagcttctggaaagggcaactcagcgcagtacgggtgtagaagccgcgaatgttgagatgcgggtgggattcgcggagggtttcgaacacacgcgtaaccagcgtcgtcttccccacgccctgcgagagcggcggcggcggcggcggccgtgaggcggttgacgaaggaaggagaaagggtttagcggttggggtttgcgggatggggattccttaccggcgggccggtgacgaggaggcacctcgacggcgcggcggccatctggtcggtcgtggcagccggccgcggcgaggggcgggtcaccggcggcggccgcagcgccggcgtcggaggcaggacgggaggctggtggcgctgctgcgttgagattcgtgtctgtctgtttcggtgtttgtctctctgccacatgggcggatgggccacatggtacacggagagcgcgtaaccggcccagcgaaggcgtaaacatgaaatgggccggatgattgcttcctgggccaaagtgtggtgtacgtgatgttgggcccagccgtctgtacaggacggccaggtggaagagatatagtaatgctttgggactactatacatttgtcgacagatttttcccaaaaaatttgacagatgtaattatagtacaatcatagtgtaattacattgtaacttatatgtaattacactgtaacttgcatgtaactacagtgtaacttatatgtaagtttcacataattttgaatcgttagatctattactagatttgttttggtgaggaaaacacacatatgtgaaagaatttgttcccacgacctccattttaccgaaataacatgttacggagagatttttgaaagttacatacaagttacactatagttacagtgtaattacatgcaagttacagtgtaattacacttcaattgatgtactgtaattacatctgtcaaatttttgggaaaaaatttgtcgacaaatatataacaaaatcgaatgcttttggatgaaattcaaatgctgcatttattgcctgcttatctggcctgcctcattttgaattggaataacttaattttagaattaattgaggattttcttgctttttatattcagcttttgtaatttttggctgctacgagtaaagggcaaagtaatttgcactctgggtcacatattattaccgaaatttcacttttatcatataagaaggtcctttttcacttgaactaggtatgcttaatatatgttaggatgtggattctcgttgtatggccatgtcaacgacaaactattacgtccaaagaatttgtatataggagttgcactttgaactgggtggccgcatgtcaatgactaaccacctcttatgtctacgtgggtcgctcggtttaaaaagtgcaataattgccaacagtatctagtttaatgagaaaaaacacttcaaaaggtagtttaaaatggaactcgacaaaaatgtagtgtctagtgtgtaatttattggtaaaagcataaaaatcctatcctaaaattagtttttacgtactttggctatgccataaattgtactcatgaaaatagcttccaatttcccagacaaacgtgcattgtttccatttagtgggtcacgtgtcttataacagacattctggtttagcaaacggtaaatctaattagagaggcctctctaattagttttaaccagagacatccgcgtgctagtactttaggagttttggttgctatcaatccattgagcaagtaggggaaatattcctatcatctatgattcaaataaaattttctcttaaattactcatccgatttacaatccgattacaccgttgtgttcgtaataattaaatctttataacaagatctcacatgattatattttgatgaaaaatcacaaattacttttatgatatgtctaaattacttttagatttcactaagttacttcttagacatataaaagtaaaatcagtaaagcctaaaagtaatttacatatattatagaagtaacttataaaaaaaagtaactttaattaatgccttttttcattgaacaaaatatcacacatatatatgtgtgtgtgagagagagagagttacttttagatttgattaaaatacttcctatacattcataatgctatgagatgattacttttatttttttagttaattccataatttgtgctgattaatttaatttctagatagagtcatgtttttatctctacaacggatttacttcaaataacatgctaaagttacattcgttttgttctaagtcacttctataatatatgtaaattacttttaagttttactgaatttacttttatatatataagaagtaacttagtgaaatctaaaagtaatttagacatatcataaaagtattttgtgatttttcatcaaaacataataatgtgagatcttgttgtaaagatttaattgttacgaacacaacagtgtaatcggatcgtagatcggatggatagtttaagagaaaattgtatttgaagtataggtggatgatgcctcttatagatagagtggtagctgatttagacaagccagctatcactagctgtgtagttacgccctttagcaaactgttttgtgtgtatgtgtgaattggtatggcagagttttagcatcaactatttgcactatcatgcagtatggcgatttttgaatgtcatttgcctcgatacaacatgctgagacacatagaagtataggtatagcattaatatttatccgtatctccatagtatactactatagtatcttctccatttaacaacggtgatctttttcagagagcacaacagaacacgcacatgttttttttagccctggacacgcacatgtagacatgtatttagacatgcagtaacagcatcatgtctcaaaatttcgtgctcgaggatctgccttctcacactcattttgtctgattaagcactcttaattaaaaaacggtctgcctaaaacaccagacggaaaaatgtaacaaaaattgcgggtaatagcaatataacagttgcaaatgtcaaaattcttttgttccactgacatgtgggcccacgaccttcagtacgcgacccctggagcacccaccaatcagtttcgcccacgacacgcggtggaccggtcccacaccttccccccacccccaccaaacgcgccccgaggccggccgatccgaaaccgtctacacggagcgctcgagccgaaccccgccttccatgtgggccccacgtatccccctaccccacatgtcattgggtagggcgatcccccgcccgagccggacgaccccgccgcaaccgaaaggcccccccccctctcccaaagggaaaaaaaataccaaacgcacgcaaagccacacgcaccccgacccgttcccagccaaggccaccccccgcccgcaccaccaccaccaccacctcctcctcccgccgccgccgccgcggccttcgatggcgaagacccggaaggccgcggccgctccgccacctccgcccccgcccccacccgcggagaccccagcgaggaggaaggggaagaagaaggggcggccgtccctcctcgacctgcagcggcgcagcctccgcctccaggcccaaaaccctagcccggccccgtccccctcgcggcgggacgccaatccgtccgacgaggacgacgacggggtcgggagtggggggcgccgacggcagaagcggctcaagagcgtcctctccagcagcggcggcggcgaggtcgggcgcgctccccccctcttacctgtcgcgccaatttttcgaaatttgcccgaggtttttgggggcctccccgaggagaggagaggggggtttttgccgtgggacacgcgatgatgcggttgccgtagtggttggatctgcgattttggaatttttttgaggggggtgggtttcgtggtacggctcgctctcgtggtggggaatctggcgggagggggagatcagtgcgactgtgggagtggcacttggggatttttagcttcttggagagcgttgctttttttgggcgggtttggatttttatttggttttcctatggagtccgggtctagggatcttgaccctgtcagcgctttaatcctttccatcgaagggaacagtacgcggatctgacaagttttgacggatttgacctttttcctcccggattattgtgttgcaagcgctgtccggggttgaaaaagcgccaaaagtcttcgttttttgtgtgccaagtctggagttttgcagcacttcgccctggcagtcgcaaaaggctgacgttcctccgtttccatggcgaattcgactctgacggctcctgttcgatgctgcaggatgatgaggcgcccgcggcccccgtggtggtgaaggtgnaggtgnagnagaagaagaagaaggtctcgtcgaaagcgaccggaaaggtgaggcttggagggaagccaagcattagtgttgaagtggttaaagaatttgaaattttctcgggttaactcctccttgcgcttgtgggagcaggggacgctgcgtcggatggcgggcccactacggggactcccctcccggacaaaaagttgcttctcttcatcctcgacaggctccagaagtgagtggcccggccccatcctgatgtagttctcttctccccccaataagagcttgcctctgattgcttcagctatgtatgtgtgtatctcttctttgtactgctcccaggaaggacacctatggagttttctcggagcccgtcgaccatgaggaggtgagcaattcagttcttggtctgctgtgtatttgtgttctgaagtttgcagtgatgatgttgacaactgttttgtgttttgtgtatctgttgttgtgcgtgcttgcatgcagcttccagattaccatgagattatcgagcatcctatggacttctcgacgatccgcgagaagctgttgaatgactcgtataccaccctagagcagtttgaggtatgatgcctgtagtttgagttgctgtctccttgcgtgttgtctgttttattggcttttcattcactgacactacagatgtttgcttctgtctactgttctgtacttcacgttttttctattgctttatatctgctaaggctagttctgttattttcctgtaaaatcctaggtctcgtgtctagcttcacatgtcttctctctcttttgtttgtaccacaagtgtctatgcagttttaagtcaaactagtttatcttcataattcactttcaatgaatttgttgatactggttgttggtattgtttatgaagccactgaagtgttttctgcattttggtaacaatgtcaaggaattcctgatttgagaaagtacatttggtatatccttgttcttacacagggtcaaattattgttttttttatgagttaatgccttcattaatggaaagtgctctctggattggcatgtagaggtcgcatgtgctactttttaatgatcatcgtggactgtagctaagagaaagcccagtaaacttcataatgattcctcctattttagctccaaagttgtatccattcaataactaccagttactttatgctcactatttatagtctttccctgttgatttgcccaacttagtggtggaagcttcgcattcttctcggcaggctagcacatggttcatttgtgtgctaactcaggctaagagcaatcccaaatttgatggttctgtatactcaaattggctgcttaaactaaaaatatcaatatctcaaaacactggtaaaccatagtccatattgaaactgtacttcttggatagattataactctatctatcccttcagaagtgagattcaagttctgcactgtatggtgtttgagtccaattttcaagttctgcatcaactcaaatgatctggggatgtttgtaaatttgtttctttctagtaacggatcttcatgtgaagtggacttcaaatagccttcatgttttctattctggcacaaatgttctccagccactattatattttcttcataatgtctatattttgttttcagccctatttttctcttaaaagttctgcgcttttctcttgataagcgtttcggaggagagagtttgtcatttcaggccattaaaaaaccttttagcgacacagatatggttgctttattattttgtttttggggtttatccgtgtttatataccactgagttctatcaaaggtccataatgtgctgctaacgccaacttattgatctgtcattgtaacgactcggtgggatattttgttcttccattttgtacaatgtattgagttttgaaaaattgctgtgtagctttgcacagcaacattgttaagagttttccacttgtcctgcatatgtttgctgtatggatttttttcttctaaaattagtaaatcatgaagcaaatcataatggagtaagagtaacactttgcttaagtagtttggatcttcgcttaaaatctctttttttttttggctttactagtatgaaccttctcttaatatctaatgtttttttaatgattgtgcagaatgatgtgtttctacttacatcaaatgccatgtcctacaattcagacgacacagtctactatcggcaggtatctattttactaatgctgtaatgcatgtgccttttgcaacaggactatgtgatccattttgtagatataccgccgtactgtttgcacgcattcaatgcttggtttatataggttattcataacccttgcaaatttcttatgcttggtgcagtttcttttcgtgagacttctataaatttgtgcacctgttacacaaatggcacattcttctttttgttcctgttgtgcttttgtagttggtgtttttatttcgtgtgaatatcattgttacactaaggccaacacaagtttttttttaatcaacttcctttggtatttttattttgatactcctttggactcttagaacattggaagtccattggatttgtgttatactgataatttctacaaagccaagacacctaggtcgctatcttccacagtatgtttccccagctggtagggatgaaaacggagcggatagtttccgtccgctcaggacaaaaacggatacggatacctttcggatcggataattctcggatagttcggatacggatacgaatacggatattttctcccggatacgaatacgaatatggtaccagggtttccgtcggatacggataataattcggatatccggtgaacggtgctattcggatatccgcaggacccatgagacataccccatttctttctaactctataaccttcaatatacctttatagattttaatagtagtttatctcttaacactagtcactattaatattatttaaattttaaaaaatatttataaattatacctcattttatataaaatgagctaattatatatgttgatatttgtttccattagaagttgagttggttttcgtgttccgagaaaaaattgtttccgtattcgtgtccgatcatatttgattcttattcgtattcgagataatccgtatttgtttccgtattcgagctatccgtattcgttttcgtatccggtaaaaaatatgaaaacgaatatggtatgagcattatccgtccgtatccgctccgttttcatccctaccagctggaattatactgcagcacaaaagaaatcgatacacttgcataaatacgaggcattgtatgtaggataaattccttctcttatctggaaactgttgaaatccattgacgtgatcctttctgttatcttttgtcttaagactattttattttgcaagttagcctatctttgtggtctttttggcttccaatttcctgagatgttcatttatctacttaggcacgatctattgaagctctggccaaaaaggatttcgagaacctgaggcaagctagtgagcctgaagaagaacaacaacccaagactgtacccagaagaggcagaccaccaaaatatgcaaagaaaattgagaagactgaaaatgatgtttcaccagatttatccaatgcaaaaacaaaatctgcagaccatgctgaaacaattagaaaaaggttgactggggacagaactcgaaatgcaaatatcacaacaagagactcaccctttcttcaacataatacacctggttcttttgctggtaaaagaacagatagatttggtgattattcaggtttgtttttattgctaattgctcgtatctctacagtgctgtacttatggagcttgagcatggcttgatatcgtggtatctttcaggccttcgaagtacggaaagaagaccaccccgactatttcagatgatgagcgtcgtagtacatacgatcagcaatacttccatagtagtcctctgttttctgcccttggtggtgagaggaaagtacttgtgccggtaagcacgttcagaaaattttgtcctgaataatttatgaattaaaagatttataaaccttgccaacttacctactgaacgtttgcaactactacttggtgcattgctatctcaatgctgagttattttaattatggaaacaggtgggacttcaacagcaacatgcatatgctaggagcttggcgcggtttgctgcaaaatttggtcccgtaggctgggacatagcagcaaagagaatcagacgactactgccttctggaacaaattttggcccaggatgggttgtggatggtgagccacctgagaactctcagtggcctcgagttcccatgctctctgatccatccatccagtctactggtgttccagctagcaacgtaatatccaagaatgatgaatccaatcagaagtctggactgacttcgaacgaggattctggtgaagagcatctagctagaaccgagccagtggcttctacatctgcatgcgttaacacaaactctgtatctgccaccaagctagctaccaagtgtgaaaacggggctaatgtgtcatgtgatggtgtgggtagtactggacagacacctcccttgcagcagcacagccatagtcgagagatccactcaaatatgaatggcttcactgccttgccaaacacaattagtcaatacgcagggcaaggattcttgggacagatgcagttgacacatgctcaagttcttgggatgttttccggagtcaatggcagaacaaatggctttatccatgggcacccactggtggctaatagcattaaagcaccacaaaatggggatgttggaaaggtagccactaatccatcaccagatgcaggtcatgattcagaagctgcattatcacaaaccatgactagttctgctccaagtttaagtgctggtgttcaaccatcaggttccatgccaagcgaaaagttagcaaatccaaaaaagcacccggacttggcattgcagctctgaagacaattagccattgacatagttcagcttagcgccgtccttgattggaaacatgattcagaatcccagcttctcgagtccttattctccgcttctgctatgctgatggatattgtagcagcacactgagtggttctgagggagaattaacaatggatttctcgtcgaagaataattcattgtgaggcgaggtcatgggaaggagtaactagagccgatgaatcgtttgactcccagcaaatttgttgtaaaagggtaggtagtctgtatagattctaatcttatttccgatgataatgtttcggatgggcagcatctggcatccaatgtgtaacattatactagtggaggtatacaagcagggagggaggcaagtgcataggtgtgcctttttcctgcgaggattgatccgattccaggttgtatgagactggcggatggacgactgctgcaactccaccccagttgagctgagtagcaagtagcctgagtcaccaaaatcttgctctgagcccctgacatgattctgtgttgacattttcactgacatgattatgtagtgttttaacatttgttgatgttgctcttgactgtacttcttgctctggaatctgggatacccggatacatatgctgttgatatttgatacttcccacggtgccagcatcagggttcatgcttttgacgaaaaccgtaacgttttgaagttttgtcgtggagctaaagtagatttcgagtgaaacttcgaatggtttttgagaattaaaatctgaaacagtaaatctggctgatattttgttgaaatttgttgaaatccgtcgtactatcatgtggtaggataccccggtgctcaatccgaaaggtgaactctggacaccattctgttgtccttggttttcacagcactaaggcaatgattactcacagtttcaatcacgaagacagcacgatcggtccagttggaaggtgaaaaaaactgggccgtgccattgtcctgcggatctgcatggacattgcatgattctttgcaaggtggcctccatgatctcccgctctgaaatccgatatttgcatccgtccagatcgcagatgacgaagacgatcgagtcgtaccgatgctgctgctgctgctgctgcacccaaatcgcgtagattttactaccacagcaacgcggaggccgtatcaacacgtgaaaacggcaacgaggaggagagagcccgtgaggttgcgcgccatggatggcaatggcgtcgcataccatcatcatcatcatcatgcttggcgccgctggcccattgatggtgagcatcgagatccggttgcctgcccccggccattccattacttcctcacagtgaaactgtttcggcccgtactgtcctccggtaccagtgtcgtccactgcctctactgttccacctccactttctccccccagcaaaaattgcagctaagcttgctgctgtttccatgccaagtgtatatattcagttacaaacaaaaaaaagtacagtgtctatataaacggaatccgttcctttgacctactgacctctgtgttaacactgggtgactgatatatgggttctctaataagcgagcctatatgttagtcacccacgtcaggagcggtacgttagcggagtcttatttttatgtacaccggctaacttgactattttccttcgtcttttgagttgcaagaaatttcctttttcttatctatccgaaagtatctcttttaatgtgctcaaaagataaaagtaagaaaataattccgcggagtatagtgcgacgcggagtgagaaaggtctctctcttcggtttattcactgatatgaaatgaaatttagcacttatttttttattgattcctggggctagacgaaaacccaattaaataattgattcctattgaaataatattagggttccttcgaaatgtacaattgcgaaaagacatgaataggaaaaaacaactgaatagaatctcctagtcattgtattcttataggattttaaaacataggaaactttcaaaattactgattgattggcacacagaaaaaacatagaaatagggtttcatagtcattgggtttttataggattttgaaacacgagaaactttcaaaattatcgtttgatttgcatacaagaaaaacataaaaatttaagacattgtagtaagaaaacttaaggtgagccctcatgtttctcttcggaactgtacattattactctaaaatgatccattccataagaattttaaagaaataagtattgccccttgaaaggaacaaagggttgtttcctactggaaacaaatcctttagaatttctatgttttttctttgtttcaaagcggccttacgggtaacatgaattgaatccgtgataaaatcatgcatccacgaccatatctcacgcacagtgatagtggtttcccactcgacatcttgattttgttggaatcaatctagcaatttttgtctatcattcatctgcttgattgctatccagtagggattgattgggacgaaaagattggcttgtgatctacgcaaaaaactctgatagactgatcatgccgaatcgtcaggatttgagtggtttgcaaggaatggaagcatatctatatgtactatcatgttaagacacagcttggctgcttatgatcaggcgtcctaggaacctaagtacaacatcagcaacacggaatactaatgctaccttacgacctgatgcaactgcaagtggccattgcaaacgctataatttcgccgtgaattcatcgagcgtgcgcgcatgtgaggcgaggcatgcgacttcacatgcatggagatggagactaaagctacaatcggttcacatccacttgccaattgctaattatgcctaacctgtcattctgtcaagttttaatcccacatttcgtcagccatttggtccacaattctgcaatggatgcgagagttcagcgtatgagttctccggtttatgatctcgcatctgtcttatcccagtaattcatattatgtgtgtgctttgaatgacagtttcagtgcaactaattgcactataaagtataaacaatatactctgttttttataataatgaataagaatccgatatctatatttataagtgaatatgaaaataaaatttacttataaatttttttgaaaaaaaatgtatggagtacaatcaagtaatcaactaccacttgtcgtcgcacttacaacataatgttaagaatttattggtcactctccatccctttggctagctatagttcagttgtgacaatactagtcggagtattaggcaccaaaactaaccaggcacttgacgccactgattaattaattactcctaactgactgataaatcaatctctttattgacgactgctcctgcagaacagcactccagctctactaactagctagctagatccgcgtcacctggtgctaatgataataggagtactagtaatcagtaatcacgagcagtgtgtagcactgttctgcattattgtccgtattctattcagccatttgtgcgtgttacacgatgacgagctactagcgccatagcttaattagcctttcagcgccggtcatgggagagccaaatactcgttgctttctcggcacaaatggacaaatcacaaatggacaaatagtgtgatgcattgcctgcttgattaattggaaggcctgtatcgcttaattctctttgcccatgttaattcgagttatcaattttttttaaaaaaactgtttagatggttttttaaagaaacaaggggacttcctctggaatgaccaaaacagcttcccagccaccatttgtgcatgaacactccccttgatttgtccatccaccctcaacattcaacaaccacgatcacacgacatgtgtgaccgtacctcctcgcagagaagatcatcaaagagagatgaattgtacagccaaaatggctaaatgggcccttgatgagttcatgaacatgttgagaagttcatggtccaatttaacaggtaataatacggcagtttgtctgccccgttcctgactgttggatcatgcatatttccggtttcataattcagactggccgggccagggctttcatgcaccttgtgtacgtattttggactactgaacagcacaaattcgcacctacctcttcaaaaaaatcaactttagacgaatctagacaagtattttatactcagaatttttttagtggagagagtatacatttcatctcatcttatcacatcattagaatcgattacataagatttcagtttgctgaaaaccaagcgaaaatccataaaaatagataactttcgatcaactccataagaaaaccaactccgctcatttttcataaaaatgatccccggttttcgctgtgtttcgatcggtattggaaacccttcgctaggaccatgacaaaaccaaaattacattaggttattagggccattattggacattgttcgcactgttgcaaagttggcaactttccctgaagtcgcaggcatgcaccgtccatcatgtcatgctgcatgcccgggccaatgcattgcatgacgcagctgcaatccattccgattcctgtttcgtctgcaaaagtttggacttgctcgatggcgatgatgataccctactccttgctctctacgacccaaatgatgagtccatgttgcagttgcatactccctccgtcaaaaaaaaaaagaagataaacctgggtttccatgcccaatgtttgaccgtctgtcttatttgaaaaaattataaaaaaattaaaaaaacaagtcatgcataaagtattaatcatgttttatcatctaacaccaataaaaatacgaattataaaaaaatttcatataagacggacagtcaaagttggacacgcaaatccagagtttgccttttttttagacggagagagtacatgattatatatcttggtatacatttatccatccagagatcataggtgaccacactgacttgttaattactgtcagattaactcctaattagtttaccggaggcacaggtaattcaagggctcagctttaatttgcagtactccttttttttttgactaaaattttttttattacttgaacaggatctgttcaatttgcagtactcctcatctgcagttagctagttcagaccaagagttggtcccttgatacaattttacatgtgagatcacattcacatgtgaccctctcctccaccaaatgcaattcgtggctgaaaaccagaaaccttctgaattttttttaagcctgaaacctcctcaactaattttctctgaagaaaagaagaggtttctgaattctgaaacatgttccactccacacaatagtctctggtagctgtgtaggggacatgtctgatgtctcacctccatatttttcaggtagatattgtattatagtctctattatatgccaataattgttttcagatatttttaatattgaggaaaaatcaggtctgctccatatgatttctttgtggtacttgttcgatttagatcagagcattactagttaattaatgccacgtaccaagtcccatgtatgcgggctgtggaccccaagcaaatatgattgtagattcaacagagtttggtagcaattttgttttgcgtccatcaagagctgcactgaaaatagcttgggaaagcatttcagggaacacttctccctgacatggcccagcttggcaggccacatttgaccttaaggcaatggctgatatggaacttgaacaagaggatagaacaagatggcaccgacagatcctttacccactgtcaaaagtgaaaaggttagctatggcctcttgtcatttttttaaaaggaaaaaatattttttcagtatttaattgtatatctagatgctcttgtcttgactatgcatagaagttgtgtccagctcttgttgcatgtacatacttcaccagaagtttgttctgtttggaagatgcatttgtctctcttggagaggacataacagtttcacaatttactatgcaatcgtagtatgcatcaaccctgaacagtagtgcagtactataatatgcaaaagttcatgttgtttattataatatgccatattgcattgcacaagccacaaaagaggggataataccaaggatcaagcaggttttatcaacaccattctaatcccacactcccttgtagtacttgtgatcaccacccccaattcagaaatcacaggctcgtttaatgtagattattggatatagattattgccacggatccatcagttgcattatcttcccctcaaggctcaagctgatgcatagaaaactaaacacaagcacgttgtttcatagtgtttctgaaacccaaggcgcacacacatgcatgcaccagcatcttccatgattactgacacgctaaccaagcactgttcccacatctgaagccctgcacttcttcataccacatttttacctccacaccgacgcatttggagaagggatatgagctgagtagggcaagttctcagctaaccaatgcaaatgcatttaagattcagcgtaacttcgcctgcctgaatcctggtgttcattgatgcttcattcagagagaggctgaattttatttacgatctccactgttcgcattgcacaatttgccctgtgaaactatagtgcagcgacgtatagtagtgcatgctacttgaacgcccttgtctcctgcctctgaatggaattcgatcctggtggttgtaccatgtatgactctctaataaacccctttggtacagactgggatcaatggcctggtcgccgtgaagctgttcaaccttctcgcttactcacatgggttcaggtcctggtctcctgggacaaaatctaatgaccatttctttgagatgagatcatcttcattgtgagggatgaagtcgtgtcagtatgagactattcaatatgatttagatttcgacgctaacgaatactatacgcacgtagatacacttataatagaattataataagattagttatttataatagatatccgcctctttaaacatatgtaaagtgttagggaggtattggccatggtgtgatgagtggtgtataccctttatctaaaaagaataaaatttcccccgcaaaaataaaataaaattttgactatgactctaaacaaatatttatccgaattcatggctgatttgattttttataagacggatgaagtaagagcaaatttaatagtatagcccactactagctataattcatatataaccaatctaataactaattcatataatagttgtttactatactattaatatatggtatcacctatcatacatatactgcgtcttagaatccgtgctgcaactggttacagatttgtagctcgctgctcttatctctcactttttatcttattaaaatatgtttataaatgtctaatagtctgctattgtacctgctctaacggagaaaaataaatatgcaagctatgtgacagtgacacgtgggatcctcaaggtcgtccgtgggatccacgtgtcaacctcgtgacgagcgtctctgctgcactgacctggctgcccacactccacagagaggagtgagagtgacaaatactcagtactatcttgtacaccggcgattgccgcggtggagatcacgctggcgatgaaagcaacgatttttacacaaacacatcacacactacatcagcagagccaagaacccttacacacacagccacactccatccccaagctcgcgggaaaagccaaagcagcagccaaagaaatccaccttttctagacaaaaattttagacgaaccgcgagactgatggccggctttcaaatacggcagccgggcgctttccctctcgattccccgctgcagatgagatgagatgagaggagaggaaatctccagggaaatttggcaggcataaatgggtagtaattgattgattggggtggttaatgccttccaagattgctcctctgctgctgtgctgctagggttgtgcgattcggcatggggaccaaaccagagaggggaggggggggggggggggcatgacgacgacgacgcccccgttgctataattccttgcnccgtttcgccaaatccctcgggctgttgcctcctaccccgcaatccctcctcgccggttggtgatcaatccggctcctgatttgaagtttctcttggggacccagggtgcccgttccatgcccggtttgctcgtgcattaatactagccgcttcttggataggaggacaactagtagtagttcttctctcctctcgctcgctgttccttgccccattctcttggcttcttcttcttcttcttcttcttgttgtggttgtgtgttatgataagagttcttcgccgttgagatgggttgctttgggtgcttctcgccggaggtggacgacgacctcaagccatccaagcccaattaccactcttctgacgaatcatcaggttcttgatttttttttcctctcgtgtttcagactttcagttagttccggtttttttgctgggattgtgactgtttatctttgcaggcgccgacgcgaggagaaaggtcgcgccgttggcgacggatggggggaacggctacgcgcacagcttcaccttcaaggatctgtcagtggcgaccggctacttcaacgaggcgaatttcatcggagaaggtggctttgggaaggtgtacaaaggcaagatcaatgggcaggtgagttcaacgactccttcatattctacttcttgagatctttcgtgctccaagatttggttttcactttatgtttttttttaatgttcttcgtatgtggtgtgtagatggtggcagtgaagcagctcacccgggacggcgtgcaggggaggaacgagttcttggtggaggtgctgatgctgaccgtgctcaaccatccgcatctagtcagtttggtcggcttctgcgcgcagggtgacgagaggctgctggtgtacgagtacatgccattcggcagcttggagagccatctcttcggtaagttttcctcaaactttgctgtgcatgatagccgcctagttcatgttgggatttggtgttttgaaagaggagtttgtctgctcttggcagtttacatgttactgttgaaatgactttccctatctttttggcagattacgcgccagtgttaaaatgcctcattttttgtacttattgtagttctctgcttgtgataattttttttgcctaactttatactcgactagctctccttcattccactccagtgatatgctttctcaaaattttagcctagaagcaatatcctgatatctttcctcactaattgcttgttaagtactaatgctgtgtttatatgaggaaaagataaaagaagaaatggcatggaacatttatttagctcaatatgaaattatatgaaaggagagagaaaccctgaacaagcaaatcgttgatatcttctccttttcctggttgaataattgggtgctttttccttcagttcctgaaaaactttcttgacatgtttctttagctttgctgctgtgtttgtaaatgcttttactgcagctcccatactgcactgagttttactcacttatcaatatcgtcattcttattaactaagcgaccatcataaaaatgtatgtctgttccacaatgcaaggaaacattttaggactgtacaatgaaagtaatcgatatccatggcgggatcataataaatcctcgtatggtagtactaactactaaccaataatcttgtagcattgacgttcttttttagtgttacattgtagtattagctcgttgttattatttcatttttaatataagaggttattggtgcaaacagttatgttctactattgctacaaagcctcactgaaaataaaaaaaacaaaccaatcatttatgtgctgaaaattttcactctgaaataggagtagatgacaatgatgataaagctgagattattgatgcacttataaaaacaaagagatataaacttcaactgagcaactcagctatctgtgttactagatttcaggatgatatctatctctattgactattggtgcatccaccttattagttctattataattgagattctgcatttaaagatgtaaaatattagaataaacaacaataaaggaactattcaataaatatgccgcagtcagtctacactttcttcctagtaaaatttctagccatatgtctttgcctttgccatctttcttgtcctgttcacataaagaccgaatatgtttttgaagctttcaaaaaccatgaatgaggaacttttattgctggtaagatgacagggaaactagttatcttgctgtgggttatcaacgtagggttgtaggccagtaagccagttactcccaacgactgggatgtatttattgtctattaaatgagaactaggttattgcaaagttcggaagttctattgtatttgcaatttagattgtgcaaaccatccagtttttgcaagggtgcaaaactaaagaaaataaatcagatctattattcagtcaacacaaaagttttgtgatacttgtttatttaatctccaaccagagaagccaccttgtgttgatcaaccattttcctagatgccaaattattcagcaaaataatacctaagtctagccaaactgtccccacggctaattattaaagctcgtaggccttcatggcttgtctcatgcctgagcagcacatgctctcctgaatgataccagcattagcctgctaggtaatggacatgatgtgaatcatcttaacttctttttgaagattcctcatttttgtaaatttacaatttgttgagatgaagtgttattccatatgatatcactgataattcccatcccataatgcaactgtgaaacaattgaatttgccatgcaattatgtgatagaattttggagctgtgcattatcaattgcttgtattgatatacttgatgtattttaggccactgcttaatgctacattctgaaattccttgtcagcagctagttctatattcagtaaaaatatcatcatccaccctacaatatttttttattcagtattcatcttgtacatttcattgaattgatagaaatttcacctttgaatagatgtgcctcttggcaagcagccactggactggaatacacgcatgaggatagctgttggagtggccgaagggctttcgtatttgcacaatgtggctgatccgcctataatttaccgtgacatgaaagcagctaacattctgttggatgaggactacagaccaaagctctctgatttcggactagcaaaagttggaccagtcggtgacagaactcatgtctccaccagggttatgggaacttatggctactgtgctcctgactatgtggtgagtggtaagcttaccatgaaatctgacatatacagttttggtgttctcctgttggaactgatcaccggcagaaggatctacgatgcttcaaggcctaaaccagagcagagtttactaacatgggtaagcagctttaccttctcctagtttatgcttccagtgttctatctcttgttctgctgcttctcaaaattggcctgtcatagttttattattagaaatttagaacatgaagtatcatggtgtatgctgtctatgcaagtccaattatttgacaatcctttaatttcaatgtttctggttcctgttgggttgatactgctgatataatcgcccatattgccatggcatatttttatatgaatatgagatgacacattatattcctcgtaaaaagcttaaattcttttaaggattttagctcattaatgctttcacttttttttgaaaacaatttttgcagtcaagaccatttctgcatgacaagaggaaattctacaggctcgctgacccagctctgcacgggtgctatccaacatctgcactaaatcagttggttgtgatcagcatcatgtgcctccaagatcagccccacgtccgcccaatcatctctgatgtcgtaatcggcctgaaccatgtcgcaagccagccatatgtccctgagcgctcctcagtgtcgctgagttccccagcaaggtgcgggtcaccacaatatgccggcacgccatctagaaggcgaggcggcagaagagttgctcagtatgcatagcctagactatatccttgtctcaaaagaacagcaagatctcagtctggtgagacgggtagatagttgaaactgtcaaaaatgccatatagtcaaagccttcttgattcaagaaccggtctttagcaacccgattgacacagtttgctgtgagattggtgatagtttgaagctgaccatgatgactgttgttctttcatgcctttcattgttttcagttccttaattctgttgccagtgtacatagcatcatcggttgtgctctgcttgggcagcagccatcagacatgcatcagtccggcctggaagcatggggacaatgtacttaattgggattttgatcaagttatttaatcatgtacaaagctctcatgcctttgctgcatattactgccatcttgtagctggaacaaatctgaaatgtctctgttaagagtactgccgcaaaatcgtctcctcttcctagctttgtactgagaattttgttgaatgagaaattgtgaactgtgcatgagaaggttgacgcctgtcgatctgaagaagaggtcctggatgatgatgtcaccagttaatcaacagtggactctgatgaagctgaagatttggtccacggagcagccacgtcacgtaatggaagcacacatcatgccagctatcatgttgtcttttcttccttcacctccaaggatagccacgatttcctctcaaaagagagaaaacggacagccatgatttcatcttgtaccataacccaaagtctgatccctttcttgctgaaatagctttcacatttcacagtactttgtccgattatggagtactccctccctccttaaatagacgccgttgacttttttaaacatgtgttgacggtggatatccgtaaaccggatacaaagggtattggggtacgctggtacgaggatctacgtagtacgacatcaaacaagcagaagacagattatactggttcaggccccttgataagtaataactctaatccagttggtatgggattatatgatggaaaccacagattacaaagagaataataggactcgatgataccgacgagaccgtagtcgagttggttcgactagatcacccggtgacttggctcctgcaggctccgacttcgtaggctgtggtgaatgtgtaggtggtgagatcgatgccttaggtcctcccagggggtcccttttatatcacgggtcagcggatctccaagtaggactcggagatatcggacccctcatgatacaatgacgacccagtcttgtccgagtaagacttctctcgtatgtggattctgcttctattatgtgatgaatttccttaacgtgtacaggaaacatccgtatacgcacaggtataccgtatcggtatacaacatatatccaagggtagagggtataccttatccgtaatcctgacaacatgtttgaccgttcgtcttatttaaaaacttttatgaaatatgtaaaactatttatatacataaaagtatatttaacaataaatcaaataataggaaaagaattaataattatttaaattttttaataagacgaacggtcaaacatatttaaaaaactcaacggcgtcaaatatttatggacggagtgagtattttgttctccggttacatttatgttgggacggatttttttttttttacacatggtcgtcactcatcacgaccttaaatcaggacaaatcaatggctgccctagctgagttggcccaatgcagaagcagaagcagtcgagatgccaagaaatttacacacatttataatccttttttctcgtgttaatattcggaacggtgacgtcagcgcgcctgcactgcgatgcaggtgcagcttccgggaaacggaaagcagctgccgcgatgcgcatgaacctgggctttgctttgtttaacgtaggtggctaatccaatcagattagtgaagaaaaagaactaattgccacctaatcatccactgcctggtgggcccacggcccacccgactgtggagcccacctgtcagtagcggggggtgccagttgtccagctccgcgaagtgaacagcgcaatctagcgaggagagagagagccacatgacgcacgtacgcacgcacgcacgtacgccggcacgagcacctgcgtggaccgagtccacggaccagcagaatacacctcctggagcttgtagggtgggtattcggtttcgatctcgttcttcggtttttcagttatttcggtatttcaaaagtgaagaccgaatttcaacgcaaaaatgttaggatcgataaattcggtctcggccttttccgtctcggtctcaattctgaccgaaattccgcaacattttcatatatgcaaagaaataatggattttttaacacaaaaatcacgtttgtcggtcctgacattttatttttaacacaaaataaattcgtaagcatgtttgagtaaagacttttattagattgcatgtctagaagaagtagggatgtgaaaattagagtttaatcctattgaacttagtggattgtaggttgcaattagacttttttttaaaattcggtcttttcggtatatacggttaactgaggagactaccgaattgacctaacaaaattcagtctttcactgtctaggaccgaatttctcggtctcagttttttcggtctcgatctcggtcttttcggttcggttttttttcctacccctaggagcttggccagagagcaagtggccttcgtgcaccgggtccacggagcagcgcacgcgacgaccagttcatcacttggcgccagccatctcagtgtctcgcgctgtccacgtccacatttccgtgtttggttggttgttctttctactccttgctcgccaagctcacatcgtttttacctatacaaacacgcgcacgcagtcacgcacgatcctattcaagaagaagacgacgagggaatccatccatcgatcgacatggggaatcgcttgtgctgtcatgacgccgccgacgacgagaagccggcggcagcggcggtgtcgggcggcggcggaggaggagggagggaggagtacaggcggtggccgatcgcggcggagagcggcggcggggagacggggagggtgctggacatgccgcggctgagggtgttcacgctggcggagctccgggcggtgacgcgggggttcaagccggagatggtgctcggcgagggcgggttcgggacggtgtacaaggggtgggccgacgagcgcacgctcaacccggccaagagctccgccggcgtcgtcgtcgccgtcaagaagctcaacccggagagcgtccagggcctccacgaatggcaggtacaccgcactgcaactagctagctagctcgttgctcgattgatctcgctgttcaattttcttggctaattttgcgtttcgttttggccataattagcgagatagtttcaagaatggctcctgttcttagctctgtttagattaactcaacattgttacagaccgcatatttattaaaatcttttctttcgcttaagaaaacattatctttaacaggacaaatggcttttgttttaattaacctgttgctttctccgcacaaatggacaagtcaactgatgacctggtataatgtgatgcattgcttgcttgattagaaggctgcattgcttactgttccaagctcacatgttaattcgagtctgtgttctctgattagccatgaactcatcggcgatttccaattctctctttgttttgtgcaagtacagtcagaagtcaacttcctgggtagacttgtgcatccaaatcttgtgaagttgctgggatattgcaaagaggagagggagctgctgctggtttacgagttcatgcccaaaggaagcttggaaaaccatctcttcaggagtaaggctacgaccatcaatctaactctgacattgtactactactctcatgtctgaatatcatgcttccacaaaattggttcattttcagctgttagtctcccactcctacctaacataatttgacgatttctaatacgagtaacatttagtacctgaaactatctttatgtttgtccgaatgtgaacagacaaacttgcccttcgaaattccggcttgacttctgcaaagtcagtgccgtacttcatcgtattgatctgaactttgacaaacgcgaccatcctgcattggttgatctcaattcttaactacggactagtcatacagtgattcatcaacaaatcacataaataattttgggcaatagtatcatgcatgtctgatttgctggagtctgaccgatcttcgtgcaggaggagcatttgaccctctgtcatggagcctacggctcaagatcgcaatcggagcagctcgcggcctcgccttcctgcactcgtctgagcggcagatcatatacagggatttcaaggcatccaacatcctcctcgacgtggtaaattctcttctcaactcatctcgcgaaattcgcagatcgatcgtgatcatcttccaaactccatcatttgagacacgcatttttcatcaggattacacgccgaagctgtcggacttcgggctcgccaagaacggcccggtcgccggcagatcgcacgtcacgacgaggatcatcggcacgtacggctacgccgcgccggagtacgtcgccaccggtaagcatgcaccgcaccaaactctctaatcctttatatgccactagaatttgaccagttcccttatatgccactagtttaagtttttttcacccttttatgccactcccaccactatagtgttagttgactgttagtcaaaggttagtttttttcgtaaatgaccaatatgtcctctcaactaaaaaatgtgtaaacttcaaaaaatcataactaatttattttaaatcttttttgattgaacaaaattttgtcagaaccagtgaaaaatgctctttatattaaaaatattgttggaaaaatgcatgtttcatgcttacattgaaaatttatttgtgatggtaatggctaaaattgcaagtgatgcagaaaaaaaatcatttttcatatgttgtatccagtagctatattagtactaaaatacctattgttggttgtatactaattcttaagggcaaatgcgtcttttttacaaaaaaaattaacggccaactgacggtggaccgacggcaatggcataaaaaggaggagaaatttgaactggtagcataaaagagagaagccaattttaagtggtatataagagagccggttaatttagagtggcatataagggattctctcttctcttaactatgcaaattccattcaaatttagccaaaatccccgaaatttcggttgtatatatcgcaaaggactaactgcaggctgcgtcgtcgtcttcctcgcgatcgttttcacttttttttcaggccatctgtacgtgaagagtgacgtgtactgcttcggcgtggtgctgcttgagctgctcacggggctgagggctcacgacctgaaccggccgagccaccagcagaatctggtggagtgggcgcggccgtacatcgccggcggcaagaagctggcggggctgatggacccgcggctcgccggggactacccggccaaggcggcggcgcgggccgccaagctcgccgacaagtgcctctgcggcgaccccaagagccggccgtccatggacgacgtcgtcgtcgcgctccaggagatcgagtccgtcggcaccgcgcggccggcggcggcgaagctgccgccgcgggcgccgccgcccgctgcgcaccggtcgccgcaccgtaatccttattccaagccgcgatgagctttgggattatctgcatactaacatagatttgaaattgaattgaattgaattgtattgattcttttttctttctacggcgcgtgtcatctttaaacaatctcactttgcaaatgattatactcctctgatccatgagattagccgtagtgatgaaccgaatcgagtcactgtccaggagagcgacaagatgacccagacctgtgctttcaggagaagcacatatacaggatgtgatttctgagataaatgtgtagacttgaggataaacatacgacgggtttagctctgaaaccataacatgccagaatttgtgtttagaggatagatgaaaaaaccaaaaaaaccacggacgccaaccgacaagatcacttttaagagttgattacaaaagcataacaattagacgttactcctgtgcgactaggagattaattcaaatatattttcatactgaaatttgagacacatatttaacaactataaaagggagaaaaagagagcttccgatctgttccaatgtcacaaaggaaagggtgtgtttagttcacgtcaaaattggaagtttaattggaattgaaacgatgtgacgaaaaagttgaaagtttatgtgtgtaggaaagttttgatgtgatagaaaagttggaagtttgaagaaaaaccaggccaaagtagcacaattcttacatttctaccgtactgtacatgatatacaaaaaaaaaaatcttcacccgtaaaagagcaggtttacacgagcaacatcgaaactactccaacatataaataacattgtattaacaataatgctaacactgatctaaaaacaacagaattcatctcgactttgatgatgatcttgtttcattgccagcactgcaactgctttcttgtgaaccctttcgcttctgcaatatgtgggtgcaagataagcttaccatgcaactaatgagatgaacaaagaaaggaaaaatatacactaatattttcatcaatacttacactggtgggaagacatttcagaattgcaaaaatgctcccatgaaggctgaacagacacgctgtaacgggtaacctgaggcaggctttcaaatgctgaaaccttgaagtgaacacttgagaactattgagtcagatgaaaccccaaaagagctacaaacttttgaactgtaactgactgctaaatctatcccaaagcttcatttcgacaaatgccaattattttcatcctctgacctactcacctacaattatgtacactagtttagtctgcctacacaaagttcctatggttatgaaactgaacaaaaggcatacagctccatcttctattcccgtggactccactgcatgaacttcagcatgcaaatcaataccaagcaccgacagggaacatcaacaattacttcatttccaattcaagaacacagcacggttcaactgcaacatcaacaggcagctgtccattaatttgcacctcagcccaagtatccaaatctgaagcctgcatacgccatcttgacttacaaccaaaggcagcgtcaggcattctttacctgaaggagcaatgagatgattgttttcagtgctgcaacaccactgtcaagacagaccagtttgaccgaaggaagcattgagcaacggttgaatgctaggattaaccaatattctaactgtttgattacttgatgacttgtatacatcaatacactccagcaggtctgcatcacaggttaaaagaacccactcagattcatcgtccaaatacttgaggtccacgtgagtatcctgagaaatgccgaaccgctttacgatctcttcttttagcctttgaaagccccaactaggctgaagacggaatatacatctttcctcgccatagatggcttttattttgagagaatcagacctagccttttgcacgtttgacatgttttctatcggtttgtgttcacttaaaagtacttgactctgagacctaaatagcatggtaggtctttcttcaacaaacatttgcagctctgcctctgcatggctagcagatttgattagtgtggagcactgattctcatccatagatatttcctctttgactgcaagctgaggagcactaccatgctgttgctgagtctttggaacactggaacaaccaaggctagaatttgagctctggctgcaggatggggagatggaattagagccagaagtatgtgaagtgaatctgccctcacatggacgatcaggaactgaaggttccagctgaaagttttgctcagatgctggaaaatggacatctccttgtaactctctttctgaccatgtggtcttggtaaaattttcatagagtgaactgagctgaactgttccttcaggaccatgtactgaatcaatgaccatttgcaatttcttcagggagtgcccaactttcttgatctttcgtgatggccaacgattaattccatgctgcctgcatattctcttcagtgtagtcgggcacactggaacaaacggtagaaacataagatcaatagtcagccacagatattgcagtttatatctatgcaaatagtgaatgaagcattagtcctatatactttcagttggatctattgcaaaaaccaagacatttgaattatcaattttatctcaattaattacattgtaagttccccgcctgattgtacacctgtcatttttttttatcctggaacttatctgaaagggttacatgcactgtaagcagattattactatgagcaaacttatcccacttcttttgagccatgcttcaaggagataaatgtacaggaaaagctgcaaaaaataattttaaaaaaggtaaggaagccagccatttcagagatcatttgtcattaaaatacctcctaaattctttgcagcttctttcaggctaccagcaaaatgcttccgaagatcttgcaggctaactgttttctccgtcttagtgcgccgtttttctactgctttgtccgagtttgaattgcttggatcactggaacaagtattttctttgacatcataatcttcatgccgcttaaaccctgaaaacatgctaccgtcaggtgccataactggagaagtatgccagccagctgtaacactaaatccttcatcatcttgtttgctgaatccgaatggcaagtcaacatctatttctccctttcctcccttattctgagcatccactaagctcgctatccatgatgatacctcctcagatgcttccaatgatgttgtccttccaggaacattaataccactacagagctcatccaagtcttcatgcacagacttggcataaaattctggcctggttggttgactaatttcaaatggtccatcatttaccagctcttttggcttcacaactcttaatgtatagcatacttgttgtatggtattagataaagaattgagcatggccctttgctcttcagtatttatgcacttcattggcaagaaaaactccaagacaaagtccaggcttccagtcttgacacttcgcagctggatggcaactgctgccctcaagccaaaaagtttggcatgatgcgagagagggtactgggtcttgctgtaggtggtaatgtctggggagaaacatggctcattcgtcccaaatgccctgccgacaacaccctcacctctgaacagatgatgctcggagcaagcctggtgaaagcctaatacggaacaatcacggacataacatgcctcatcaacagtggacacacaatgtttgtagctttcatcagagtggcggcttcccctcttggcctggcagatgcacggtatccatgtctgggctagtggcagattgtgggtatcacaaacagctctgagaacatccatgatctcaggtataattgctcggtaagaagcatcaacaacctggcatcaagcgggcagcatctgttactgagaacaacatttcagcaaagcactctgatctttaatatctttcatctcaccttggaacgaggatcacttgaaacatcagagctcctgagatcaacttcctgcaattttccacgaaatgtagttttattaagacaaggatgacaccaaggtaggagaagtgaaaagatttattactttggggattggtgtgcccagcagttatcacatcttttcctaatgacatttcatcgaatacgttaagagcataacatggtggcctgcaaagcatgggcatttttttcggctttggagaatcaaatggagcagtgttgcgcaaatctaccttgagagcattgcagatgttctcgatctccgcactgtagttgaccttctgcgtggtcatgacgagctcgacgacgccgaggcaggctcggctccgcggctcgaagaccggcagcgcgacgctgccgcggatgtcgaagtattgcgcgtgctggacgcgcgggtactcctcggtggagaagtagcggacgtccggcgtccactcggggacgcggccgacgaagacccggccggggagccccaggtcggcgcgcgcgctctcgtcggcggagaactggtacttcatcgacaccgtccggtagttggcgaggcgctggttccggcggtccagccagaacggctgcccgcaagtcgtcagcacctgccggtcgccgatccgcgtcggcacccagacctggacgagcagctccccgtcgccccgctgcgcctgcgactgcgactgcgacgcgatgcgctccagcgcgggcgcagccgctccttcaccgtcggctccacggccacctcctgcggcgccgtctggaacgtccagccgcggtgcgcggggctcacctcgaggccgccgccgccacggctgggcatctccgcctcgtccctgtcgtcctcgccggccgccggcgcgggggtagtcaaggtagtgacgctgctgccgatgtcgaacagcggggagaaggggctcgccgcccccggatgccagaactccgacaaatcgaaccccggcgtcgccagcaagaactcctccatgagatccaggtcaccgccggcgatatcccccgtcccgcccatcccgcatcccatcaatccatcctcctcctcgtcgctcctcggcggcggcggcggcgacggcttctgctccatgaccggacaagcaccaccaccaacctcacagccctcgcatacccccaatccgccgaaacgcagccgcgcggaggcgaacaaacacgagccacgaacctgggattaattgaaaaaccagagaggaaaccttttttatgccaaatcctctacgaatccaaggaatcgagcatggctgccacagcggaatccactaccacacacgcacacaaacgccgcaagacgcgagccttgaggaacccgacgagacatccccatcatggaaaggaaaggcacatcgccatcacgccacaatgacacaaacccaaacccaaaccccccgcgatttactagctatagctaagctagcccaacacgcgaaaaaccacccggtttactgcaaatcgaatcgcggttgagtagttgacccacctgctatctcagaagcagaagcagagcatgtcgatcgaacacagcaacagtggggaagagggggcctccaatggaacagtcaatttggccactcggattagcgagaatcgtaagggattcttctcgcagcgagaaaggaggagatgagaggcggtggtggaatcgtatttgagtaggcctcgcgctcctcctcgcagtgcgctctctttgattctatctcctgtatttttgtttgtgcagagacggaatctgctgcagcctctcggcgcggggtggggcccacgagaacacgttgtttatttggcgggagggagggggaaatggcgggaatgggcttggtgggggcctgaggtcaaccggatttgggtggggccgggaggggcaggacgggtaattttgggtgggggagaggatatgcatggggacatggcatgtcgtgctcacggggaagacgacgacggcgacgttccgtgcgctgtgcggctgtgactttcgcctcacgccctcacctgatcacctattcacctgtaccctctctctctctctgtgatcaaaataaatcaattttcatatataaataaatctcaaaatgagcactctctccgttttataatatagaaacctaggaccaaatatagtattttataatataacgaatctgaatagaagagtgtccaaatttattatactatcgaacgtctcatctagagctagattgctatattatgggactgatggagtatttcttatgtgcgtaagattgtaatagtcttttagcaattcattcttggccagatggtacaatgttttttggaaattggttttcaatgtttcgagattgaaatttgtagaaaagtttagtaacaatcttgaagtggagaaattggtttcaatcaacaagatataatacttcaagattactggttaatgtttcaatcagcaatatatattatacttctattatttttcagaaatttgatgcctgggacgaatactatgggatttaggtttgaaaccggtaatcttggaagtggacaaattgcatttggtttagtacaatcttgaaactattctgtcgatcgtatagcacaatgtttcacaggaaagttttgttattccctgatattttgatctgactatttgcaattgcagtggacttcagtgattgcccacggatccagcgtataaattagtaccaactgcatgacatcaaccggccaattttgtttaaaaaaaaagtctgtataaattacacgtacgcacatccctgttcgtacatgtgtagtacactgattgttacgcgagctattttcccttcgttagctgtcctgaatctcgagacatgttggcgtttcaactctcacttgctatctacttccaactattattaaaggaggaatcaaaagtttaatccaagcaagcaagagagctggtgttgctgacagacttaagatcgatgtatgtggcgttgattaaaatctccaatcaaagatcctcccatgctttgatattgacaccccaaagttcagctccatagggagaaaagattccgaatcaaccagcttgctggccatgcttaattaatttgattagtctagtagtagactagtggtaccacataaaatttcactgccgaatttagccctgctacaggcatgaacttggcggtaggtgaagcgacttccaaaacatgagggggttggtgagccgaattggccagtaagtcccatctcatgtgaagaagaaaaaaaaaaggagggccatgcaggctgcatctgatgctaatcactgtttgaaatgaacacatcataattaagcaaagtgactttgggtaggtaaagtgtcatccactaatagcaatggtaagctgtaaaaaattccctgattgcagcagatccaccttgaaaattaatgggagcagattaattaagcaccagttttaacttttatatgcaaacttgtgcagaccacaaggtcattagggttttcacatggtggtccatgatccaaagggaacttgttaatgggaacttggaatccattatttgtggtgtgtgggggtcttcatgtgggggcaagactttttccaaacaaagattaggttaaattaaaggagctgatgatgcaagcaactgagaagttgattaattagtgtctgattgagcttaacagtactggtcagtaatgcgataggcatgcgttcttgttaatcctttgacggtaagctattggttcctatttgttgtgagcccgcggtacatgtggatcggcctactggtatctatcttaagctaggtttgattgattaatacttaatggagaaagaactgaagatacttgccctagtggtattggactgtcttgtcagtttattgctggatccgccctgcatgtgtggatatgattatacttgctgccaacgaatctcttgcaaaattaactgatgaatcatgcatatctatatctaatactcgttgctaagcataatcgttgctaagcagtagctcgcgatagtgacattagtggttttcaagtcttggagagttggagtactcttggtgcatatagctcttgtacgtattctcaggagtaaaaaagaggaagaaaggttaacactaactacgtttggttgatgtgtgaacatattcttaattttcttgtcttacgatagtactagtacaattaatttctaggattccagtagcagaattagttgtgataattaacacaaccgtgggcggcacgcaggttgcaaaaagcgaaggaatattaaaatcacacttgcgtccctacatcgctaactgacaacttgctacactgcttaaataattctggcttgaacaaattaagctgtagcacgtagccagtttcttgctagcaagcacatagatggatcatatctctccaactcgatttttctgaacttctctagacacagagaccgtgacatgtccagacataacaaaagtccaatggatcatattcatatgagaattcagaacaaagattcaataaagctaaagctagctgtttgtgcaagaaatttctcgtcgccttgcatgattaaagtgacacatttgcgcgttgaaattaataccgattaactaactaacgtcgtatcaaatatagttccctgcagccagtagccaatggtattaggttctcccctttctttctttcttttttttttaaaaaaaaatattccagttccacaactggtggatcatgcatggatcgtatatattcttagtctgaacaatcaatccgtttggtacacttgaagctaagaccgtctcatccacagcttcgtgagcactaagaagtaattgcatctaaacaaatctctgcattaatcggatcactaaattcagacatcatacagatcgcagattctgaattttaattatatcatcaatggacctgatgatcgggttgcatgcagtagcagaaattaaccaagattcgactcccggcaccaaaggaacgaggcgatcgattgataagttatcccaacttggcgctaatgcgtggcgcacttaatttgtcctgcaaactcgcagatcatacgatcctgccattaattctccgctaaacctaacactcttcgagtttgtttagcgtctacttgtagattctctctgcatgcagcacgcgtggaatcccgaatccacattccacagccaaatcatgtacggccggtcgtgtagaggtaagttcttgtgttctttccaagtagcttaatactccccccattccaaattgatctacatattttataggtacaccaagaccaaaaaaaaactaatatctctctcatactatatttactctaacaacaaactagatgcatacaccatccccactatttcctagccaatagcaaatcaagatattacatgtgggttataaatatttgtgtgcatgaatgcatgcatcaatatccatttactctaatgcataaataacgaatagacttaataaatgtacacaaatatgtagatcatttaggaataacctcaaaaaactatatgtagatcaatttggaatggagggagtaatctacagtgacctgagtagcactctaaaatcctgagttcaaatctctataagagcgaatttcagattgggttatttgaagagctaagttccctatttgatagactaagttcctaaattaaaatggttgcatatatctggttggtatagaggcgggataaaaatacccttctctaaaaaaaacttaataatcggaaatatctgaaaaactcagttggattaaagcagaacaatatggttaattggatgattgatttattgatgcatgtatgtacttggcatgtgtttggtttgggaatgaaatatgataggttagactcatccttgtttttaggatgggatcgtccccactatccgtttagcatgaggtaggagatagtcctagtttttaggggatggcctatatgtcagtgggaaaaaaaaagtgggatgaattggtccaccagtttttgagtgaccaattttattcggatcttaaaagaatattctttttagagattattttatcccacctattttcaaaccagatgacttaaaaaatagcttcgacctaacccaacccacttcatcccttgaaccaaacacacagttatgtggacggctggacgtgagtgtcgatagagtaggcttcctcttagctcgacacttcgacatgcagacgcagataaggatcgtgcttggttgacggcttcgttggcgtcatggccataactaaaagcagaagagtgatgaagaaatcgaaacagctctacgaagtacgaatgggcggtcggtaatgcactgttagtgctacgtacacgtacggcttttaaaaggaagctaatgctttctagtggagtgcaagagaagcgtacgtcgtagaaatgcaacgttgcacttgtaaaagtcactgtgtcggcacattgctattcctttttgaaactcgtagtaacccaggccccagggtcaatttcaaatagagctagcctattgacctttttttgttgttgttttttttaacaaatcttttgttgttgttgttgttgtttctgtaagaacggaaaaaagctgtgcacagcacttgtggtagtgccaaactatcgtgtcccaactagaacaaaaaaatatattattgggctgttgttgcgttgctgcaaaggcctgaaatttcagtagcccaactgatggcccacaaagtaggttcatgcccatcccggccgctgcttaatccactagaataggttcgttgttagtccctcttattgagatcgagtttgatttgcatccttaaccgaaataccagatacaactcatcactaaacttctgctaccggagtatctgaagtcccatgccaggattgtgagctgttactttatctccttcctccccaccgcgatgccgtttcttccaagcctccttcgccgccacagcatccaccaccgcaccccgcgtcggcttcgcacgacttcatcgtcgccttcggtgagcccgtctgtgatgtcctcatgcacttgcgccctatgagaagcggaagcagcccgggggcgcgcaacatggtgtttcttcctcctcccctctctcctcttttccccttttctctgacgaggaaatcgtggacgcccacaccgccggctttgtctcgctagaggccccgccagcgacaacgatccagtccagttgctccttggccgccgtcgtcaccagtaacaacatgatcggcgacagcgcaatggctagccgtgccaccaccccacaccagtgatttcaatttcggaattttcgaaacccccccccccccccctcctctcggcaagtgatcatctcgggcaaatttttctgtttttctcattctaattcagttaaattatgttaaaatttcaaaaaaaaaattgctccaaaagtgcccaaaagtaccaaaatttcgagaattttagtagaactgaaatggccgaaatttcagctgaaatagaaattggaaaccctgccccacacaagcttcccaaggccggtgacgcccatggcggggccagcgccggcacagccgcatgccgtctcttcatcgctactctgtgctccattgtttttcttggtggggctctaacgaggatggtagcaacggcgacgaggatgcgaaattggggagagagatgagtaaaaagaaggggtgagggaaaaaaataaagtgatgcttgtatgtgggatctatgtgggtcctacgttaactcgtcgccatctcagccgctcacaatactgccatgggactttagatactccggtattataagttaaggagcacgttatatgtgatattttcggttaaggatgcaaatcaaactctatcgcaacaggagggatctaaagtgaacttattcccttatgccaataaagtggccatatgcaagaattccaaaaaaagggattataattaaataattaatttactgtatataaattattgataaaaggtgtgcttacaataatgatgaagtatcaggagaaacgtgtcttcaggttacagattattacatgatggtggtacacgaattgtgcggtgatagaaatcatatatgtcctctttccaaaatagactcgatcgatcggtattgctagagtatgagtagcaattattatccgatagagtgaggctgaggccttccgtgactgaagcagattgcaacgctgatcgatctccttacatgctcggcttcgcgctgagacggctcgccagtttctgacccagagacctgtcagcctgcatcgaaagacatagtagattgttcaagttgcagttcagaaccaagaacagattatacagatcatgttgtacgtttttttttcaatttatggaacaaactgtaatgtgatgtatttacctgagaccagtaggagagccagatgctcctgatctcgtgggtgaggcgagggtcagagagtgcgtcgatccatctcttgatgaaccggtcttgcctgcagtgcatttagcatttgttcatcagtcaatcagtctagttgactaattcagtttagttcagtctctcgacagttaattcggttgctgcatctgcatgtgtgtacataccttgccggatcccatgaacggtacctctcccctggctgcttgaagttgttctccttggcaatcaccacctgcactcgcaacccgatcgatcaaaaccagttaataaattgactagctattactacttctcctgttttagattataaatcgttttaactttggtcaaaattaaactgttttaaatttgactaagtttatataaaaaatagtaacatttttaactcataataaatatattgaactatagatttaatgatttaatgaaactaatttggtgttgtaattattactatatttatctataaacttagttaaacttatagtttgagattgactaaaattaaaacatcttataatctgaaacgggggaagtagtaattaagaaagaaaatatagtgaaatgtaaaacccaaacgcaaatcaatcaacagaattaccttctcgcggcggccggtgagggtggcggaggggatggggtagcggggggcgtgcttggcaggatcgtagcgggatgggaagtagtcgacctcctcgtcgcggtgcatgaagttcatgaagccgtcgtagtggttgttgtggtgggcgcacttgggcgcgttgggcgggagcagcaggtagtttggtccgaggcggtggcgctgcgtgtcggagtaggagaagatcctcgtctgcagcagcttgtcgtcggagtagtagatccccggcacgatgatcccggggcagaacgccagctgctcgttctccgagaagaagttgtcgatgttgcggttgagcaccatcctccccacgggctgcagcgggacgatgtcctcgggccacgtcttggtgacgtcgagcgggtcgaagtcgaagcggtcctcgtggtcggggtcgatggtctggatgaacagcttccactccgggaagttgccggcggcgatggagtcgtagaggtcctgcgtggcgtggctgtggttggtcccgccgacggtgacggcctcgtcgtcgagcagcgacttgacgccgcaggtgggcttccagtggaacttgacgtagtgcgacttgccggcgcggttgacgagcgtgtaggtgttgacgccggagccgtccatgtggcggtagtcggcggggatgccgatgtcatcgaagaggaaggtgaacatgtggaggctctccgggtggtgggagaagaagtcgaggatgcgccagttctcctggacgtgcgacttggggttgggcttgagcgagtgcaccatgtccgggaacttcatgccgtcgcggatgaagaagacggggaagttgttgccgacgaggtcccagttgccctcccgggtgtagaacttgatggcgaagccacgcgggtcgcggagggtctccgggctgccgcgctcgtggatgacggtggagaagcggacgatgaccggggtctggacgcccggggcgcggaggaagtcggcgcaggtgaggtgggtgatgtcgtgggtgacctcgaagaagcccttggcgctggcgccgcgggcgtgcaccacgcgctccgggatacgctccctgtcgaagttggccagcttctcaaccaggtggtagtcctccagaaggatcgggcctgaattttcagtgttcccagttcagttcagttcatcgatcaccactcgacttgaattaaactgacaaacatgctacggaacactatcgtaaaatcgtaattagtactaatttactgtagtgaattgctccccacggagtctggacctagctgagatgtacagaatcgtatgaaattcatgtgctctaacaaacgcaacagtttcaatttgtaggaggaactaggaaacaattcaattttcaaatgattccgcctgtagcttgaaaacacaacaggttctaatcttctggacatggtgttataagttgtaaccaaatactatcaaagtattttttaggaaaaaaaacaaatgaatccagactagcacagatttactgggatgacgttcttgaatttaaactggtagcagcaaaggctacaccacagaagacacaaaaagtaatctcaaaccacaggaggaagggggattggcgtggtcatacgtacctcgggagccgacggtgagcgagttgttgttgttccatacgggggcgccggagttggtgctccacagcgggccgttgaacgagctcgacgggcggtgctgcgcgcatcacaccaaattccgcatcaaaaccacaaaaaaccaacgcactctcaaacccctcgccccagaagcagagcagagcacgttcgttaccttgtagggatccatggctgattaattaacgacgacggcgtccggcgcgctcggtcacgttacgtacgaacgtctcgcgaatgtcgccacacaccgccctacttatagcgggccacaagagaaagaagagccctctgggtcgtgagtttttttgtcgcgtcccggatctttccgggctcaaatgatgtggagtacgtggggctacggcgcacgcaggcctagtagtacgcgagacggcgagagacgtgtgcttttgcaaagcgagcggtggtggatgggagacatggggggagcttgggatgagtggacatgggccgcacctcatccacacgctccaccgccggcgctcgccgtccagaaaaataacgggatttgtttctgctgcggcctctctgctcgtcagataaacgtagcgatttttttttttggaactgcactagcctctggaatgtgaacgcgacggccaatgggaatttttgatcgggctgcagatgctgttcacattgacccgatacgtatagtatatccatgtgtgtgtgactattccatttcccaaaaggcaggaaaaacatacgacaaaagccagttgagacagtattggttgttttttcgggtaccatatgtgcagagatttttcacctgatcccggcaaggattttttacactcactgatgtaaagtatcttgcatgcagatggaggcatcttgcgccgcgcggccactggcacgccagacgcgagagaggaggataacattccacaacaacaataacagattgagaaccgaaaggcgccctcaaacgcaaaggggtcaccagttcgtcacccggttgagctgcttaacaatagattcatacatccggcagaagaggttagagcctgatatgacaaaggtagccaaccaccttccatctttcactattgtagagttttagcttcacaagagccccttttcaatccaataatgccatcaacacatgagaaagcaaatttctagcacatcttcagtgaagagttagggtatctataggttgtaagagcaggcaagtaaacataaacaacggtcatgtacactgcagtaaccaccaatagctcaatatgtatatacaccaacccaaagtaccatcaatacaccaatatctcgatcacgacatgacaaccatgtatggaaaggttaacccacttgactcatttattcatctaaaccatgtacctagatgatgcctttgaatctgacggtataaaaccaatgaaccagacaatcttacaatctgagctacaggtaacaagtcgaggacatcttcgatcacaacagtctatcagccaatattcccaagaagtcgctccaccgcagcatgaacatttcccgctgtagcaatcaaagctcgaatgttctcctgtgtgtcaaagaaacccatttcttggagctgagctagttgtgttgcatatagctcttctggtggaactgcaaatattggcattgcttaatgagggcaaaccaaccgactccaactcgaaaagaatttcaaaaaaatattaatgtgactatttcttgcagtattgcactccaaaatttagagaaaatcacttaccattgggtgcactaggaacacctaggccaccaccagcaccgagcccactgaacatgctcatcagattgttgaggttagtattgcctggcattaaagtactctcataagtcgtgccattaaagtattctaaattaatttcaatgaagcaccaaaatatatactatcaataattcaacaatctaaataagacatctgaccatgtttaatatactaccagttgacaagatatggtaacatcttacatttcacattgatttctaatgatgaactcagaatcccatttgagttggatgcctgattcaactaccactaacaaagtaaaccagggtacaaaatatcaacaaattaaatcactaaaattgtttcctagaaaactatatttggtctggagggcattcatttgtttcatctaggtacatgatcgatataaatatctaaaaaggcaaaatttgagcatcctattgctctcttagtaaataaaaacttattgcaagaaatgatataatatgattctgcaatttatcaacaaatataaaaaaaatcttagcctatatgactctctagaagttgacatatgtatctgatagttctgtgaaagacagttctgatagtgaacatcagtagaggaagttacctgcaccagcacctgattgggttcgctctctggttcaaaaaagaaagaaagaaagaaaaggattcaataagcagtagtataggcgagacttacaaataaaaatctcttgattttacactcaacaattaacttagaaaaagaaaaggtatacataaacatgatgagcttaaacaggttaagttgaactggggaatactcacgggccagcttgttgttgaccaagttgtgacatcaaggactgctggaatgagattaattgctatacacacaaaaaaatcatcataagccatctgatttccatacactacagcagtataactaatttacctgcaaagtttcaggagatgtcaactggcgaacaaattctgggttctggaacatctccctcaactgagtgttagattccatcatattacgtacatttgggttgatattaagcagctgcaagcaagacgacatcattagataattaaaacactgtgtatcatgcatatcaagaagcacaacatcaactattccatgaaagattagagcaacgaacctgattcatggactgaggatttgacataatgttctgcatcatttgcatcattgtaggattttgcaacacctgactcaagaaggaagtatccgagccaccacccagcatacctcccaaatctgtagaacttaaccctcctaggccaccagctgtggcactccttgcattggtaactggagagggccttgttgctccctgtgcagctccagctgttgatttacgtattagtcagagagaatcccatctgcgaatctaggataccaaaacaggacaagaaaacatacaccaaaataaaaaacaaagtacacaaaacttaccagttgtgctccagggatttggaagtggattagtgtttggagcaggagaacctgttgtggattctgaggtggtcgttggtgaatttgcagctggatctctggcttggtttgatccatgatttcctaggagagcagaaaatgggtttgaacttctatcaccctccccagccatcgttgttgcattcagaaatggctcttgaacagtttcatacatgcggcggagcatattgaacccttctggagaagattcaatgttgctcatggctctgtctgtgttccgcatcatctctcgcataagttcaggattcctagctgcttcaacagtctggcggagaatgcttggatcattgaggacatgagcaagatctggattacgatcaacaatttcacgcatttgggggttgttcataattatattgcgaattagatcagggctattcaatatattctgcatgagtggcatattcattatttctctcatcaacgtagggttctcggatagctgttgttgcatctgggatagttctggaaggccagaaccaaatgagcccaaccctccactgttagcagaacctgaacccccaagaccatgcaacaaacctccaaaaccaactgctggtgaattggaagcagtggtagcattaatggcaggagttacattgttggctgcaggaggtgcggttgacgctggtggtggtgcagcaccacggaccatgtgaatggtgtgatccgtctcaacaccttcaagagggaaaataggcataagaataagcacatttggaaaatctttgtgactcaaggttaaacatgcactgcagcagtaaacttgctgcattcaaagagtaatgatttctaaaagcatttgtcaaaattgagtagatggacctagcatatctggtaactcataagttgatgtgcacgtgagcaaaataaaaattggtactacctccgtcccaaaatataacaacttctagccttcaaaatttgcccctaaatataacaactccacctacattctcttctcaaccaatcacaaccatccaccattcaaattacctacctacctcctcttctcaaccaatcacaatcttcctccgtttaattccatcaactttcttaatacacgtgtccaatcctaaaactccttatgggacagaggtaataacacttttaaaagcacaaaggtgggcaaagactgcataagaggataaccttctttcacgaagaccaatatccacacccaacgttgaaaagaaaaaccagaaacctcatataaatgattcggaaacacatgggtgcagatttgaataggttcaaatgcaagaggatatgatgggcatggatgcagtaggtgggatcaaaacccgatgctcagtatcaaattttactcattaattcaattccatataaagcttcatctagtggcccgaaagaatctgcaataaacagtacaaccctctgccttttacttgaaaaggaatataacatgcaccaaacagcatgcatcacagtagcagtttttgtagtacgtttggaagattgaatctctttcagttctacactgctgtggagagttgcccatgtggatagtgctgcgcatttagcttctgttgatgtcataacaagccaataattaatgctacatcataaggccatgaccagatgtacaagttatcacgttacacgtggatcattacgagtagttcataacaagcacttgcaacgaatgacgcaggacaataaaaacagcattataaagcttccatattcgctaatcactaagatgccattatgctgacaatatccagcaaggaatgttatattcctgcaaaaataccctaaccacgcattaccagatacaatttcacatcgcacgtgtgcacttaacaatgcaattggtggctccatgatgtttggaatcactttcatgtcaagaagggagggaagtgcttgttttccttctactgcatgttcgctaaactgcattataaattagagtagcaaggctccctgatactgccttccactgcatcttcactgggctgcattataaattagtgtgcaagtctccctgatgctgcttacccaataataccatcgtctaccaagtaataacatggaaaatcaaagagataattcacacacggcatgaaaggagcagctttccttcgcactcctgactcctcctacaacaacggcattggcgcattgtatcaaacatacgaactagaatgaatcggacctaaaccatcgcatctcaggcacagaccgagcaaatcgcatcaaccacacaagctagttctaaccgcacagaagagggtaggcacgtaccgtagctggctagggtttgctcgtccttcaagatccggcccttgtagatcagccgctgctgcggcgccggcacgtcgcagctctcggcgacgatcgccttgaacgccccgacgctgagccccaggtcggcccgcaccgcgagcttggagccgttggtgcaccggatgtgcagcgtcgcggccgccgccgcggcggctgcctcttccccgtccccgccgctcataaccctagctctcgatccgacgcggggctgcgccttcccgatccttcgacgcgtgcggtgcgagtgcgatgcgggcgagaggagtgtggcgtgtgttcccctcccccctcctcttcccgtgtcgcgtgtcgcgtctcgtctgcacgggcttgtgggagggaggagaacgaggagggggggaagaggaggcggcggaataactttgggcggagagattaacggcggaaataagtgcgcgacagagatggaaggctgtgattcctttgcgtcggtgggggcccacggcgagtcggcgaggcgagggaagggaggtggggtgggcccccacgtggaccggactgtaatatagtcgtgggtggatagaaggttctagcaccgtcacagtttatcttacgcgaccgccacgcgaaggcgtatttgagcataatacgtattctgctgtcgaatgtgtatagggtcctgtttgtgggagtccgaatattctgagaagcagccggtgagaagatagctggtgagaatctgaaaaagttagaaaacccagcttaatattttaagaaacaactgatgagccccacatgttagcttcctcctctctcctcctagctttcttcatcctctctccctgcgtctgtcgagcagcgggccacacatggcaaaaagcacccgatttataagttaagagacgcgttatatctgtattggtattacggtttaagaacactatgtgattccccgcgctttgctgcgataattacaaagcaattatcaatatatttttttcgacaatcaaactaggagtaaaaatgaagcatcaggttttatcaatgataatcatgaaacaaacaaatgatattgcgccttaatgtgaaacatattataagtatatattagatcttataaaaatggtagatggatttgttaaaatattgtgcaaatggtgtgagggtgatgattggaaatgcttacacattgatttgtagaaataaataaattgtagatgatgttgtatacctgtatgaggcttaatatgtaattattgctattgggtgatcatgtggtatgattgcatgttgagctttagacttagtggactataactttatagaaagtatacatactctaaagggacaattgcttatttgaccctattttaaaaccaaactaccagattgaccatactttttcatgtttgctcatttgaccccacttttcaaaatcgaagccaccgtttgaccctgttttcactagcccgttagggtttcagttaacaaaaagaaaaaataaatttactaacatgaatggaccaaaatgaccttgattacttgtcccaagttgcaaatcccttcatcccatcatcccacgtctcagtggcgtactggcgtggctggccggggcgtgattcgtgaagggaggaagaggaggagcggtgtcggcgagcaaagggagggacggcggtcggcctgggcgcgcggaggaaggggcggcatcgtggtgcgcggaggagcagcggcgctggctgtggcagcgcagagggagggccgcaccggcgcgcggtggagcagcgacgccgggtgcggccatgtggagggagggaggggcgtcggcgctagcacgcgaaggagaagcggctgccggcgccggctgctgccgcgcggagggagggagggaggggcatcgttggtgctggtgcacgtagaagcagcggtgcccgctgccgcgtggtgtgagcgaggcgccggtggcacccgtgcggagggagggaggggcgtctgcacgggcgcgtggaggagaagcggcggctgctgctgccgtgcggagcgagggagggagggacgacgtcggcgccgactggtggaggagaggtgatggatgttgctgccgcggagggaggaaggagcaacggcgccgactactgttggatatgtatttggatctgaaattttctgttcgacaatacgcttgaaatttttgtaaaaaaaatgtcaaattgaatcaaacgtttcaaattgaagacaattctgttaaacttgtttcaaatttgtcaagctatgccaaatttactacaaatatttgaaaaggtccaaatgaataaaaaaaagctttgatataatatggttaaatgagcaagggcaaaaatgacaatttgcttctgagttaacaccgttattgggccttcacggaatagggtcagctgtgatcttcggttttgaaaaacagggtcaaacgagcaaacaaaaaagtaagatcaatttagtagtgggcttcacaataggagaatcctctcacctgtccttctcacgatttgtgtccaaggccaacagggacagagtatgcatgggcttcagtaattgggctttgccccttttgccatctaatagtctcggcccatcaaaacaatatagtaccttactggtcctctaagaaggaaaaaaaaacatcataagtcagcaagaaatctttatacccaaatggctagttggatgaaagggtatatataactcattgcaaatcagaaatccagtaaatatctcatggttatcaaatcccatggcagttcgctatgttacatgtaatcaaattactgatgaagtattttcaacccaagtaaccatggcgacagtttcaaactttcagttcacctaagctcaaaagttcaaggggcagtacgactcaacattggtacagtacgcggagactaacaagccaaagtgaataatataaggttacaattatctggtagtactatctacgcactagactcagttctactacaaaaagacgtcaaggcaggcacttgggcaataacatcattctccagcatccacgtgagtttagctgcggtaaaagttcgcctgcattgtatggtggccaactgaccatcctgcacgcccaagcacttcgatgcgctgagcgcgttgattatggaatcatggaatggagagatcctggctaatttttgttgagtgactacggcttagccatcacgatttactggaaaataatgtggacagtgaaggacggcttccgtcagcaagatcatcttcactagcctccatattgagctgatcatactcagtggatacacgtggtaactcctcgctcatagtgtccatgattacttgcccaagaacaaaccggacctcaccagggtgcccatccttcagtaacttataatcaatttcctgcatccctcttgtcccttcatatgaagttaagtcagtatcaaggccctcaaatattctcaacactctctccctctctctgctagatacaagcacctgataacaaacccagtaacaaaattttagtacgctttgtatgtataatgtaaaaattcatttaggaacaaatatggggccaattaaacaatggttcatgcatcgttagaacagttcctactacacaatattagaactccattaggtggctctgaacaatgattgatcagtcaatatttgcatgcttacttgcagaagagcccaagcaacattcaatgattcaactatggatttcataccaggaattaatatgacaattgggagttgagacgtatgctaaagaaatacttaccagtcctgaaacttgtgaagcctttgagtatttggccagtgattgttggagagcatctatagatgtcaacgtatcaactgacgacttgactagtgatgctaaatgtgatgtttgttccatgagattctccagtttgctccgagaaggccctagtgtttctggaataaacggggctggtgctccaatgtcttgattcaagaagttgactgcgccctcccatgatccaaaatacattagtgcagcaaaagccctgattacctgggcatcatgtggagaatttaccaatgcactgtgaaatgtcaacagtgctaacctgtggaataacatgaaatgccatagacgtgacttgctcaaaatatacaagaattgtattagacacaaaatgggaacattcaactgcaaattgacagtggtatataatactagtgtagaaaaaaaaggtaacactctaaaaaaaaaagcaatgtgtgtgtcagtgtgcataggtgcgtgcgcaagtgtgtgagaaattccagggtggcatacatagataataagataatccactttgtccttcgggctaggactcacacaagttatccagtatactactggacactcaaaatttcacagaaatccatgcatatcttctagtgatgaaaactggaaagtcagaaccgctagactcacagtgcacatcagtgtgtccctaagactgcaaagaaaggaatattaacttcactatacatctctatcactctggtcagtgcaaatctttaatcagctacacttctggtttttgaattttgatgattgtagtctagtactatgcatctcctgcaaagtgtatatgtaggaccagccaatacaaaaaagaacactaaggcctcgttcggtttagaggggattgaagagtattggaggagattgagggggaataattccacaccacaataggtgtggaataaatcccctccgatccctccttcacagggattaaccgaacaaagactaaatgattttcacacccctttatataatgaaggtaaatgcgcacaggcattcatttaaagtttcttaccacaaacaggaggggcatggctgatcagcagagagtaatttatcaagattagccagtagtttctgcacatgtgaatgcacatcattatacagcatatataaacacataacgagccctagtcttaaaacttaaatattacacttctaagtcactgactaaagaaaaggaaaccaggaagacactacttacatagttacattaaggcaactaacaagaagtgactgtcaagagctgatgaacagtaacaaaactatagaactatgcagccaatacttcatgttcatggatattgatgcgtaacaacactagttagctaacactagccaacacatgtgcgtggtttaaattatttcaccttttattatgaagcaaaaaaaaatcatatagtatgacacatttccagagttactcaccatgagcattaaatctgtgtcatttgatttatccttcatctgatccgacatatatgctgcctaaaatgaaaatatcattacatatgcaagtaagataaagatggaagtggtcagtaccacaagcatgactctacttacgcaatggcatgatcgcattgctcaacctacctggaaaggcagcaaaaaatcgagaagtccatattttctaagtaacctaagagaagaagctgctgccccataagacaataaataattcaattccatcattaatcttgcctacacagtaatgaggtcaaaagcattagaaaaaaaagaaacaatggtacattttgccatcagtgcatgctctaattgtcaaaatgccacagggtttttgcccaattgctcttatctcattggattcaagtgtgacgcaaaaatgctagttagaggctaaaaattgtccaaattcccttcatctctattttctttctcctctctagctttcatttttcataggtgattgcaagtcacctatgattgtgcataaaggaagagaaataacttgtttttttaatatgctatcaagaagccatttcggtcatagagacagtcaaaaaccattgacttaacagtgtactggcattttgacaactctgaaagaaaagtagtgacatttgagcaattacagaaaaagtgatggcaggttgacagatagtgcaagccctagtggcaattatgcaataaatacatatagttccatggtgggatacaacaaaccttgtcaatatctgttatggacaaagaaagttcccgtattgcagcagaagtttcactggagaactcaaaaccaaggcgagcagcaattctcaagccacgcaaaatcctggctgaaataaaccagaatctaaattttctgtggatagattaaagaaatgaggaatattctttgaatacctaccagggtcttccttgaatgaaacacgggcaggaatcactgtagacacctgttatccactcaaggagttagccaaagggggaaaaaaacaaggatatttctggatatctgcatggattgagatgaaccaagctaattgttaccttgtttttgctaatatcccttactccattcacataatcataaatcttaaagttaaatggattaaagaataagctgccatgaaaggattacaacaatgttagtaattacctccagcaatgtttcaaaaagaagtcaacaacatctgttaaacatttcaggcacaagattttattcagaagattacctgtttattgtaaagtctcttttcatagaattctgccagagaagaatatccccctcatcataacgtttaaactcctctgaacatcctatatttttacttcctttcacatgatttgcattcgtgctaaagctagaaacctgttagaacaaaagaaatcccaagaaataagcatttggcaaagttgctgcaaagacaattgttcataatgtggattttcctatgaataacacacctcaatttttgtgccatacatattaacctggcatattggaaagcgtttgccaataattatacatcgttggaaaaccattttcttaatctgaaaaaaaaaagcaacgtctgtcaacttagcttttttttttcttttgcttttatccagaaaatgaacacttatgacaaattaatgcaccaaaacctgctggaggcttgcggtagtaatcacatcaaaatctttaggtgcccttttcagtagcaaatctctcacgcatcccccaacaagataagctgcaaaccctgcagtacaactttaatagagtaagcatacataaacacatccctatacatatttaaaagtgagaacaccacaaaatgttccatatgtgtactcttccgacaagttcaagcagcatattcatgcttcccaaaggatctatagttaacatgaaggaagctgagaaattgagttccaaaaccatctcacgttacaattttgaactattgcttgccttcacctcaaacatgtttccgattagtggggatgctttaatggatgggcatggcatctgcactatggcacattaagatagaagttcatgcattgccgggacaagtgtaataagattaccttcttttttttttgcctttggataatattacaatagctcacttggtgtaatgcaacaaaaaggaaacaaccactaatatattgcataatttcattcgtagtaatacatgttttaccgtacaggagcaaacggtggcatgagtatggaatatcaatgcacaaaaactcagaaatataaataagtgttcaagagatttattacccaccttttcgttttagcatgtgtaggacagtccaggcatggcgaggtatatcccctctagtaataccaacaaccctcgagtcaaaatatctccatgaagaagaatcaacaaatcctgcacaaacacaaatcctatttttaggtttcccgctgtgtaaccagtagttagctaaggtctgcctgcattattccactaaaagcagagatttgatcaaaatactaaacaagtaaacaactatgcagttcccgtgtaccaacaaagaaagtacgccatttccagctaaacgtaaacaagctaccgtgcagcacaatcaatagcatttgctcatttgctgaaagggcgaattgcacagatgtgatttactgatctacacgtgtgagcatcaaccatctgctctccgggggccatcacgagtgatcaaaacatcacctggtcttctattagaagaggaaccgccgttgcgtgggcccatgtcgccgccgccgccttccttcttcgagctgtacgccagcgtctggaagcaacagaacgaagcacagtaagacgagagggattccagcccaagcgcgtcgcccgcaaggcgctcgacgaaatgccccggtagcaggaccgcgagagactaacctgcagaccggaggccgcggagccgaggcggtggaggaggcggcgagcaggcgggggcgatgggtcagcgcgccgtcgtggcgtcgtcatcactcgcccgcggccgccggctaggtgagtgcgagcaggttgcgcctccgggccggtaggttagacgtgtgctactgggctggacgcagagccgcatctgggacgtcggctcatgggcccagagagtcaaggctgcgcgcatatcttatgcacatggaataagttcattttatatccttcaccttgacgcgaggaaagcctccgagctcgaggcgacatctcacctcctcggccgccggccatggcgacaatctccgcgactctctccatctccttcctcccttcatcaattcgcttcgccgtcgccaccacctccacctccactacctcctcctcctcctcctggcgtatcaaggtaaactccccccaacccaaccgctgcttgcaagagcctcctcggcggctctgactctccgtggtttgtgtagcgacccgcgcggttcagatgctgcgcggagccctcttcaccggagcaggagaacccctcgactccggccccgccaccagtgaagcctcctgcgtcgccgtcgtccctgtggggcatttccacgagcacctggtctgcgggtgtcgccgggctggggtttctggagaccgcctacctcagttatatcaagctcacgggctccgaggcgttctgcccggttagcggcgggggctgcggcgacgtgctccaaagcgactactctgtcgtcttcggtaatctcttagcgcttttgccgattacttcctgctaaatgtccgttgaaactgtggaaattctgaataactatactttctccaatgtaaggatcgaagtgtgtactgaaagccaagtataagtaccaatttcatctgaaatagtggctgatgatagtgtttctcagatattcattattatatggctaattatctatccttctattgatatatctatgatggtgttttgactaaacttgatgtttcccgtttgttaccttgatgaaagcaaactggtgatgtgctctgtagttttaacagttggtctctctctaatttgacagggattcctcttccactacttggtctggtggcatatggtttggttttaacgctctctcttcaagaaaatgggaagaagttcctccctggaattgatgatctggatattcgtttaacattacttctgatctctacttcaatggccactgcaagttcttatttcctatatattctaaacactagatttattgggacgtcttgttcatactgcttgttgtctgcatttctctccttcactttattttccatcagagttaaggtgagcgcttagtttccctttatttttcattgagacatttagtaattaagtaacctactcaactactaatgtttattgtattaatgcaggacctcggtttggaacgtgtccagaagtttgttggtcttcaattatcagtagcaattattgttgctcttgctctgacaaattcctacagttcagctacaacacagttaaacgggtgaggctcttgaaaatttgtggtgccaaatgtatttgtttctctgaaattggttaggtcttaagcgtcaaataatgaaatgcctgactaagtatatggcatcctcatttattacatttcgactatgtgttttctgttaaacctttttattttttttcttttattatggcattttgtttcatatgttggataagtctttgtggtccttggtcgtgattcttctttttgcttttgggtagtttcacctttttcaggacagcatctaccctttagcatatttttcagttgctaggacagctgcggttagtaggacagcagcagttagcatttcctttatgcctcctttatgctttattcagtttggatgccctctaggacagcatcccattcaaatttcgaattttagactaggagggtgcagcaataggctagcagccagctatggctatatatatgtatccaacttccctcgggtaggcatggcttttgtgtttagtgaatgaagaaaaccagaaaattgccccatctcgagtgccatcctcttctcaatgagagtaaccattgaaattctaacatctggtatcagagccacactttcctgtaggctaaacatctcttgttccaccccttcccaagctcggttgagctctcagccagcagcagcagcagcaccggttgctcctccttcccctttcccttccccctctccacgcagcagccccccggaggtgcgccatgtccgacgctcggtctcggcgttcggtcgcctcgagcactcagcgtcagcaggacgccgagctcgccgcagcagaagagcgcaggcgagcaacggctcagaccgctgcagcagcagcagcgagggcggccagactggcggcagcggagttggcagcagccagggcggaggcggaggcggaggcggcggaagatgcggcacgtgcggcggaggtagaggttgagaccttgcgcaacagcatcaacggctccatcgccggcgacatcaccgccgacagggagcttgaggagctggcaagaggaagggcacgggagcgagcagagcggtgggcagcagcccacctccacggcggcggcggcggcccaagggaccgcgcgcccgccaacgggaacccagacgggcgcgggcgtgccggcggtagcccggagcccgcacgcggccctcgcaggcagcacggctctctctcccctgaccagcgccatggtcaccacggcgtccagacggtggtcagggactttggtcccggcggtgggtggcctaccctcaccaaaaccaactacatcgagtgggccgcggtgatgagggtgaggctccaggtgcggcacatgtgggaggcagtccggtacggtgacgtcgactacgacgaggatcggagggcactggatgcccttatcgctgcagtcccgcccgagatgcagttctcgctttcccagaagcggactgccaaggaggcctgggacgccatcgctgcggcacgcatcggcagcgaccgcgcccgcaagtccacactgcaggcactccgcaaggagtgggagaacctggccttcaagccaggtgaggatgttgatgactttgctctccgtctcaacactctcttgcagaaaatggtgcagtacggcgacgacacttacgacgaggagagagctgtcgagaagctcttccgctgcgtccctgagaagtacaggcagatcgctcgctcgatcgaatctctgctggacctctccacgatgtcgatcgaggaggcgttaggtcgcctcaaggtcgtcgatggtgatgagccacagcctctctcggggcccatcaccatcggcgggaagctccatctcactcgggagcagtgggaggcctctcagggtgacgggaggaagggggagtcatcttccccgacaggcggccgtaagccgcgcaaggcgcggggaggtgtctagctacggtgggcgcgaagacgtgccgagggtggtgcccgcagaggcgcccagggcgttgccaccggcaaccacaagccggcacgagacgacgcctgccgcaactgtggcaagcttggccattgggccaaagactgtcgacagccacgacgtggctaggcccacgtcgcacgggtggaggaagagccggctctgctcctggctcacgcaagcatcgagctacctccagcggcaccggccgcagcggctttcctccaccttgatgagccgaaggtactcgtctccctctgcaacggctccagcaacgacaaggctgatgggtggtacctcgacaccggcgccacccatcacatgatcggccgacgggagttcttcaccgagttcgactctagcgtccgaggctccgtcaagttcggggacgcctccggcgtggagatcaagggtgttggctccgtcaccttcaccgccaagtccggtgagcacaggctgctcaccggagtctactacatccccgcgttgaggaattctatcatcagcgtgggacagctggatgagaacggctcacgcgtgttggtcgaggacggactcatgaggatttgggatcgccgtcgtcgccttcttgccaaggtaaccagaggcactaatcgactctacatcctcagcgcgcaggtcgcacaaccagtttgcctcgccgctcgtcgggacgacgaggcgtggcagtggcacgagcgcttcgggcacctccacttcgaggccctgaagcagctcagtgccaaggagatggtgcgagacatgccgtgccttgaccacgtggagcagctctgcgacgtctgcgtggtgacgaagcagcggcggctcccctttccccagcagacgagcttccgagccaaggagcggctcgagctcgtgcacggggacttgtgtggcccagtgacaccagccataccaggaggacgacgttacttcctgctgctcgtcgacgacctctcccgctacatgtgggtgatggtcctcagcagcaagggagaggctgcggacgccatcaggcatgcgcaggctgctgcagaggcggagtgtggccgcaagctgcgcgtgctgcgcaccgacaacggcggcgaattcacagcggctgaattcgcgtcgtactgcgctgatgagggcattcagcgccactacaccacgccgtacagcccgcagcagaacggtgtcgtcgagcgccgcaaccagacggttgtggggatggctcgggccctcctcaagcagagggggatgccggccatcttctggggggaggcggtggtgacggccgcctacatcctcaaccgctcgcctaccaaggccctcgatggcagaacaccgtacgaggcttggcatgggcgcaagccggcggtctcccacctgcgggtcttcggctgcctcgcgttcgccaaggatcttggccacatcggcaagctcgacgacaggagcaccccaggggtgttcatcggctacgcggagggctcgaaggcctaccgcatcctcgacccggagacacagcgtgtgcgcactgcgcgcgacgttgtgttcgacgaagggcgagggtgggtatgggacaaggcggtggacgatggttcgactccgacatacgacgacttcaccgttgagtacgtccacttcgagggagctgggggagtaggcagctcttcttcacctagcgtgtctaccccagcccccgaatctccaccgactccgacaccaacacaccctcgggccacgacttcgactacgacgagctcttcgtcgacaccaccccagccagtgactccacatgctccagcaccaacagccactcctccaagcacgtctactccgacgccagctcgtgttgagcgcagcccggtggagttcgctactccgctctcccacgacggggagcgcatcgacgcgtaccacgacggcgagcagctacggtactgtacgatggaggatcttctcggcgaccagccggtgccgggactggtgcctcgcgacctagaggcacagttgcaccttgcgtgcgacgacggtgagcctcggtcttttgcagaggccgagaaacacgtggcatggcgtgccgcgatgcagtcggagatggacgcggttcaggagaaccgcacctgggagcttgctgacctccctcgtggtcaccgcgcgatcacccttaagtgggtgttcaagctgaagagggatgaagccggagccatcgtcaagcacaaggcttgcttggtggcacgcggtttcgtgcagcaggaggggatcgactacgacgatgccttcgctcccgtggcacggatggagtccgtgcgactccttcttgcgctggctgctcaggaaggctggggcgtccatcacatggacgtcaagtcagcgtttctaaacggcgacttgaaggaggaggtctacgtgcaccagccgccgggatttgtgatccccggcaaggagggcaaggtgctacgcctgcacaaggccctctacggcttgcggcaggcaccgagggcgtggaatgccaagttggattccacgctcaaggggatgggcttcgagcaaagcccgcacgaggcggccatctaccggcggggcaatggaggaaatgccttgctggtgggtgtctacgtcgacgacttggtgatcaccggcaccaaggatgtggaggtcgcagcgttcaaggaggagatgaaggccaccttccagatgagtgatctggggcctctctccttctacctggggctcgaagtgcaccaggacaactccgggatcacgcttcgacagaccgcctacgccaagcgtgtcgttgagctggctgggctcaccgattgcaacccagctctcactccgatggaggagagactgaagctgagccgcgacagcacggcggaggaggtggatgctacacagtaccgacgtcttgtggggagccttcgctacctcacccacacacggccggacttggccttctccgtcggctacgtcagtcggttcatgtagcgaccgacgacggagcaccagcaggctgtgaagaggatcatccgctacgttgcggggactctcgaccacggtctctactacccgaggtgtcctggcaaggcacacttcgtcgggtacagcgacagcgaccatgccggcgacatcgacaccagcaagagcacgagcgggattctcttcttcctcggcaagtgcctcgttagctggcagtcggtcaagcagcaggtggtggccctgtccagctgcgaggccgagtacatggcggcctccgccgcttcgacccaggcgctctggcttgctcgactgcttagtgatctcctcggcagagacactggaacggtggagctcagggtggatagcaagtccgctctggccctggcaaagaaccccgtttttcacgaacggagcaagcacatccgggtgaggtaccacttcatccgaagctacttggaggaagggagcatcaaggcgagctacatcaacaccaaggaccagcttgcggacttgctcaccaagcctcttgggaggatcaagttcctcgagctctgctccaggatcgggatggcccaacttccccgcaagacgacgcacaagacttagggggagaatgttggataagtctttgtggtccttggtcgtgattcttctttttgcttttgggtagtttcacctttttcaggacagcatctaccctttagcatatttttcagttgctaggacagttgcggttagtaggacagcagcagttagcatctcctttatgcctcctttatgctttattcagtttggatgccctctaggacagcatcccattcaaatttcgaattttagactaggagggtgcagcaataggctagcagccagctatggctatatatatgtatccaacctccctcgggtaggcatggcttttgtgtttagtgaatgaagaaaatcagaaaattgccccatctcgagtgccatcctcttctcagtgagagtaaccattgaaattctaacatcatattccatcataaattcttgtttggagcagctgttttggtcttgacaattaaaacgcatgttaagaaaaacaccgctctttctattacaatattttgttgtgggatttccctgattaataccatatgaacttttatcttacatattgcattgtcttcatcgccaaaagtgagtgactttcagttttctttttctatatatgcagcacagatgattttgttttagaacgatatgatacagagataacaaccgaatcaaccccatttgctattgcacttgcaaaacatttgcactctgttggcgctaagatgtatggagcattctggtgttctcattgtaacgaacaaaaacaggtacaacacaagctcttgaatccactgtacagaataccggatgattttctgtagcttcttacatgctctactctaatgcttctgtaaatatgctgatgctatgattttttatttcgtttttttatttgtgtgcacaactaaatctccaaactggaagtagaaaagtttttacttaccttatcatgtggtcatgcagatttttggtcgagaagctacaaaaattctggactatgttgaatgttttcctaatggagctggcaagggaaagaaaatggctcctgaatgtgcagctgctggtatagaaggttttccgacatggattatcaacggcaaggtacttaccatatctttgatgtttgtaagcaagctcatgattgtgatggcattgttttattgagcctattatccagaaatataatgccattgtatttcttcttgccgtactgaaaatctatatactcccctatactttgattagaagcacttctagcatcctgaactctgaaattgcacaccaacccttctgaactttataatactgttcagatactggcacattgcaaactttagatggcacgctaaactttaggtactgttcatgcaatcgacagttgcgttgctgtatcttcatggtctcctaagactgctgactgcttatcagcattcgctctttcttgacaaattgattgaccttcatgcaggttttgggtggcgaccaggaacttccaatccttgctgaagaatctggtttcactgttgagggaaccgagcaatcataaggtcagacacgagagcaagtttcattcaattgaaggcgagtgttttatggttttagtgaagaactcaggttgtgaaggctgactacaacaattccgcatgacataccgtcacaccgagggaaggttttcgttccacggttgcatagcctacctaatacagcccctaaccactgtaataatcagtaaaagctgctcttctctcatacggagattgggagatgatagaagaagcccaaatgagaggtgttgtataatcattttgtagtatgtagattgtgatgtaaaatgtaaaagggcgcattgcttctcttcctaggtacataatgtaatgtataataccttgcaatgtgatatttgtacagaaaagtgtattgttcagtcttttaccctcggataaaggcagttaatgagtagccagttgacgagaatctaaagaagtgtttattttgatggagtaatttgaatttagcgctgaagattttaagagatgctatagctgtcagaaccgataagcagttttgaaagaagctgatgaatctaactaggaagaagttgtgcttgttagaagctcgttaaagagaaccgagtgtgtgaaagaaccgaatgaagcagaatgcttcgtcctaaattagatggctcccatcggtgatatgggctcgggggtatcaggtttagagggaggaggctgccccccaatgaacatctcgcacagatgcgcgaagatggctagcgtcatcacggcgttgggtgcgagatgcaaggcatggatttcatagcaatccaaaacctcatggaagaatccgaagaatggcggaatcaaccccgccatagcgaaggacaagaggtgcacggatcgctccggataccgtggccgcagccgcgactcccccgccctcacgacggcgccttccgacataatcttgcgggggaggctaaggtgcctatccgtcgtaatgcgtgatgccgggagcactgtgtcgccagcatcttgagccatgatggccggcagagaagcggcggagggcttggcgcgcggaatagtgtgaagtggcgagaatgttagggcttaaggagcgagaagacgagtgggcggatggcgaaaggaaggaggcaaagtccctacctctgtatccttttatcttcgcctcacccgcgctcacctcctcgtttcacgcccccacgattgcccccacgattctcgcgcccgcggttgtctcttcgtttctcgcgtccactcatcacgtcgcccatggaatccgcgccctgcctttagtgcgcctatcagcggcacactcggagtagggcgcgcaacagtcatgggcacatcctgagcgaaccgtcaccactaccgccacaggagtagcaggcgagggaatcgatgcgtggtctgaccgaccccctaattttcgcgccttaagcatcctcatcattagcgcggtcagtggcggccaaaccgctgccgtggttggcacgccaacttggccactcggtaatatttccttggattccctgccgggcccacaactccagcttgagaagtcgtgaggcaccacgtcagaccgacctcaggaggccaatgtctgatatggtgctgggggctactgtcggagatatgggcccgggggtatgcgaagtgaggggaagttaccttcccatccagccgcgtggctctacagcctagccccactcccgcacctcgcgaagtcacggaagcggccgggggggggggggggactttcgagcgaacgggcacttgggtctcacaaccccaagcacttgtgttctacactcaatcaatcaagcacaggagtagggtattacgcttcttagcggcccgaacctgtataaaccccttttgtctcatcgtctttgggggattgaaccccctcaagatcacacagcttcgctcaccgaatcctcgaatctcacccgctgcccccggccgaactcacaaaggggggcctcacggttccctggtggaggagttcattccccgacaggcttattagacgataaaaattaatttataagtaaaacttttatagatttgttcgtaacgacttaaaagccaacattaaccaaaaaaattgcgttaaaagcatctcaaaatcaacttcaaaatcaagttcaaaaattcaaattttagcttattctttagctgtttaggccaaacgatggggcttgatgtcgtttaattttttttcttgcaatgtttgaccatttgttttatttaaaaaattagtgtaaatataaaaaagataaatcatgcttaaattttttataacaaaacaagtaacaaacaaaataaatgataattttatattttttaaataagataaatagttaaacgtaacgaaccaaaactatgattagtttttttttaacgtagggagtaatgtttccgtatcaatatgtcacaacgcattacacgtgtcaataaatcggtggtccgatgcatctataggtggaagggttacgtttaagacgaatccagaagcatccgcgccgcgacgcgaaccccatcgcagccagttcacacgtctgtctcgtctcctcgtcgcgccgcgccgcgccgccccgctccgcccgccgcaatgccgaagaagatgggagtcaacaccaaggcggaggcggcgcgcgagcgacgaagcgccgccgaggcggatcgccgcgaccgcgacgctcgcgccaaggaggaggcctactggcaggcggccgagggccccaagtcgcgctccgcgcgccgccgcgaggaggacgccgagaagcgcgccgaggcggccgcacgccgcgcggagaaccgccgcctcgccgagctcgagcagcagcagctcgccgccgccgcgcggcgccccgaccgcaaggccgcacgcgtcggcggccccgtcgtccccaaggtcaccgaggccgagctgctgcgacgccgggaggaggagcggatccgcctcgagcgcgaggctgaggccgccaagaagcgacaggcccgcaccgccgaagaggaggagtacgagcgcgtcgtgctcgtcgccaacaccaacagagacgactccatcatcgaggcacggtcagtggaggacgccatcgtcaagatgtccatcgctgccgagcctgcgctaccaccggatcgccaccccgagcgccgcctcaaggtctcgtacaaggtatggcactaacctatctgtgtgttttttttctttccatggcaactgtaaaatcctccttgtatttgtagtactcggggagaaattaatactgactatagtaaatattcttagaatcattgagatgtgactgcaattattgctggattcatggttcataggcagcagttgatgtacataaacacagttttacaaaggctgaaattctgtcctagttttagttggtgctatagtgagtttgagaccaattggcaatcactggcttgatctaaccaactggatttcttagtgtgttctatctagtaccctttttttttgtgctcttctgatcagcatatcctatcttaatgcaggcttttgaagaagcagagctagccaaactcaaggaggaaaagcctgggctgactctgcatcagtacaaagatatgatatggaagttgtggaagaaatctccagacaaccctctcaatcaggttcaaccttaaattcaaccttacttcgttagatcatattaagcaccttgttcttaagataaactgaaggtcttaaaacctgttttacgatgatctaagaagcaccccaaaactactaagtttgtagtgaaatgattgtgagttaatgatcacctcagtttgcatgaaggtgatgtatgtagtgctaagtgatgtggaaggtgctaaggagcctcttgaattttgccatcctaatcatatgaactgataaagaattcaacattcatcattggatgtacctctatggccttccttttcaaatatcgcaaatgcctattgattccttgaaggcttatagctttatgtgacattaaaattcacttcacttccagagctgagaaaattataacgcagctctaagggaattccatcagttgtgctcttagcgcacttgactgtctataacatcaaccttaattttgcaggctgctgattgatttcatgattaccttaccacattggagccaacaacctggcatctttcttttggttctttatgaacacaaggccacctgtaaagtatttacttttagagtcaaatctccttttgtttctgcatcattggtgcaatttagcaaatgtgagatctgtacaccggaagagtacaatgtaacatgctaagagtgttttttgataaagatatttgatctattatttattcattgaaggaataaacatatacttttatgtatgctaagagctgttcctttctattatcctgatatttggagccatcagactgctagatatgttcatgtggtcgtgcaaggtattggcactctgtcagactgcaatattgtgcctgaatcttatgcatcctgttgtgcagtctagctagagtcgttggcttcagaatgtcttccaattggatcggctgccttgatacgaggcaagcatttcttcttctaatcttgagagagtactgaattttgccatcctaatcatacttaactgatgaaggatccatatgcatcaccattttctgaaactcttcacattctcaaattgcaatctgaggttaaagttctgctcaactcaaaaattatcaaagcgctaatgatacattttgcagcagcacaaacattttatcccgttctgttaaacacagcaaaaccaggaagaatcgaacaccctccgtcgacggcgacacgctgtcacccggcgaccggcggcggcggcggagcatcaccgccagcagccaccccagattgccgctgctcgaactcctggaggagttcggcgtcgacgttctccgcgggctcccacgtcgcctcctcgatgtccacccacttgacaaggtactcccatttcccctccccttccgccgcctccctcttgttgacgacggcctccgcgacggcgtactccagcccggcgtcgaagtccttcaccaggtcctccgccacccacgccgccctcacccactccctgtcgccgccgtcgcgccactccaccaagtactcccgccacttgccctcgccgcggccgtccaccaccttctccacttcgccccactcgtacacggccttctccagctccttcgccgccgcctccagcgccagccgccgctcgaacgtcgccgggttgcccttgggcgtcttcgcgagcacgtcctggaccagctccagcggcgtccggccctgcccgtcgggggcctccggctcggcgcccagctccagcagcgcgcgcacggccgccgggcgcccgtacccgaccgcgatgtgcagcggcgtgagcccgccgccggcgcgctcgggtcgccccacgtcggccccggcctcggcgagcgcgcgcacgcactcctcggatccaagccccgcggcgaagtgcatcgccgtgcgcccctgcgcatcctccgcgtcggggtcacgccgcagcgtctcgtccgcgagtagcgcagtgatctccgccgcgtccgccttcttggcggccgtccaccacggcgtctcgtactccgccaccacgtccgccgctatggcctccgccgggatccacgaaggctcgtgcccgtccttccactcgacgaggtactccgtggcggtgaccgtggtggccgagccgtcctccgcgaacaccggattcttgatggtgcggctggacacaatacggtccacctcgccgtacgcctcatcgtcgtcgcctcccttgctcgctgggtttcttgggttggtctggtcctggaacaccgccgcggcggtgagccgccggttggggagacgaagccggaaagggacggtgatggagagggctggagttctctgagcattggggttggggggtttgaggcgggaaagggatgggtgtcgtaggacagcctccattggagtgggaggagcttgtggcgcgagtggcagtggagtggagggaagaggatgatgggtttggattcgggagggagaagaggataaggtgatgggtctcttggattgtgtgcgatctgagccactcgttttgtggcatggacggtacagatggagtagtgctattcacatccgccaaacggtcgatgatgcccatttcccaccggagatcggggttcgggtccccgttgccgcgcgcggaaactagctactgtagcatttagatttgcagctataccgagagccaactacttaaaaaaaaattatgacaattgaattagaatgtgacacatcctctatatctaaattcgatattctagtactatgttatcttttttttaaacggaagtaagtacatattaataattagatgattaaatttgtataaatatgttaacatgtacaatcaaaagtgtactccttattggcagttgtgcgtttggttttatgcatgctagctcatctttcttaacccaaatttcctctctccgtttcttgctagaccagatcacaacaccctgttttagtttaaaatcgattgacaacataaacaaaaactagaagttaagcttgtgcagctaggcggtgcttgattcatggcagagcaaaatctatggtgggtcacgtccagaaacacaaagaagaagctccatccatgcatcgactggacttgattccggtcaaggagatcgatctggcggcgaaggcgctggttcgcatgacgagctggatccgcctaatccgatttgtagctctctccctctcttgaaggggaagttttccgatgctgaccagcatgccggcaagaaaccaaacatgccggatttgacacagaggccgtcaagcaagttatgtggcagtgtggcacagggggagctagagttttgccgtggggactgagcgaaaaaaagggcaaccaacgtgatggcaataatttagcaagcatcggcaaaagagattgagaggagtgagataaatggggattgttggaacgacatgtgctgatcttgatcttgacggtgtttgttggcactgcctcgtagacctgctttttcatctccaggcaatgagtagacctcgtctaaaaatctccctcctctttctctaattgggtagttagatccacacattttcttcttaagagcaaatttaatagtttttttagggacatgcagagagctcctacaatttcactatagaagaagatagttgatataagaaaaatcagacccaaaaactttacaacagcacggttaattttagaaaaaccggcgaaaacccggcattgacaaactgaacgcaaataagagtagtccaacaagagaagaaactcctaaaacgaagccttcaagaaggtaacgccgacaagacggcgacaacgtccgatcctaacgaatctaaggttttcactcggagaattcccttgaagtggagttgaaacaagggctttaaaagcaacgccttcaagaaggtgaatggcacccgagggcgtcgccgttgctagcaccggagcagagcaaggttttcacctcggagaccctgtcaaccaaagcatccacaacggaagctcccaaatgccacttgcacaccgaaaggtacctacaatattcacaccacctgcacgacgaccggactccacaccacccgaccccgactgtggatgcgctagatctggacctaggagcccgatccggccgtcttccttgcaccaccatcgccagccgacgccacaaggtagcatcgggcaatggaggccgtcggcgctgcacaatcctttcaccgccggacgccgcgccgtcaccggatccacgaacaaatgccaccgccaccaccgtccccgccgccatcgggtactaccgtctggagaagcgcgcccctaccatcgctgaaacgccacaccgttgccggatccgcggaactctaccaccgcagtcgcaatctttgccaccgacgctgttcctgtccccgctagatctgggcggagcggcgctgatctggcggtttttcgccaccgcctccctaggtgactccccaagtcacccaagcacgtgagagatgaggggccccgcggcgaggcggaagagggaggtgagggagaaggggcggccggggcgtcgcctcccgcgccgcccctgggggaggacgatgtgagaggaggagggcttccgtgtctgtgtctatggtgcgtcacaagtttttcagcaagtttaatagtagagctcactaatagctattagcatattttaaagccaacataaataatatattagctataagattggtttcaatttttccctcctctccctttttctcactcatatatttaatgtatttgtatttgagcacgtgttaaattagctcttacatgagagttaacacattttattttttgtcacatctttccttcacataagctcactattatccttgctccaaaataccgtgtgttctatactacgtacgcctaacaaccttgtgaggccacttcttttctctatggcggcatctgaatctatgtggatgctagggcagaggctagagccacgcaccctaaatgtcccaaggaaaaaaaataatatctccaaccacgtttggtgaatagcctcattgtatcttcgtcggtcgtggcaatgccgggagtctagccaccggtgcgtatgaatcaagatcctctgcaatcaattgcaccgtatctttatcactgatatatagcccgattatgtagcctgataatctctgggttcacatgtcagtaaaaaaatacacggtgcagttactggagaggatctcaatccggtgcgtatacactcagcattgtagccgcccccatcactccaccggtccgcccccaccctgcttttccgaaaacgattcggcagaccggaaagcgggaaaggcagaaacacacggcagacggcacccaccacccaaactcgttttggcagtgaagcatcggtcctcggagccgccgcgccactgttactaaccatttgtagttgatggcacatgtgtcgccgtcgtgtcggccccattctccgggcgagatgctgcgagcaaaatggtcatcccccttcctccgcagctgcacaaccctgtcaaaactcaaaacgctctagcgcttctcgaagccgccgagattcaggccgcatggtgaccgttcttctctcctacaggtggttcaagcgcacgggtgggcccacacgtcggtgaccgattcacacgttagtctgactgaccgcacagtctgcgttcgatttcgcacatgcccgcaccgcactatccccacgtgacgacgacgatacgggcgattccacctgccgcaggcacggctactagtactactctactagcctactaccccacagcagccaggaaccagccacacattccacagccgcgacgcgacaccggaaacaaacgcaggtagcaactgcaaggggcagttggctggagctcggtgatctgtgggtctgatcgcgatgggacgctcaccggagatggaggtggacgcgcgcagcggctactgcgccgccacccgcacgttccggagcaggcgcgccgacgtgccgctgcccgccgacccggaggtcgacgtggtcagcttcctcgcctcgcgccgccactcgggcgttgtggccctcgtcgacgccgcgactgggcgccggatcaccttcaccgagctctggcgcgccgtggccggggcggcatccgccctcgccgcgcaccccgtctccctccgcaagggccacgtcgcgctcatcctctcccctaactccgtccacttccccgtcgccgccctcgccgccatgtcgcttggcgccgtcctcaccaccgccaacccgctcaatacccccgccgagatcgccaagcaggtcgccgacgcccgccccgtcctcgccttcaccacccgcgagctcctccccaagctcccgcgtgcccacgacctccgcgtcgtcctcctggaatccgcccgcctccccggcgacagctccgacccgcggatcgtcgccaccatcgaggagatctccgccacgacgcccgacccggcgcgccgcaaggaccgcgtcacgcaggacgatccggccaccctgctctactcctcggggacgacggggccaagcaagggcgtcgtcgccacgcaccggagcctcatctccatggtccagatcatcatgacgcgattccgcctcgagggctcggacaagacagagacattcctctgcacggtgcccatgttccacgtctacggcctcgtcgccttcgccacggggctgctcggttgcggcgccacggtggtcgtgctctccaagtacgagctcccggagatgctgcgctcgatcaacgcctacggggtgacctaccttccgctcgtgccgccgatcctggtcgccatggtggcgcacccgaagccgctcccgctcgggcagatgcgcaaggtgctatccggcggcgcgccgctgggcaaggagctgatcgaagggttcagggagaagtatccgcaggtggagatcctgcaggggtacgggctgacagagagcaccgccatcggcgcgtccacggactccgccgaggagagccgccggtacgggacggccgggcttctgtctcccaataccgaggctaagattgtcgacccagattccggcgaggcgctgccggtaaaccgcaccggcgagctctggatccgtggaccgtacgtcatgaaaggtttgatgaacattgtttacatttcatttagacttggcagcatttttattccattagcgagttgcacgctagaaattgtctgtttgtggatcactaatataaacgcactaaacaaattaaagttataaccgcgtcatttggacataaacatataaattgagctataaccgtgttctgaactgtcatgagcttgctgcctgaacaaagttataaccgcgtcatttggacgtaaacatataaattgagacccctgcgtcatttttttttgactaaggccacatggtaggtgccagttcgtaggactttgtttaatttactatatcgatcgggcggtagctttccatgagaataaagttagtgttgggaaaagaattgaaatgcataatgcatatgtatagattatacattgtttacatctgattatctgtaggcttccatgtgcattgtgcagtcaaactattataatgttgagtgatcttttaggtgagatctttcgcgggtgctctctaccagaaccatcgactgaatgaattgcccctgacattaattcctgtttgcatgcatatgctgttcgaggcatttgcctttgatttaatcgtgaagaggaaatcaattgtgaacacagaattatgatttatatattttagttcggcaagtaacttcacctttttctagtactaaggatcattggcaagtagattggttcagtgagtggcagaattatgttcattatgtggaacatcaggttcttgttcaatgccatgaatatcttgctatgttgtggcattatagtacactttgaaatgagtcgtgcattcagttttccacacctcaacatattttagtgtatctccattctttcctttacttttttttaaaaaaaaaattaaggtaaaggatttgcctgttatattaacaaagcatgtgttcactacattcagttgcaagcatatttattcagaatgagtttcatggaatcagtaagtactacgtgataaagttatgcaatggcagagcttacattttacttgcttaagaaacaagaggtgtttcaggcagttatacacaagagatttgctccggtccaacaaaaagtatctcgagataccggtacctcacgttatcgaatcatttccgatcgttggatctaacaatgccccatgctgccagctagatccaacgatcggaaacgatttggtaccgtaaggtacacgtaccggtacctcgaggtacttttggttggaccagagtaaaaatctctatacacatgagatacccttagccagctaaagcttgcagtcaaaattggtgctttatattttcctgctatagaaaaaaataatgggtgtaactcaaagttggttctcctcaggctacttcaagaacgcagaggcaacacagtcaacgctgacaccagatggatggctaaagaccggtgatctctgctacatagatgaggatggatatctcttcgtagtggaccgcctcaaggagttgatcaaatacaaaggttaccaggtaaaaatcactgggtgatatgtctgatatgttaggtttcctgaaagacttttaggctacgcattttcttatatctgtaactctgaatataatttgtgtatcactaggtgcctccggcagaactggaagctcttttgttgacgcacccagaggttacggatgttgccgttataccgtaagcttcatatagatgccagttatcacttctatagaaataattatgctaggttctcaatgggttggtgtttggttctgttgcaggtttcctgatagggaggtcggccagttcccgatggcctatatagtgaggaagaaaggaagcaacttgtcagagcgcgaggtgatggagtttgtggcaaaacaggttagcatgattcgatcgtcagatccaaaatagaagttgaaatgaaacatcatgttcagtgttcagtgttcactgttgattcagatttggcttaccaatcccgcaatttctctgaacttctgttatataatatacgcaggttgcgccttacaagaaggttagaaaggtggcgtttgtgacggacattcccaagaatgcatccgggaagatactgaggaaggatcttattaagcttgccacatccaaactatgaaatgccaatcaattatctactactccacaatatattaagcttgtcaagaatgcattcggcaagatattgaatacgttttggaattggcatagacactttagttgttgtgtaccctctttctcaatatggtgggtatttgtaaatgaagatatcatcagtcatgtgcatttcttctatacatgatctggtagagttacactgtatccattcttgtataatcaaataaaaaataatttccgagttcgagccttcgatgtacactcatgtctgcccatcgcagaaagaaaaaaagaggaaaaacagagactcatatctgtccaaaatcctgttttgggtctgatcagttcggtgatcaccagctttctttgccttgatgggcctccagcctgtaatggcgtatcaggacgaccttgtttttggatagtttcaggcagaccttagtttttttttctcaataacgaaatagaacatcccggtctttactcaaaagagttagagttacagccaagacagaccttagttagggcagcgattctaaggtttgagcaattttgtttgcctatacagaacacaacttgttacagttgtttgaggtggattgatctacttgttctaatttggaggcgttcacacaattattgagtttttaattgccaacaactcgaccgttagtctactaatgacctatatattcacttgaaaatggtacggatgatggtaggtggtcgacacagccgcctgcatttgatttgtccgtgagaaatgccaaacgggaaaataagaaagaaaaagcatcagacctgagctaaggagtacattgaatattagccggccctgaccgatgctttgctgctccaatcacgcaaattctatggcccaaacattcttcgcactacaataggatgatgggctgagcatatatcgcacgcatgtctgcttctgcttttgagccttttttctgttcccattctccgaccaagataaaaggtgaaatcgattgggacggatctcttctagagaggcggttaaagtggcctctaggatgtcgacgcagagcaacctttggaacagcgaggaaaatgacttgataaaggcgttaaagcaggggagaggcattataggattcggtgacagggacaaacaagaccacaattcgaattgttcatcagtcagcccattaagatctcgtcggatcaaggagatggaataaaggatcaaactcggtacatgtgtgcataaaaggtacaaataatgttctgtgcaacgagccagagaaggcgtaacattttatttgacagttgataggagtatatttcaatgctagtagacggagcagaacgtatacacacacacacacctgacagctcgatacaaagatgtatcgcacgtatataggactactaccccgtgcccggagttcatgccttttgccatgtgcagctcgctgaccgagtcccgacccgacaagcacgacgtgtcaccgcgctgacgagctacgaggcctcaggcctcgaaactggggaggaaggctgaagaaactgcggtctcggactctcggcggacgtcggaggacgccacgtagtacgtgttctggatacctgcgcaaccaagcgaacaaccacgtcccccagtcgagcgcacgcccggccgcccgtgcagcgcaaccacgcagattccacggagaaatcacggacaaatcccgccgtttcctcgtttgcctcacctgacgctccgcggctccgcgcacctgcggcctgccgacctgagtccgaggcgaaaccacccgctaggtgcgcagcccgaaccgggtggaaggctgcagaaactgcggcggacgaagccacagccccacgtgcgccgttgcggtatccgcgcatcgcaaccgagcaagcagccatcccccgtcgcgcgcatcgcccgtgcaaccacgcaaaagtacggagaatcctcgtcacttcctcgtgtcagcctcatccacgggtgaccctgccgcatgcaggacgccgcgcccgcgcgtagtttggcctgcacctgcacgttagccggtcaggatcggagagcgaagtgcacgagacggggcagagtcccatgattaaccggccgggtggcgacgggtcgcgttgcttgccgcttgatttgctggatccatcggtgttcgcccgggggtacggtgggtcgccgctgctcggcctggtcatctggcgccccttgttcgcttgtgtcacgggccagcgcccatcgagctgcaaattccgtgacaaattgacagcttagctgctgcctcatcacagcgtacagtagtatactactactagaagccctctgattcctcgatgcattcattcgtgcataccctggctgaatgcgtgcacggctgttcgacaagggacggcatggaacggaatagtggatgccctgtggttatcaagtttttagacccaagtggggcagttctacatcaccatcttctaatttaaaggacaaatcttgtttttgtatgttgtgattcgtgatgatagtataagacttatattatatggacaagttaatttttagaaacaccgaccagaacgtgctagtatatatcacaaaggacgtaacggaaactgttgtttactggagctaaggtcgattaaattgaacaccaatcagtcaatggagttgttagcctttgtcaattgcgactgagttgcacgtcactccattgtgtagccatgatccttggacaccggatacatgcatgccattgctggcttatttgcaagtgaagaagaaaaggaaaagaaaggggaataacactgcacaaaactaagacttgagttcctctttggaattaagacctttctttccatagttgacgaaattataccgtcatgactcatgagcatcctggctagctcccaagtccctttctccattcctccaattatgtggcctacgaaataagaactcaaaaatgcggtacatgcttaacgaaattaaaagcttggcattatccatccaaaaacgtcgacctatcagaggggccatacccatacatgatgcatgcactcataattcacatttatgatgatattatatagaacaaaacggaaatgaattttcagctagtcagtcagccagtctcgtggtcgtgtggcgtggcagcgcatctcaccgcaccggcgttggtggtgcgtgccgtacgaacatgataagccctaatcttttatcggctttgctttgcttcctctccacatcatgcaaaggcagccacttctgttccgttcattcttatccccccaacccccactactcagcatcacctcagctcagcctcattctgcaactccattcaactgtctgatcccttttctcgcacgccctaaattcttcagatatcagacagttgcttctttctttgctttgtttttttcttttcttttcctaccatgtctttctgccatccgtcttatactttcctgtaggaaaatgtatatgtgcgtgcatggtgaccaccagtgttagtgatatgggtatactattagaaaagcgacgatcgacgagatgcgtacaagtacattattatctcttttattttttggattaacacatgattggctctagttaaggcatgcttggctcataaatttctgtcaactccactgattagttcgtgagttctaaacgaatataattaaaaccggtaggtgataaatcaacagctgatctgcatacttacgtaacatcacaagagatttgagctgggtgactgtgtactattgaggacttgtcaagtagcatgtgtcgcaacgtgtgaacctgcggttcgactctatggaataagcatgctagcagtacagaggtttttgtttttcacctttcaaaggtactcccttcgtttaacaatataaatcattctagcattttttatatttatattatttacgaaatactaaaatgatttatattatgaaacggataaattaggaatcatgtcgtaacgaccagtaagtaaaatctgctgaactgtgtgcgtacgtaattagtcgcagatgcagcgagggaaatgtcgattctgcgtcaagatgatgatgctggtgatcgctaccctgcccaaaatcttgagcctgaagggtctctctgatatttcttttctgctcgcacattcacctggagtcactgaacactggtccagctaaaaagaaataattggacacattcaccaacccccaacatcgtaatttttcagtagtgcgattgcgcacgaactcgaagatcatacggcgccactccctctagctattatactaatctttaattaattggatgccacaatcttatagtattaattaatttgtttgtttgtttgttcatggccgacttgaaacttttctgtgagtcacacaataagctgcccttttaattgtactagtagttttttaagtgatcaagaagcgattgatgcagaagagcgacaggagaggaccagaaactgaataaatccaacgctctacaacaagggaagctcaccggccaacaccagctagcaaagctaggcgacctactcgctcaatgttcatcagtaatactagtatttggtttttctttgcgtgggactcgacttttgtcttgagctgagattcgtgaaatgcatggtactaataattaaaatcctggggttctacacaaatagatctcgttcaacggaaacaggtgattctgaatgcgcacagatgcagagacaggaggggttaatccgttagtataaacgccccaggattagcaaagatcgattttcatatggcgtcacgtaaccgtcaatattaatttcacaagcacatgaaaaggacaaatagaatcgaaaatcatagcgattattaattattatttcctctccaatttgcaaccggctctgctagctgtgtcgtccacatccgtttccaggagtcgacgtccaaccgtactacgatgattctacgctcctaacggaaaacaatctaccgagctacgaaacgagtgcacaagaccacgcaaaatctactaacacgattacctcataacctcccgtgaattaatcgttttcagatggccgcgtatctcaaaccccagccgcgcccgtacgatttgacacgaaacttgggtacatttttcagcagcagcagcggggcgtggagccaaaatcttatgggtatctcccgtgcagcgtcgagagatcgaccgctcgatgccgcatcggcgcaagcggccaagcgggccacttcgcgcgcgtgccgcgctgtcgagtggagccggtggccggtcgtctcccgtcccgtgcgatcccctccttttcccttccattttgtcgggcgcggccaccgccttttacacacccgcctgtcacgacgtacacctcctcctccacacatacgcacgcagccgattcgcgcgggatccgtacttttttcttctatgtatatctctcgttgtgggattagttattggtttggttactaagtggcgcctaattacctacttacagttgcagatacggggttggctgtgtgcgcgcgcgcgcgggcgcgggcgcgggcgtgtgggggggggggggggggggtgtataaaaccagtcgtcacgcacacgaatccacctcggtctctctcttctccgaagcgacccacactccccgtgcccgagccagagagtatggccgtctctgtccgttgctgcttcggctcctcctccctttcgcaccacgcgcgactactcctcgtcatcgttgcgttgctcgcgcctcggctcgcttccggctgcgaccgctgcgtgcgccgctccagagcggcttactacacctcctcgctcacgctgactggtatgtcgacacgacggctctgtttttgttcgtggttttgcgtgcagagggagcggccggattatggatcgactgattgattctgttcgtttgttcttgcgtggcacagccggttcttgcgggtatggcacggcggccgcgaccttcaacggcggcggattcctcgccgccgcgggccccgcgctgtaccggggcggcgtcggctgcggcgcgtgctaccaggtaatcaagctcgatcgagaaggagaacacaaccgaagataggcaactagcttagctgcatatgccatgtccatggcttccccatcctgaccgattcgctgctgcaggtgagatgcaaggacaagaagctgtgcagcaacgcgggcgcccgtgtcgtcgtcacggaccgcgccaggacgaaccgcaccggcctcgttctgagcagcccggcgttcgccgccatggcccgccccggcatggccgcgtcgctcaccgagctcgccgccgtggacgtcgagtacaagaggtaagcaaagctcaccaagctttactttttacccagctcgctttcttttcaccaaccgcaccttagctcgtgttccacacatatatagataaatattaactttaccactgttcaacagagagagtttcaccggtccgttgctgtagtttaccagttgcaaagcgtacgtacgaaatgtttggcaagtgctaggcgaggcaatagatagtgaacacgtacgattgtcctaagccggaattggaagtcaggctcaaattcgtcagcgatgtgcatgtgcagggtaccgtgcgagtacaggcacaggagcctctctgtcagagtcgacgagagaagtcgcggacccaacgagctcaccatcagcttcctctaccaaggcggccaaaccgacatcgtcgccgtcgacgtcgcccaggtaaaaacacagcacagcacagaacaatcattaacaatctgcaagtgtttgtgtcgcagaatctaacaatcgtgtgttgggagctgcaggttgggtcgtcgagctggaagttcatgacgagggagcacggaccgtcgtggagcatggcgaacgcgccgccggggccgctgcagatgaggctggtggtgaccggcggctacgacgggaagtgggtgtgggccgaccgggaggtcctgccgaggcggtggcgcgccggcgaggtctacgacacgggggtccagatcactgacatcgcccaggaaggctgcttcccctgcgacacgcacgagtggaagtagaagcccagccacacgtacttctcctgtcgtcacggccattttggttgggctttgatgagaaagaagacgtctctcggctcgcctccagtagagatttcactgacccgatttagagtcctcctaatccctcggcaacttcagaatttcctcctccgtttcttcttcttcttttccaactttgtacatgagctactaactaatgtgtaaagataaaattaaagcaagttacaaaccgtcccgtcccattgggagcctaaacaactaacgaaaaacgaaccgaattggcgccgccgtgaagcaacaactctcctgagaacgtttgcaacaaccaacgtatcgcagtttcaaagggctcacatgctgttgctgcctctggcctgggtgtgttgcttccggcaacattcctctctaccctgagtccctgacacatggcttgctcggctgcctctgcctacggtgtgcttggtcatgttgccaggtgcggagctaaaacgaaatggaggatggtaccacttgcttaatttactttagtttagatcgaatttaagctgatgcggatgtctaagtttatattgagagggtacatacatgataagaatagataagatatagctaaaataattttcttaaccgggttactggcaccctcctaatatacagcccctgcacgttgctcgttgctgttggtggtcagacttgctgacggagctggtcgttaaaccttatcagaattctgcatgaaatgtgaggtgattaccgaaccgtttccattatctgaaaaaaaatgtgaggttgattacttacacgagaacaattacgagggatattgcaattcagagtttcagacatgtatgtggtgggcatcagggcacggtaggtgagtgggccataaatggcagtcacagccatcatggacaccgcaactccacaagtccatggtgcgaggtatgatggccagttgcccgactgaactgaatgtgccggtgaaagtgagcttttaaagtgagatttccctcgcattacgttgccagtgatcgtgtctacgtgatggtacagggttggatcaacacagcatcttctgcctttcgatctgaaactaggtactagctgcaagtgaaccagtgattcagacttcgaagcacttcatttcttcatttctgctgcccaaattgtccattttctttttcaaaacttggctgtccacgctccacggcctaggaccaggtcatggcttctaatcaaacagctcatgaacgcatataaaacgatacgtttgaactaattttttcacaaacaacaaaaccggtggtagttgaaatcaaattaaaatggagtacttgaaaccgagggttctgcaattctgctcagcgccaaagcaatcaaacatccgagcaacttagcaactagcacttgagaaggttaggtggtcaaccgtacaccatgcgtgcagcagcatggatcaatcgatttgcagcaccagcagccaacaatctgatccgatcactgaggctccaacatttgtaggcaagcaacacgatgatcactaaagcaagtatgtcatgtgtgagagcctcgagtgagacagagcggccggcccggcggtataattcactgtccccttgtgcttagcttgcagtaggaattcagtaacctccaacacttggcattttgctgccgtataatcaatcatcatacgagccgaccagcacaagaaagaggactcgaatctagtggttaggagaactccaaatgaacaactgaattttaatcacgaagggtagttttgaatagttcttgttactgtctctgtttgcttgtttccacacatgagcctttggtttgaggtccatgttcttgcccaattagattcagaagtacaattctggttaggtgtttcagatggttgctcatttaggtgcacagaaatactagtgacagtagtattgaagagctgttgccaagttagcagaggcaagtcttgtacttagtagatatatattaagtcttatcatgcattcagacattaggataatcctaagagccgaagctaataatgttctcgtttggttcagtgaacaaaaaaatggacagctgatttgtaatattctgattctgtttcggataacagaaatcacaggtcagaatcatgagtactgtgcatagttctgagcttcttatccattagtaggacagggcgttcttattattatttttctttatctaaaaatattaggacgcaactagtgaaacagatggggcaagtacgcatcagcttcatgagtggatttatttgggagccatgaactccatcttgtgacttgtgaagagaaattggtggcctacctaaaccaacggtatctccattgtagttttgtaattgtgctaacaccaatgtgacagttattaggtgacatttttgttttgatcatgacaagatagaaatatatatcatgcaaccccaatcgaatataactactacgaacagagccaagtgacaaaatggttgcaatatttctttttcactttgttggctaacgaatcaccagcataaaactgatagtttatttcatctgccgacgtaggttgctagcccaagtattcaagctgaagtttgcaaagatgctacttaaatgatgacgatagcaactctatattagattattgagacgatgtttcagagaaatcggtgatgttactttctgaaggatgcggtgtcacacaatcacgaataagtgggtcactgttgttcaagcaggaggagttggtggcgactgtattaacaaaacctgaagagaaaatatgaacagagagcctcttaatttgactgaagacaatatttagttttaaaaaattgactgaagtgtgaagacataaataacgatctgacgtttgcagaaattttatgtgtatgcatgatatcagtaaatactatgttgttatggcgacacatgttgtttcatcttcagtatgacttgggttcagattctcgggaccccaaccagtgttcatagcttgactaggtaatacttgggccagcaaaaacaaagtaacagtgaatagggcaatgattgattttaggtggtgtttatattgtaaaacatagtgataagtcaggctcagacgtgttacctcaagatgacatagccacatcatgataaatctcgcttaacctagacgctcggaaagaaagctttggtgtcgttgatcagcacgcaactaccttgcagaagatgctctcagatcacatcgactatagcctttgtgcatatatcggcctactatcagccacatggcagggaacaatttgccaactcagatgaaatttatatggaacagttcagttacctgttaccgcatatatatgaaacaaaatataaataccatgttctagacagtgcatgaatctccatttggaacacctaatttcagatgaagcagtttaatcagcagaagaatctggaaaaatattattgatctaaaccggaatctggaaaaaaaaaaccgggcttaggtttttctgggccttaatctacggattacagcctgcagccaggaggatacaaacgttttgacgtcagtgggccaagatataacagtaccattgagaggccaagaatccaatacttatccggcctttcaagatccttgtccgtttatgtgttgaggtttgaaaatgactggttttggctgtagcctgtacgcagttacttaccaccgatatgattcatccaaatttggcttgctcacgttagtaggaaatcagacaaaataagagtacaggaacaaaaagatcaattaaaaacaaagggatcaagatcaactatactaattacccatttgatttttgtgatgattttcggcaagtcagtcacgcatactttggcatgttgaacttttcaaaattcaaatatgacggacctgactcctcatggacaagttcgacccatcttgatgcattcgacatgccaagctactgatatgtgtcatcattgcctctattatgcacatttgggagtagtgagacgacagcaacaggcatcacatcaagaggaggaatgtgtgcgttcactccaggaggatttgaaatatttgaatcacttttcaccaacccagcatttccttctgttatcagttgaacgcccgaaggtgcagaatcatcccagcatagagcgaatggtgtgtcgagatcacccttggtgtaggttctaacttggtggaggtccagacccggccgtgcgcctcctaagccggcccctcgtcatccgaatagcctcctggatgagcgtatcttcgtctggtattgatgactgacgtgcgttgcttgttgatggaccagatggatcaatctgcatagcttcagtgttctgagggccgtcgctggcgttagcttgaggaggaccagcatgtgcctgtggctgggcaagagactctgcaccaggaggaggaacaggaactggagttgtatcctgcgtttggttccttggtggagcagaaggagcttgggtgggttgtggtggcagtggaggcaccgaaggtgcaggaacaggctgaggtgcagggttcacttgccgagtctgtgctggtggtgggcgctgctgctgttcacgtgcctgcagaatagaagggttgcagtgaagtcagtatgtcagtcacacaaatataaactgtcacacatgctcgctactccctccgtcccataatataagggattttggagagatgtgacacaatacatggtcctaggatgtatcacatcccttcaaaatcctttatattatgagacggagggagtaataaatatatagaggtgcaaacaatcttttgaatcctacaactggtaaacaggacattaatactagaacagtaaacatcacaatgtgctcaaataacaactctatcgtgcactaacaaacaaaaattgttgacaccgccttataaatggcatggttaaagagtgcaacatttagtaattcaataaggaggtaatccaagcttctcaagtcacctactgtagtaaaagatcataacaagaatgaggctagtgttaatataaaaaaaataccatgaacagatcaaactatactagaagcaaaaatacataaatggactggggagtaacatcaacgttttaaaagatacctgtgggcgagatgtttgggtttgtgactgtgaagcaacatattgcaagatttcataaagccttgtctgaccatagttggaaaccttctggaagtaaagaaccgccatgtcgcaagctctagtcctcaactcaagcagattgtgatcgatatcagcttcgtattttgcaatccacggtttaaagaatgattcatacacataggcagtcccctgaaatcaacctgtgttaccaacaaacaagagatagattcttctagcagtttgaaatactagagtaccataccagtgttttgggataccacaaaaatacgacaaatgccagctttgcttcactgtacattggcaacctacacgcaaacaaaattatcatcagcaagcaggtaagatttcccctttactgttacacctgaaaaaaatacaattccaaatggtcaacttaccatgatacaaaattatccccaactctatcaaaaacagttagaacagcaagtaaaatcctgcaaaagccatgatcacacagctgagatcaagcataagaaatccaagaatgatagtccaaaataaaacaaaagggcataaaaagcataccagtactgacaccagaaccgcaacttctcgatctcaggcttgttcagttccaccgtcttgtagcaatcataggctgggtatgcatatccaagaataagcctgcaaaataggtaataacaaacatgtagcagaccaaaaccattacctactgcagtacttttgtacaaaaactgctgctacttacattaaagccccagtaatgaatgagccagccatattgactgttgaggcctaaaggttaagaaaacaaacatttgttagaaacactgtttaacagccaataacagcatccataaacaaggatgtcctatgagcatcgaatctacagcagcagttacacataaaccctcatcaagctccttcacaacacaaaacatagataagcagatcattataccgctttggcagttttcaacttttgctccccttattaatacagtcatcatgcgttttaaaaaatagtattcaatcatgactgcatcgtagattcatagtagcttttcggacccttaatttatagatttcagattctctataccagatccgttccaaataaaaaaaaaactgctataccaaaggatgaagagagtgggggggaatctatatgaacaacctacttagtaaacactagtgctaatttgaggagtttgataacggatcgacttgaatccccaaataaaaaatcaaacgagctgccaaaattgcttcgctaaattgaggaactacctagacagtaaagcaaccccctacaaaggcaatcactacgtttgtctcgcaaatctctccaaaatccaaatgcaagctgcttacaccaacatggaaacagagtgcagaacatacagcaaaaggatcacatctcaactgcaacagcagcctaatcccatatctgacaaacaacctgatgatactcgtagcgtgtatggaaagttggaaacacttctaacgggccgcgaagctacggcaacaaatcgaaacgagggagtatacctttcctccggccacaagcaacggctcgatcgagcgagcgagcgagacggcggcgtcggtgctgaccgaaggacaagagggcggagaagctcgtgtcccctgggcccggggctccgacgaggatggcgcggtcccgcagcgaactcgagggaggaggatgcgaggctagtattccggcgtctcccgtactcccagccgccgccgccgcccgcggctcgccggcgtagtgcgcgagcaaccgcactgtttgcgcacgagaagtcggcgacggtgggtgtttcggccggcggctggcggcttgggctgctttatattgggccgttagtgggtcgttatcttgggccgttttagattgggctcttacttctgagacctcttgttgctcgtgttcaagcccacctgttctccgctgcttgcaccaatgccaatttcagtctcagaaattcagaatccacacacaagtatgttgtcatgttcagattactgaaaatgcaggtgtgcaattagccactaagctttaaataaatactaaatttgatactggtattagttaattctttgcactcatgcagattagtattgtcggttacaattgtttgcactcatgcagatctggcgatctcctgctataccgggataccagttctctagtattgtcaagcttgatagctgcagcacatggctgcattcatcgatagatttttccgctagacgaacatgctcacattctagagacagatgccgcagccgtgattaactaactcagccgaccaaatcggcggccggtggcgtttgacataaaagaatctgcatattcattctagtcgctctcgagaaatgcccaggggttttccggctagctttacaaggtggtgggctagacgacctgggttcaaagcctcacccctcctaattatttgatattaggttcttccctaatattctagtttttattctagtcgctctctcacagtcacgtactgcttctcaaactacatgcaacgacattcacgaaccccaaccaagtcaatttggcttcactgcaaacgatggacgatacgattggatttcttgtcgactactactgcagacttcaacgttcaggttggagattctatccactaagagtgtgtttatttcacactaaaattagaaatttggttgaaattggaacaatgtgaaagaaaagttgaaagtttgaagaaaatatttagaactaaacaaggcgtaaatgatctgaagctagaagctggtctggataataatcttcagtcatgtcagtaacttctgcggttttggctacgaaaagcatttgcaacttgaggtgtgtttagtttacatcaaaattaaaattttggttgaattggaatgatgtgacgaaaaatttgaaagtttgtgtatagaaaaattttgatgtgatggaaaagttgaaagtttgaagaaaaattttacaactaaacacggcctaagctttaattcgtgcacaatataaagtactagtactatgtattagtacataaattttgaaaagaagggtgtgtttagttcacgttaaaattaaaagttttattaaaattaaaatgatgtgatggaaaaattagaagtttgtgtgtagaaaagttttgatgtaatggaaaagttaaaagtttgaagaaaaagttgggactaaaccaggccgaagtagtacataaattatccggtctctagaatgctttacatcagcatctcgtgatccttaatgtgcgtaaagagggtgtcattaattaacaggtcgttcagctgatcatgctgaccaatttgatcaatgatcaatcgatgatgatgatgaagatagtatgtcacctgctaagtgacaaggatggatggcactgctggcaggaggacacgtcgcatgctagcttttaacatcgagagccccactctacaaaaacacctcgagatttgtagattaatcagagcacagttagcgttcattaaattatttgcagtgcaatgcatctgatacacggttattgtaccgcctgttatgctcttcattgtccctggtaggccatggtgcggcaattcttttgttgcacgctttcatgtgtgtagatctatctgtttatctggagtatctcattggaatccctaaacaaaggtgtgatgcaggcaagtactaaaaatcacgagcataggttgtagacttgtagtagcacaaaatcgtagtggtataatataatttgatccatacataagagcaaacggcctttgtgttggtatatcagccgtagtctgcaaacactaacatgtggtcatggattcttccttccagattcagggggagtcaaatgcatcgtcagtaataagcaggacataggaaaacctggaaaatcttagtgcggacgtgcaaacggacgaaaaggatcgtgacagggcaacgggagatgatcagctatctagatactccaaccaccctgcatgcaggggagcttggaaacaagcctgcagcgaactaattctgcacaaataacaccaaaggaaagaacaccaaaggtcttgatctatagagttgatcacatcgacccagccaaataacaccaaaggaaaataatagtactacgcgagatgcatggattcagaaagggacaccaacccaaacccaatgattgatttcatcgtctcacagtccgatcgatcaatcgatccatgtagggatgaaccccacatggaactatcgaggacggtatggagtagcagcaaggccagtgccagcggctggcaagtcgatcgcaatgatttgctgctcgtacggccccgcccccctccatttgcattgcaccagacgaagatgagcattgaagtcgcgagatatggcgatcgatcgatccctctccttgcagcgcaggccaaccggtgtcaaacgtcccaatcgcacgagcccgagaggccccgccccagatgggacgctgcgccagtgcggtgcacccatccgcatccgttccgcccccaccaatcgatcgacccgacatattggcgagtgcacatattggccgggacagcggagcggaggggccccggtgcggaggaggaggagggaactaggggagcgaccgagcgaggaggcgttgtggcgcgcgacgccgacgcgcgcgcgcggccatgacggcattgaatgtgggacgggggagtgagctgtgatgagcgaggtgggccggcgcgcgcgagggggcgcgggtccccgaggcacgcaccggcgcatgcacgtgtccgcgcgttgcgccgtggggcgccacacgccaggtgctcccacaccgggtggcagggcccgcgccacaggtactggccctaaactaactttactctccgtgcaatgcaagatagatgtgctgccaatttgcacctgtatactactacctgtgtaatccaaacaagagtccaagacgcttggagcgagtttgaatttgttattggcctttgcgaatttgaatttatataaaaatatttagtccaaaaacgaaaatgacctatcaattcaagcatggcgcaagcgtggatctgaaatattttgaagtccggacaaacctcactataactagtactactatttaatataggaattctatttgaaaatttctaattatatgatattttaatggattatccctcgataagcccgggcatctgctcggggtggccggatggtaggattatcctacttcctcatataggagaatcatttacatctatggtagtattttctagtacatgtgagcaatttttacatgggatattttttatgttacatgtgatattttggtacataagagttactccatgtgctaatatagtaggagtatgtcggtcgtgaaaaaaaaaaggagttactccatctaagtagctaaaaaacggcattactgtttgcaagccacaggacgttggcactgacttttcaattttcactctccattcagttcaaaaaaattttcactctccataatgtactaccctgctgcacaagcaaaggaaatgaggccacagcaaatggttcgttaaacgagaaaatttaccctagaaagaaacaaataaacttattgaagtggcccagaacagtagtacgaaaaacaggcacagtacactatcttgtcctaactggccagattaccagaagaatcctgtagtccgctgctctccctagcttgttgaacacggtggttataccccttcaggacggacttcagaaccttgtatcgtaagctgatgctgcccaaagctcatggggggagtgaaaaatccaactcctactcgcgccactccgccactggcgcctggctagctgccgaacacagtatacaagaccacaccccctcccacccgtgcgggctctaccaatccacaccacaccaccctataaaaacgcccgcgatccacttgccacaccacggccaccaccaccaactcgatcgcacagcaaaaagcccatactgccaccgcgagcgccgggaagaacacaacagcttctcgagcaagccggaggtgcacgacgcagcaaatggcagcgggattccgccgacggctcaccgcgctcaccatccccaaggcatcgtcctacctccgccggacgaggcacaagaagttatcgtactcccgcgcccgctccgctagcctccccggccgcttccacccggtcgtcaccggcctgcacgagtcggcgagtgctctcctcgggtggactgatgaggcgccggcgcaggctggcacgcagtggatcggcgaaggggtcggccacctggcgcggctcttggcgggcttgacggagctgctccaccacccgcaggcgcaggacccgctccggccgccgcgcaaggcggcgccgtggacggagcggctgctcgacgacctcctcctcctcgccgacgcgcacgggtgcttccgcgaggcgctcctggcgctcaagcagctcctcgccgaggcccacgccgcgctccgccgccgcgacgcgacccgcctcgccgccgcgctgcgcgcgcgccgccgctcggaccgcgacctctcccgcctcgcctccacattgcgtgacctctcctaccgctcctcttccgccgcagcgacgtccgactccggcgaggccgcgctagccgaggccgtcggggccgccacgtgcgcggcggcggccgcgtccgcctccttcttcgcgggcctcgcgtccgcctccgcctcctctgcctcgcggtcgttggcgtccccgaccgcagcctctcccgcaaaggtagcggtcgcgccggtgtggtgggtggccgacctcctgcggtggcggcggcgcacggtgtcggtcgctgcctgcgagtccggcgcaggcgcaaaggagacgccattggacgaatgcatcgatgaggaagaggaggaaaggaaggcggccatggatcggctgctcaggctggaggagtgcgtcgtggcggcggaagacggctgcgagcaggtgtaccgggcgctcgtgaacgcgagggtgtcactgctcaacgtactgacgccgtgcttttgatcttctctggagggaaattcctggaagattagtgatcaggacaatgcggatttgtttgacatcattcttcttagtttttggtaggttgcgtacatgatgtatagggatcgtttcacaatggaatggaattgtgtttaggtgaaatattcagtaaaatttagttattagctttcaaatcaaatgtctacacaacctcactttcatggattacctccaaattcagaggttgctttcctgattcttaagcgacaagcagcaaccatataaacttatgttaattagaccttgatttggatgcgagttaatgtcaattgctaaaataccaaatggtatctggattcagctgcaattttattcccgtctcatttttcagctatacgcagccatgcagggtttggctctgaactgaaagataaccgttaagctgagcatgtgaggcctctgctttttattcacatgcatttttcaatcgcaaagatgaatctttgttaaatcgcgtaagccgttcggtcggtttggcatcacatggaattgggtcaaggagttaatgtatcacgttggaatcgaacttaccaaattgtctttctatttaagctggcgtttaggtcctttgatgcaggctttgcggctgcattctatagttatgtcttttcagttatttttagcacttaatactaatatactgaaaggagcattgaacatttaactatgacattgtctcagtgcttaaagtagtagcagagtataatgtactagcttcggtttgcaaagaagaaacacaaatgcaggcaccgttcactgttcggaaacgcagaatcagttcctctttcatcttgttagatctttcagataagttgggtggttgtgaaggttaatgcacctaaagccagaatcaagatcgtcagtcaagagaagctgcacttttaagccggatctttactttgcaaccaaaccaatacagtgtacatgccccagctttagcgtgctcatcaaacctgtgcaacctataatttatctagctagaaggtcgcgatctaaactagaatcggaagcatgcacggatccgtataatttggcgcatctgaacactgaacttgcgtcggctctgtactgaaaatctgaaacccaacatctctaaagaactagtcatggttggtcactagttgtgttatcagaacttagaactagtacaattatttattttggtgactaattctccaatcattttgcaccacttagggtcgaaatggacaagctaacggatcggttgtgttgtccttcttcccaaagaaacaacaatgtcatcgctcgtttctgtcgtcgtgcatggaagcttggtgctactttcgttttcggtactattgggccccagcaagatgggcctggaagccccacttattggagcccactacgatccaatgaaccatcacgagatgcagggagattttctgcacgttgttagcgttagttcgaggacgtgacacggtgatcatttgggagttagtaggacggacaccggtgcctatctaatcggatcactcttaattttcgatgtgatcgttcaggcaaacaggacagctaaagatcggaaacgtatttcttatgtgattcgtactcaaccgtgtaagggggtaaagttttaacgtgttacatcagatatacagacacatattcgaaggattaaacgtagtctaataacaaaacaaattacagaatccgcttgtaaaccgcgagaagaatttgttaagccgaattaatccatcattagcaatgtttactgtagcactacattgtcaaatcatgattcaattagttttaaaagattcgtctcgcaatttacacgcaatctgtataactagttatttttttcgtctatatttaatacttcatacatgtatccaaacattcgatatgacatggtgtaaaattttatcaggggatctaaaaaaggcctaattcaactaactctcattttttttaattagcatattttaaaactactaaacggtatatttcgtgtaaaaaaatttctatataaaaggtacttaaaaattaaataatatattttttttaattagcatattttaaaactactaaacggtatatttcgtgtaaaaaaatttctatataaaaggtacttaaaaattaaataatatatttgtcaaaattttaataattaatagtcatttaattatatactaaccacttttttcgtttgtgagccgctaatcagcccaaattcatgtaccacaaagaacacattataattatttttttcattggtaggcaaggtatcaatcaagagtaaatcaattgtggtggctttatcaatttcaatatatcggttcggacatactcataaagataaggatgagcgcacgtgttgtgaacgtttgtatttgtgccaatggtatttttttaaaaaaggagaagaacacgccctttgctgctttgcataacttcgtgcagttttgagctaccaagaaaaggcccatgggctaaacctaccttgttagccgaagaggaacggaacccagaggtgacggcccacgaaacagaggagccagctgggacgacgccgatgatagtacaggtacagcacgatgtccgcagccgcaaggctggcggtacacagcacagctcagcgccaccgaggcaggggtcgtgtcgcgccgtccgactagcgctggcactgccagtctgccaccgcagcaggtacggcgcctcgtccggccatctggccaagttccccaccaccacccgtcttcacctgcacgctgcacgtacggccgcggcgtctctctctctcgcgcgcgcgccgtctcgtgtaaacctgataaacccacgagaccgagctccaaccgcgctccggccttgcggcgtgcgtgtctcgtcgtggcgtggcgatgccgccgggggcggggggcaagtacgcggtgcatacggccgcaaaaacccggggggggggggggggggaacgcatgctgcgtgagcgaccgcgcggcgcggcgcgtcacgtcgctctcgccgtctcgcggaaacgtgtccaaccaaacgcacccaggggagggggaggggcacgcaatgatcgaaagcgcaaagcggcagcgaatcccgcgtgggatgagcacctggagccgcaactttttcgccttatttcttccggccaatggagtagtactgtactactactattgtgcggcaggtgaagcatccatatgctaatctgtacttcgatgcatccgtgcgtgtgcgatcgatcgatggttcggttcatgtcgttatcatgataaccggattattcccctcttttctgctttaataatgattaacttgaattggtgctaaatgctaatcccgtgctcttccggtgtgtacgtatatgtatgtacgtagctagtaatgatttgggcatatgctttaataaggttttcgtgggaaaagaagaaaaaatggtatcgcaaatttcccaacttgtcttttgcacgggaatagtaatcgcgatggcgatggagaattggggatgctggtgtataaacattgcacatttttatactgataatgaccctatgagagtgacagcagctagccattatactattatctactagcactatccaacgatttcgttggcagttaacgcgatgtaatcttctgccacatcaggttattttatcctggtaagctgtcagtgcacgtgaggaggattatcttaactatgagttcgagaaaaatcttttgatggctctaaggcaggagaggagagctagacaatgcactggcgccgcagacgatgaattgataaacgaattacagtggcaccagcacagtagcacgtcataagtcatgtacttttagcagtaacaaaagctacatgtccccgttaagcagcagtaaattgtttggaactggctgagtgattagtaaacgacacggtgtcgtcgttgcccgggtgcgtgccagatcagccacaaaaaaaatggacagggtaagttgccaacttggccactttattgtcctctcttgctgttgtactggaaatgaaaaaataattatcaaatattaattaagggcaaattaaggatcaacagatatttggctcggctactcgtctgcctctgggcaaaaagcaggagcttttctttctcctttcattgttcgaaatgggaacggaagctaacagcatgcaactggataattccatcaaactgacgagtgatgactgatgactaacgactgagctgatcaggtcaagtgatgtcttgcgaggcagcgagggatctgaagaattctgatattctgttgactctgcattgagcactacattcaataattgctaaagtattctttgtataaacacaatgctagcctggatttctgaagaatgaagtctggataaaaaggaaaaaaatacgaccgagttgctccaatgagttaacactacttgaacccttggccaaaactgatttacatgtgattgaaccctcggccaaaacgagagctaatttattggagcatgcatttgcttggactaattcttactgtctgaaactctgactgtttcaccatattcattttctgtcagcactatatccagtagacactgtgcttgagtaattgagttcaagttcaactactttaataggaggtggagacagcgaatgactagtagtaagaaatacctaaacattggatttacccgttccaatttaggaggatactccaattttgagctgccacttgctacggcaaaagtcttctaccatgaattaatctacgggattgcttttccccgaaaaaggtctacgggatggcactgtttctgctgcttttcggctgccaagtgccaacacgtcgtaatcagttactgtagtgttacactaacaacagtttcataggactaaaacatcatcttcatccgtggaaatagtttcacgagaaaacgaatgtatgtttggatatggattatgagaggcaagactgaaaaatataaattaataggagattaagacgaaacggtacgtaggaagaatggatggtcaattggttgacatctacgattagaacttaattagattctaaaaggtgaaactttaaggttatttacttcgttgctacttttaaccatatcgaattaccttttcttgtcattattatcttatcaaagtttgacaattataaaatttccaattttataagctctatcataatcttggtaaatctttaaaccaaatacatccaacaccatcaaaattgaaaagtcatgtagcctagtggttgcagtaacctgagtagctacataggagtgaattttagattgggttatttgagcgctaatttctaacttaaaaaaggttgtatatatccggttggatttagaggccggataaaaatatcattctctaaaaaaaattaaagaaaatcaaaatttggcaacatcaaaacatactaaaatctgacattatcaagctttaatagggttaaaggtggcaacgaagtaaatgcacactaatttttccatcccatttagtcaaacatgttttgtgttcaaattactcgtaacaaatacttctcgtttttgggtagaaatacccttctctaaaaaaataaaaatcaaaatcaaaatttggcatcatcaaaacatactaaaatctgacattatcaagatttaatagggttaaaggtgacaacaaagtaaatgcacactaaattcttcatcccatttagtcaaacgtgtttcgtgttcaaattgctcgtaacaacttctcatttttcgttagtatactacccgaattgtcacgcgacatgttttatgtaaaaataatttctatacaaagagtgttttaaacgattataatatatatatatatatatatatatatatatatatatataattttataatagttaatacttaattaataatatactaatgagtattctcgtttctaatctaccatcccaaactcacagatcaaccagcccttagggccacggtatcatcggcgaaaattaacatcggtgccctggtgggcactgatcaggaaatttagctttcgtgcctccaggtgcccgtgtgtcatgagactcgttgccgcggcgtggcagcgacatggtcgccgaattcacgggagcacggcgattttggcttcggatgcacgtcgacggtagcgacgcgcgtaaaccgcgcagggggtttcgcgtgactgtggctccgtacgtcgccacgacggacggatttattgtcctttcttttccctttcgaactcatcaaaaaaacaacaacaaccaaaaaaaaaaaaacgagagcacgagttaaaccgttgactcatggaccaaaatactagaggaacagagcaagtgtgggccaaagcatgacgtaacatcagaaattactccaaaccgttcgttttcagttttcactagtcgtttccgtatgctctgcttacaggttgatgccctcgaccatttcttatcaaaatttgacagagaaataaagtttgagctatggagcccatgactaataaccgaatcaagaaacgtaaaatagtttaggatgagacttttatatatgtgttattattggtttaaaaataatatagaaaatagacctgacgaaaaaactaaaataaaatccaaagttaggcctccaatttaaaattttgttgtctttagctaatatgtgggacaacctttctctagaaaaaaaaggtgaataacatactaaaaataattagaattggttgaaagaaaggaaacacataggtaaagggttatcatttcacatcatgtcctctccttctccaacactatgttttgaaaggcacatcaaagagaatcttagaacaccatcaaagcatctcaagcaatttatgtgtgtgttttctctgatttcagcttcaactaaactgttcaatatgaatcattgtaaggctcacacaaaacaattatgtcatatggttccatttattttcctatcattaaagcgttttgcgagttggatgaatgtttctatcgttgaattgaatatatggaacattttagaggagtttacctatgtatagttagtgttgtcgtggtgtaatttcaacgtgagagaaacaatgatttcaaagatatttaatacgaccaaacaaaaaatagacatccgagtaatcattgtagtatttcctttttttctgtgtgttgggaacgtactcatgggtgtgtgaatatagtgttatatatgtcggtgtagctacgcgtatgtctactgtataattgcaagaaaaaaattttaggatttcaacgaaaatttagtgagatcagatatgtatcattggttttcatttgtttggtgtgtcagaggcatactcgcgaggagagctgctaaacatacggtattatgtttactattgttttatgataaatgttctctcttagtgtttgttgacggttgcaagtttcggtcccacgctaaactacataagcagatggtccggcgttggatcgtactaagatcgtaataaaacatcgtatgtgcagtattttccacttgtgagtgtgaatgtagtgttatgttgtagtggtgcggactgcggaggaaataaaatttgttccaaaacgatgatgacgacatctccatttttgcttatcccctcgctagatttgccgagatgtgaacaggagacaaacaacatatcaccgtgcccacggcctagcctcaggccgtaccctgcactgcacacgcgcacgcacgcgcacacagcggcgtactccgtaggcgtaccgcggcagcgaaaaccgagacgaaacccaaacccccccattcgagcgagcaggtgtttgtacaaaggccgccgcgtcgaaagcaaccactcctcctactcgacctcgcgctcgctcgctcgccctacaggccaccgccgcaccagggggggcagcgagcgagcccgcgaggtagtcggcgacgaccaggagggggactgggatgggttgctgcgggtcgtcgctgcaggccgggacccacccggagaagccgccggggatggcggcgccgccgcagcgcccgtccttctccctgaaccagcaccaggcgccggggtcggcggcggcgcagggcgtggggagaggggaggtcccggcgttcgcggagttctcgctggcggagctccgtgccgccacgggcgggttcgccgcggagaacatcgtgtccgagagcggcgagaaggccccgaatttcgtgtacaggggccgcctccagcgcacccgccgcgcgatcgccgtcaagaagttccccaagatggcgtggcccgatcccaagcagttcgaggtacgccccgattcgggaagagcttgttgtgcctggagaattcgtctttgctgtcatcagtccgatagattaaggttatttgctttggttcgcaggaggaggccaagggggtggggaagctgcgccaccgccgcttggcgaacctcatcggctactgctgcgatggggacgagcggcttctcgtcgccgagttcatgcccaacgacaccctagccaagcacgtcttccattgtgagttattggaatatctttcttttgataagttcctttctgaatttctgatcaccaggagactttttttttccatatccgataaacactggtcgcaaaaagattggatttttctgccttgtagttcctgattagtgtggaagttggcaaaagaggacatattggtctgctttgagcaactgctggctcctaccggcttcctgcatttggtgtaccgaacgaatgattgggactgccctttgtcatatcttgttcttattcggttattgttggcaatgatcttgagtcagtcgaactgattatggcacaagcttccttaacacactcgatggaatgttggtgttgttatgagtctgtcagcagctatatgtgtacacaaatggatgccttaaactgattcagggtctccaatgtggaaatgtcttgttattacagtgaccaatgcagttggtaacttttttatgcatttaaggttacgggagattgtagttcacttgagaacttaggcttctttatatgttgtcttcatgtttgatgaacaacctgacaatagggtacactggcagtggtgaagggtgagctgtcgactgtattggtaatagttgtcgcaagtactgaattctgtaaaacctcaacaataatgcactgtattacttctttttgtgatcttaattgcattcaccattcatgcaagtttgaatttgcgcaaactagatgtgtgttattaaatttgcagttcatttatcatgattatttttttttacacatttgcaggggaaaaccagactatcgaatgggctatgcgtttaagagttgcacaccacattgctgaagcacttgactactgcagtagcaatgaacggcctttatatcatgacttaaatgcatatagggtcctttttgatgaggtaagcaaccaattcttttgtggtgtttgtatgttttattctgtaggattgtctcatgtggtagaggaagtgaggatagtatatttatctctacaaatacctccctgcaagaagtagtgtgcaatctacggaatggcactgatttaatttagtttgtgctcttatcctggatgcttcctctgtttgttgatttgcatgcttatattggaagtggaaattgttggcatctctagtacctggaagaaagcacatggcagaaatgaaaatgtcaactctttaccaattgtgctgattggagaaatgattaggaatctcatcaaagaataaatcgctttcccatgatgttgttcacatgaacctctccttcacatggttatccagatgttatccgtttatctaaatcgttaatgtatttatatttgcagaatggtgatcctcgtctttcatgctttggcctgatgaaaaacagcagggatggcaaaagttatagcacaaaccttgcatatacacctccagagtatttgagaaatggtacatatgccttttaccctgagactaaaaactattcttttcctctgagatatgaactgctatttattaaagagaaaatccaagaaatgatattgacaagcgcccaattccaagaaatgttatcaacaagtacgagttccatgaaataatatcgtacaagcaactttgtcctagaaatgccatcgccgttagggttccgttagcatccctcctttaggtgctatatgatgaacaatgtatttaacgacacgggatggatagaaccctaacggcaatggcatttctcggacaaaatcgcttgtacgatggtattttatggaacttgcactcgtcaatggcatttattggatttggatgtttgtcaatgacatttcttagattttctctttattaaatggataaatacacattgctctttttttttctgtatgcatgtaattcttgctttatgcctaaattttttatttgaattgcctactctgggcattcataggaatattatagatgttaaccatcgtccattgatgacagaactgtaccttccactctaatggcatgacacatcatatgcacaaactggacctataatcaaaataaggcataataatcatgttctttttccctgccagataaataaataattcatcttgtttgcctactgagtgcttttgtaagcattgatatgtgctttttaaggtgattacgaagaaatgtcaagctcatagttagccagctaaaacatatgggtgactaacacaaaggcagccttaggataacaaatataagaggaaaccattctaaatgtaaggtttttttttttttacatttcttcatggtatattctcctttttcaggtagagttactccagaaagtgtcatattcagctttggtactgttctcctcgaccttctaagtggaaagcgcatacctccttcccatgtaagtttattttgctagtaaagtatgccttttcttgttcctctttatcctagctccaatgcagcataagaagtccgaaatccgtactgaaaataccttggccaggtggcatacaatgctattctgcttctgcatatatatttcttttgcatcgtgctgatgcaacactcctgtgcaactacagtagaacagagttttacttatatagacatgaacattaagaggttgactgctgcttgaattcatagtatggctaacactcttagctgctccaaatattattttacttctaaatgtaacttggtagcataatcacatcgtaagtggtaacaatgcttaaaacaattaaaacatgtgctttcttattgacaattagctttgtttcactcaggctctcgatatgataagaggcaaaaacattcaagtgctcttggactcacatttggaaggaaaatactctacagaagaggcaactgctttggtagatcttgcttctcagtgtttacagtatgaacctagggaccgtcccaatacaggaaagctggtctccatacttgatcctttgcaaacaaaactagaggtaaccattgtgtttttatccttacttttctaaatcttttttctgtctttgatggtttaagccttctttactaatttatggctgccatattttgactgacctaattttattttaaaatacaaacaggtgccttcctatgagatgcttggcattccaaagcatgaagaagaagcacctcctgctcctgctcctgctccagctccacaaccacaacaccctctatcccccatgggtgaagcctgttctaggatggacatgacagcaatccatcagattctagttgccacacattacagagatgatgaagggactaatgaggtaaatattggagcactttgatttctgtcatatggcagatcgttgtctaagaaatctatctcttcatcaatctccctgttgcagctatcgttccaggaatggactcagcagatgagggatatgttagatgctaggaaacgtggagactttgcgtttcgtgataaagattttaagacagccatagagtgttacacacaggttggaacgtcaaatatcaggaaccttctggtgttacaaaaaaatcgttagattgaagttatctcactcctttacctcctctttgggttgcagtttgttgatgtgggaacaatggtatcaccaacggtatacgctagacggagcttatgccacctcatgtctgaccaacctgatgctgccctccgggatgcaatgcaagcgcagtgcgtataccctgattggccaaccgcattctatatgcaagctgttgcgctctcaaagttaaatatgcagagtgatgctatggacatgttgaatgaagcttcgcagctagaagagaagagacaagagcgtctctggtctaaagatgcgtctgctcagtctcctttgcggctcaaaggtttatgttgagacgtgctgctcttccttcagaaaattgtgatacattccaggttaaagagttgggtgtaatggggggaaggtgctgcagaatccttttttttttctctttcggaccagatgttgtagatcctgtgattgtaactatttggtttgccatttctattatgcattttttggggggcacatgtatatgtaacattaattgaaaaagagagagagagaaacaggcaccatgcaagggaatttgtggtggttaacactagagttcggttgttgtgaataaggtgcacagttgatcttgtagctgaagctatttaaccaacaaaccattgcttgtgctgaggaggcgagccggcaaggacatactaagcatcaccacaaggggtgtgattagtttacgccaatttacaaggggtgtgtttagtttacgccaaaattggaagttttattgaaattggaacaagatgtgacagaaaagttggaagtttgtgtgtgtagaaaagttttgatgtgatgaaaaagttaaaagttcaaagaaaaagttgggaactaaaccagacaaagaaagaattatgtactcttatctggaaaagaaggtagcccagcgaaatcttaaaaaggagggagttcttcaaaaggaagaactgcaaaataacccctacccttaggccttggttagatttcaactttttttctttaaaatttcaacttttccgtcacatcaaacttttatgtacacataaacttccaattttttatcatattgttttaatttcttcaaacttctaatttttacgtggaaaacgcaggcttagtactatatatctgacatgcggcaggcgcgagctcgatctgtttccatgttccaccacgattaaccttccagacacatggaagagacgagcacctcgtgtcgccagtagtagacaggatggatggtgatcaccggtctcatttgtttcgtttatgtttacgattatacgaaccacttattaatatttttttagaaaaatatgagaaacttttatacgtgtaccaagctatttctagatccgtccatgcgtgcacgcacatcctgattatcggtttaagtcttgctttcaggcactgctactatagctgttttgactatcagggcatctgtatatggaccaaatagtccatataggtgggacccatataagtggtcttttattatttctattttcacaatgtatatagatagcaattgacattaagatgggacccacactctaaaaaaaaattacttccaaatgctatagttctctcatgaaagaagcaaaaagagagatagtatattttaatctatatgggtggtctttatagctatcggtagcttatcatatggctcttcctaatgccacctcccacaatggtaaaggtacccatatagagttataaggactgttttttggccacattgtggatgccctcatggtagtacatttcttcaataatttatgctcggttatacaaacttttgtaaccccagatcgaatacaggagaggcgacctcaaatccttttttttacttaaaaaggtagaaaggctttaccttataaccattttactaatggtgaatcaaagattaaaaaagggtgaatagctaatttagtccctcaagtttcagcgaaggctcaatttggtccttcacgtttcattttatccacatagatccttcaaatatttgttttgtcttgaaatcatccttgggtccacttaatatgccatatggctatttctagtcaatatttctattagaaaatgtcatttttgcccttaatttgtatacatctatatactagaaaagagaaagccaacataaataaacaacattacagatctacttcccattatttcgacatgtgcacatgaaacttaagcaattgctatcgtatacacttgctagtacataattttttttcgttttacataatatactatgtattatctataaaaaattcaagcatgcaatttctctcttatatatgtgaatgatgaggggtataagtgtcatttatgaagagagttgttggttcaaggataagtttgaactaaaatgaaaacttgaaggattaatatggatagattgaaacatcaaggactaaactgagtctcagatgaaacttggaggaccactttagctattcacccattaaaaaaacaaaagtaggagaacacagggagaacagtagaggggtaaaaaattaagggcagagaaacaaacagagcaacagaaggaaaaggtagaaagatagaaaagaagaaaaaaaaagacaaaggggctgggaaacagccctaaaattaactcagcttgttcatccattgatggataagatcgcgactgttgtttgcgacacggtgcttccaaagactgaggtcttctttgatgtggtgtataagctgtgaaagccgtataaactttcattccggaatgttagttgcacgattccgagccttccaaagggtgtgcacgcacgcggcaaagcaaattggccagccaggttgcagctggttcggggctgtatcgtcatgacagtctcgacgacctcaagtcttcagtcttctcactgctttggtcttcggcattggcagtgtcccggtctagttcctgaaaaaagttataagttaggggaaagttgtaagttcagaaaaaaaaagttaaaagtttatatgtgtaggaaagtttttgatgtgatatgatataatggaaagttaaaaatttagggtagttaagggttaactaaacacggcccaagctgccgcgtgcatacgccatgctatgctccaaatgctcgcggtcgctgttgcactgaatgtgccgtccttgacgggctcatctagctcgtacggttgcatgtacatcgtttgagttcaatcggacggagtgatcgagccgaccatctcgcgcgatactgtcgtatataaagccgtgccgtgcgctctgcagtctgcagtctgcacacacgatcgagaaacacaattgacagtacagaatttgtaagttgttgatttgcgccatgagaaggcttctcccgctcgccggcgccacgctgctgatcgcggcggccggcggcgccagcgggcagcaggcgggtgttgggtcgatcatcacgcgggcgatgttcgagtcgatgctgagccaccgtggggaccaaggttgccagggcgccttctacacctacgacgcgttcatcaaggccgccggagatttccctagattcggcacgaccggcaacgacgaaacgcgccggcgcgagctcgccgctttctttggccagacctcccacgaaactacaggtagtactcactactcacaagctagtcacaaccttcacagttcagatcacttaatttcttctgtttttatttgcaaattaaacggattactccatacaaaaggtggatgggcaactgctcctgatggaccctttgcttggggatactgccgggtgaacgagatcacgccgtcggacccgccctactacggccgaggacccatacagcttactcagtacgttcataaaaaaaaaccgcacacaaacagttctaagttattgcaacacatatcgtctcatgcaatgaaatctattactactaatctacaaataatcaatggatccaccaaaataaatctgatatgatgcatgctctcgtatgtattatgcagtaagtacaactaccagctagccggggacgcgttgggtctggacctggtgaacaaccccgacctggtgtcaagcgaccccgtggtggcgttcaggacggccatctggttctggatgacggcgcagtcacccaagccgtcgtgccacgacgtaatcaccaaccagtggacgccgtccggcgatgaccgtagctccgggaggctccccggctacggcatggccaccaacatcatcaacggcggtgaagagtgcggcaagggctactccaccgacaacgccaaggaccgggtcggctactacaagaggtactgcgacatgttccgcgtaggatacggagataacatagcctgcagggaccagaagccctacggaggaggttaagcactggagacgatcgactgggagtacgtcgtcataagcggattctcctagtgctagtacagctgctggttgcttgctaatggctagcttagccttcgcgtacatacgtatatgtacgtgatactagtacgaataaagctagcagagagcgttcgcggatatcatgtaacagatatgagtatatgacacatggtcgcttatctcacatgttattgtgaaataatattattactggtggaacgatgcccctagttaaactgatcgtgtgaccggtatctgtgttaattttcttcaattgctttcgcatctcagctcccacggcgataagcgatcatgagctagcgctgtctctgccgcgcgctgcactcgccgtacgtacaagcccaacgccaaagttgccgcttggcgccgcgcacctaactggatctatctcccccaaccaccgaaacaggaggcgagagtcgcgaagactggatcgggggagcatatcgatcagtcttctgctagtgctacatcaaacatattttacttgcaagtgtctttgacaaactcaaactcgtacagcgctccgaaggttgtcaaaagcgaatattgtttgcgcagaaattttggcccattgggtgagtagtgtcccctgcgggctgtggtccgaatcagccaccagtttgtttagcgggcttctccgcgcacaaaatttggcccatacatctttcttgtattgctgggttcctaggatctgttgtttcgatctgttataatcggtgcacaaaaaattggcggcgcaaacatgaatataaagttcttgaatcatagtcttataagagattctagcattgtcaagtcagaaagcatcatattatcttgagagaagaccaaaagattgattgatatctcggtgctactactatatgtacaatcgaatccacagctagccattctacgctacttgttcttcgtcgacgggtgatttgatctcttgctcttgcacatgcatctggagatcgtgatcgactcctcttgcttcgatgcacaatgtaattctctgccccttgcttagtagtagagcagatgggcgtagggagacaggcagtgctggtcctgccacgggctgcgcagctgcgtcaggaacgggtcctgcagccagtccatcgccggaagctgcaggctcggcagctggctcaccgccgggagctgtaggctcgtcgccgacgccaccgtgaccgtgacgtctgcttcttccttcttggcttcccttggtgcgccagcgccgccgttcttgctgctgctgccggacggcgccgccgacgaggatgaggactggatcaggaagccgctgtcgtggacgtcgtccgacgagaagtagtcgtcgccggtggaggcggaggcgtcgtggacgagggatgctctcgtcgccgtgtagtctccgtgacttgatcctctctgcatctcttccattgccgaggctctctgctccagctccttcagtggcgtcgccttccggtatatcttgcagagcaccatgtcctcctgccgccaaacacagtgtgagaaaaatccaagttaaaattgtactactagtggagtatttgttctctggagtaaatttacatgtacaatggtaaaaatcaaggcagtcaactcccaagtcaaccgtgtcaattcttaattcttaatgcttggtgcgctttcgtggaatatctacatcattgatactgcaagtctactgggacaacgactacattgcaccccattttcacaccaaaaacaaccaaattaatgagagcattcactgccaatgtactaatactctaatactagtactacatatgacatgatcattgttcgttcaaaaaagaaataaatgacatgatcattctcacttcattccgatcattttttttgtgaccattttaagaattcagtagtactaatattttgcgatcacttaaaggattcgttctaataattaactctgcaactgattgttcttgttaattgctaagagagcattagtttaaccttgggaggcggcgcggcggcgcgggcggcgccgtagtcggggaggcggtactcgttcatgacccagtccgtcttggtgccgcgcggggcgcgaccctggtagaagacgagcgtcttcttgagcccgatcacccgcttcgggtcgccggagctccggatcgccctgtccgaccccgtcgccttccagaacccgcgctccgtcgtccggttcggccgcccgccgttcccggccttcctgtcccgcggcacgaagaagtaccactccctctccccgatcttcgccatgcctgcacatttttacaagaaacacacacatcatcatcatcagatcatccagctcaaacactgtctccgttcttgctgaactctcactgtgtgttggtgtttacctgggaggtcccagggatcatggcggtagatgttgagggtgccgatgatgttgaagtggagcttcttgcctaggacgacgcgggagaggtagaagtcgaggagctcctcctccgtggggtggaaacggaagcccgggaggtcctgctccacctccatggacggcccagccacagccactgccgccgccattgatgacagtgtgctctgctcgctcgctcgctcgctctgctccaggtggtggtggtggttgcctctgcacttggcttgccgatcttgatttttactggagacgatggacgaggtgaggtggagatggttgtggatgtggaggcaacgagcttatatagaaaagaaaggcattgcattgcttgaatactttaacgcggtttcatggagaaaaccggtcgcaatttcttagcactggtgacaacgaccagtgcagtctccagtgcttggcttcagtagtagtaaaaaataatctgggcggcttaacagtaaaatttatttaactgtatttaatttggagggttttgcttatttgtgagtgtgcattaggagacttgtcaggtcacacaaattgactcatttttcactcacctgaaacatatggcattatggcctattcattcccttttgctgtgccgaatatttatgagtaactctccaatttggctgctggggtgagagttattccacagttttaaatttgaaaacgatatctgttttacataattttttttacaaataatctgttttactcaataattgaagtgcaatcatttctgcaggcattctctcggtttatttattggtcttcatgttttactacttgattaagatcgtttagaattttcgtgattcgcataagaaattaagtgttccttacgaagttcatgtcgtccgagaatgtaactttctcaacaggtggaggtaattagccatgatatcgtctaaatgagtaatttaatttgtgattttttttgcataacttgtcattaattactactacctccatattaaaatataagagattttgtccacgtagataaatagtctacatgtaatcaatggtgtgtgaacgttgcataattgtattgtgtttgtatcagtggggattttttttagaaaactcataaaggatctaccatgcaaaatttcaacaagctggatatctacatacttaattagactttctgctgtaattccacaataaacttcagccttgtcatcggatcatataattaaatgataccatgttaactaaaccaatatgtaacactgcatggtcttattaattaggcgattatatattgttgagcctctcgaaactgtgaccggactagatcatatacgatgtccacatcaatggaatattggacttggtataagcttgtcggatagagattgcgaccaattccaaaattaaagatgtcattgtcatgtactacattcttttctgtttctcttcgagataccgcgctaacctatagttataaagttgaatgatagtaatatgaaaccctaatttattccttcttaagaaaaggaagaagagagagtaacgtctggttaatcttgctgtattattccgggaaaggcggccacatctcattttacttgcacacttttgtttgctgaagggttggcgcagcatgatcttcgtctgactaatctgttaagaaaaacagcttattgttaaagattttaaacatgtttttggacttaaagttgccgaggatcttcgatacacttacaaaggatcatggagcattgcagatcaatatagaagtaggacaagtgtaattaccatcagattaccattttcatgcgtgcatagtagtacttgtggtctaattaattgcctcttttttaaggtagcatcacggcagtcctaccttttaaacatgtggtatgtgacatctagaatacttttcttttcaatgggcagaaaaacgactggagagattatctgttgatcaggcatccccaatgtgaatttgaactaagcaatttaatgatgaacaggcagaacagaaactgttggtcagttccacgttttaccgatgacttgatggtctcccaacatctatctggaaagcaaaacaggtaatgaggtttccattttatccctgcttttaccttccctttcactttcttacgggagactggagttaagtcagaacgaaaaattacttcaatttcaggtaagagactagaattactgtaccatgaaaggtgcgataacagaaagaagagtcacaagccacagtgtcgtggcttcgacaccatgtcacccttgcgtttggtccatttgagaggattgcaacaatcagatcttcaatcagcaaaggattggaaatcccggaccaatgatcgttagcaggttctcataggttgttcatattctctaataaaccaaaacggcttcttagagataaaaattaatttataggtaaaatttttatatgtatgttagcgtcttcagagttaatgctgaaaaagaaactacgttgaaaatgtcttaacatcaactttaaaattaagtttgaaaattaaaagtttggctttggctatgacttattagggcaccaatggggctcttagccggtgattaggggcctgtttagtttccaaacaaaatttttcatgctgtcacgtcgaatgtttggacacatgcatagagtattaaacgtagacgaaaaaaaaccaattacacagttcgccaggaaattgcgaaacgaatcttttaagccttattgtgccatgatttgacaatgtggtgctatagtaaacatttgctaatgacggattaattaggcttaataaatttgtcccgcaattttctggcggaatctataatttattttgttattagactatgtttaatacttcaaatgtgtgtctgtatatccgatgtgacaggtaagggcaaaaatttttttccaactaacgccgcgtttagttctgaagtttttcttcaaacttccaactttttcatcacatcaaaacttccgtcttttacgtcacatcgtttcaatttaaaccaaacttttaattttgatatgaactaaacaaaggctaaacaagccctaggttttggaggtcagccatcaagctcgtttgagaactccagtgaggcagcgactagtagacatgaaatttttcagccttttcgaccttagctagctaactataggtgtgtggctgcctgtcgcgttttggtcatcttgaccgactttgaacaaagactgcatgcatattcatcatgaaaaggactagtgtgacgaacctaacgaattcctagtggaccaaccaaaggccccatcgtttgtcttttttcttgacaagccaaaacagcttattagagaataaaaataaatttataggtaaaaattttatatatgtgttcttggtgacttaaaagccaatgctgtaaaagaaactacgttgaaaatatctcaaaattaatctcaaaattaagtttgaaaatttaaattttgacttttttttagctgtttaggtcatccgtgggagcaaaagagcttatatagtttctcactgtttgacagcgacattacacgcattgggtgggtcgtgacaaaaatatttgaacaaaactcggttcctactagttatgtgtacaaacaccgatcacaactgacaggacagaaaggatgaaataatttcctcatgaaacggtcagagttcctgaatttcagcaagaattcagacgggataaggcgatcggagttttcctagctacttcctaaagttataacaggcaaagcgcatgaaggtttatggtgtataaacaacatgtaagttaggcaaatgcctgggaagtcatgcatatgagaatatgattctagtagctcttgtgcttaacttggtaaggaaaaatgtgtctaatgcatgcctgtgtgaatgtcctgaacagatataaacagaagactgcatgctgattggttccatatatagctctcacaaaaaaaaatataatcactaatgtaaagagaatatgaaagcatgcgtagtattagacgtagtttctagagtataatcaacgggagacggattttttttcctgaggacatattcccttttttaatgtcatttaaaaattcttcaaaaaaattaaaatcttttgatacgataaatcaatatgtgatgttcattccacaaacatgcaaattcaaatttgatttatataattagaaacgaaaataataattttgactatgaattgtacgttctattaatagttaaatttatttaatttttctacttgtattaagttaaatttaatcctacatgtttgtttagtgacatattacatattgatctatcttactattttttaaatttttagtgatattttaagcgacatgaaaaaggagagaacatcctttcaagagataaatagactttccttagcttgttagtacagttcagtagtgccaaccacaggaccacttatacatatgcatatctaaactgtttattactaactaaataaaatcatttatagtaaaacttttatatatgtgttcgtagtgattgaaaagtaatcgataaaaaatccacaaaatcaactttaaaattagggtaaaatatgtaaaatttgattcacgttgataataattacctgaaggtataaaaattaatatagaatttagatatcttaagatactttctcaatgatttaaaatttctcttagaactaaattttaaatttaaagtttggtttataagcataaaataagcgaaacgataggctgcctgtcataacgaagtacgttgatgcattttctgtggtttggctaagaaaaataacgtgcttagttaggcatcacgcggccttttcttttcctgttgaaactagtagtgaatttgaaggttgcattacactgacagacagtcaagtaccgtaccactctttctcgttctttccttgaccggttcaaatgtactgtgccggtacaaacaaacaaacgaacaaagtatgaattccaagcctctaggttctaactactcatccatcacataaaaaaacaataacttgaattccaaatccatgaccatgaagatatcctttcatgcattcacacatttcaggacctcctttggaataggggaattgttagaggattatacaattccaactaattaacggcatggtacgctgtcaattgttcggtactactccatgtccatgtccatgtccatgtccagcagaaattaagtcatgtcagtttcagtgctctttgttagactactgtattttgtaagcactcaacactaaccacaagagtagcagagaccttggtggtggactactccgcgtgaaagtcagtaggccggccgttagtgtacaagagatttgcttgattttcctctgcatgtccggttgtccaccctctgaaatggggaacagagacagtagccatagacgtctcgtcaacgcagaggcgaggcgaccattcaagtcgagtcgtccaccgaggagaccacacacctcatctccctgatcaattggctgagcagttcgctatagccagtgcttgttccattttaaaatataagagattttaaacgtggatataacatattataatatttttatttaaattcgtaatattaaaatatatcttatttatttaaaattatttatattttggacggagggagagctaggtttgcggaaattttcaatagcctcatgggcagacaagttaaagcaagttatctaagagaaaaggttaaagtagttacagtcacattataaagttctgttaaacaacttgcagcagattcggcccatctgcaaagtgccattgttaagcagcatatactaatactcctactatgtgatttgctatttgacgcgtgggcctactagccgtacgaaataaagtcgtattggacgcgtagctatgttgcttctacgtctgcttcgtcatggttcgtttcgttcgtacgcagggaatcaagcatatgataaccactggaatagtaacggtaatagcaatggctagagggagctccagtggcctgtgcgaagcatacggaatccgaatagcagcaacctccttcagagatagacgtactgtacgtacttgccatcaactaagcagtttcagtgaaacttccaccatgctttaatgctttgcctgatcccagattcccagacttcagtgcaacacccgggaaaattcggactcgccgcactcgctgcaactcctagcatgtgtttagattggcccaaagtttagaatttggttgaaattaaagacgatgtgactgaaaagttatgtgtgtatgaaaggtttgatgtgatggaaagttgaaagtttaaaaaaaaaaactttggaacacacagtagctcgcaaggcgccattccgccgaattgcttaggcaacaggctacttgcatgggagttcgtttttgcgtgtgcgattcggtgcggttgcggcaccgggcttgatggattgggtagtggccgaggccgatggctctccggcaatttgttcggcccagccgcgcgtggcgagaccgtgggcgtgggagttcacgcacgcagggagcgggtgtgggttgccgggctaaaaagccgccggcaacagccacgtcccgccgcgcgtcgcacgtccgcgccacgaggcaccgacctatccccgcctcgcgcgccaagcgctccacgcgccgcccagcgccgcaaggcccgcaaatacgtggatcccccacggcgcaacgccgcaaataatttacccgcacgcaagcctgcacgcgaacgttcgcgacacttcgtaccaatccattgtccgtcgaacgccagaactatttaaccaagaccaggcgcgcgaagagcgaacgacgctatagcttcagctacgtagccgttgttcatcactcactcaactcagctcagtagtcagtgcgtactagggaccgatcgatggagaagctggtgccgaacacgaagaaggcaatggaggacaaggaggagaagcccaaggtgccttcgagcgacccggacctcgtcgacctcgtcgccggcgagcagccgcagctgcagcgggagcaccagccgcccaacatctccgagatgaagccgctgacgcgggaggcgtacggcggcgggatgtacgccaacgaggggcggagggacccgacgcggccgcgcgccagcgccacgcagagcgccgacggcccggaggaggccgccgtcaggcccaagcacgcgccgccgccgtccaccggcgaccgcgacctcgacatcaccggccagtcctacatccagtagtttgttgtgtgtgtccgtgccgtgacggtgtatgcgtgtagtcaggcagtttggtccggaacaaagatgtgcataggtcgttccacgctgtaacgaataaatgtaagtttacttgctgtaatttggcccaataaggctaccggcctaccaaccggagatcgttagtcttggcctactaactcttatggaccttgccaatgggctaatctgaccaagtgcccatggatcataataaagtcacgaggaacctctcttatcagcccgcaaaattttaccgttttcatcccttaatatcctttaatataattaatatcccttaatataaaggattttgatattttgcttgcactatttaaccattcattgtattttaaaaaattatataaatatataaaaaaaagttgtgcttaaaagtactttgataataaaaagtactttgataataaagtaagtcacaaataaaataataataattttaaattttttaataagataaatggttaaacaatataaataaaatatcaaaatctcttatattaagatacagatatggtaatttttaaatgattttgaagttttgttttcattatgctttatattttcaccactacctagctaaaataaatcttactaaaataaacgtttggatgacacaaaacattttaactggatagatgctgccacttttccacgacaacaacgtaagctgccatggccacggcagaggcccgcggaaccacagccaagcgtagatagcctccaaaattctcgacggtaacacgcgtgtcaccgtgtcagtgtctccacggtcaatgcttatccagtatatctatccaaagccggggaggtaggagacatgttccacggcgccgcgccatctgcaccggccgcgctgagccacgagttacctcagcacctggccgcgcttgtggcgggagccggccgtttcactctcgcgtgcgcgtgacgtggacgatccgtggccgctagacacgcgagtcgcttttccacgtagccttttgtcgcgacggtctctggcctggtcctgatcgggttcagtagagccgcctggttggtcgccacttgggacaggagcgctttttgtccacatgctgtgactttgcgtggagccacgtaagatagaccaggccatgtgatccgtgatcagtgctatactatgctttagcgtacgtgatttatggaatttaattttatgatataatatatatgattttaaaaacattattttagtataccatcttattgtcagaagttgaaggtttaacccatcacacattttcttaagttcttttctttttatttttgagactttttggttgtatgctcacaggcagagatcagagatacaatccatttctattatttaaaaatttttactttattttcatttataattctaatgaattttagcattgtaaaatttagttgaaaaatagactaaacaaattcttatcattgttttcttatgaagttttagaaaatcccaaagcttccactgttaaaactctacataagactttaaactgaagtctgacactatcaaaatttaatcccaccaaaatatagcaaatggtaccgccatttgtaatactaaatattggtaaggttaaaaattacaacaaagtaaaaagcccaacgtgcgtatatagggaccagtgtcgcgtgataataataattttatctttgctagtgtgcgtgagacacaagcagcacaagacatgggacggggtcttctagtaggagtgccaaaacaatttgagctcacgtcttgggattccactaccgattttaaactgcattttcagataaagtgtgtgaattatcacaaacaaaataaaatgctttttttcattagtttccagaagagtaggggagagaggctggccaacttgttgggccgggccgaccgtgcggctccctgcgtaccgatcaccacaaacttagcacacggtggcatccttgcggtgggcccacatcggggggtcccctcctgattactgccaatcttgactcccaccgacaagcgggacccaccagcatccttcgtcttcttcccaagccccatgttcttctccttcctcctcatcgccactcctctcccccacctgcaaagatctcccacccctaaacaaatccaaataaaagccccgaaaaaaaaggcttgctcatttatgtctcctcatttccgcgagctgattcgcaatcaatcgctctctcgctggttcggatgatgcccgcggtttccctcttcgccaccgcccctttaaaaccctccccctcgcctccgggctcccaccaccgccgccactgagccagtccgccgccgccgccgccgctcctgaagccctcgccgtggcatgagaagatggccgcgtgctccagggggctcgtggcgcggccgttcgatctgaccgcgaggggggcggcgcactggccgtgccccgccccgcgacgccgcgcgatccgatgctgctgccgcgcgcagcaggagccgcggaggcgcctctccaaggccgcggcggccgcgccggagcgcaccgaggagtggcgcatcgacgggaacaagcccgccgctgccgcccggggcaggcgtcgcgccagcctcaccgcaatgccgtcactccccttcccttctcctcggtacgtgcacggcggctcgtcactgaacatggcccatttttctgccttatccagtcaggcctcgcatttgccacttacagtaacatgttgtctaatcattccaacatatggattgttttttgctttatgctgaattgtcgtagtgacaagttaatgtgccaatgcttttgacacacgctttatgtagtggaataaaccgtacctttctgctgttgcacgaatgctctttgttcagagaatgaattttgatggtagactttgttttcactagtatagttctaggaggcagtggaaacaacagaatttctatccacggtgcacgccaagagggccagctcctcaatcccgtgatactccgccgaagagaggtgggttccttgctgatacttccaaattttgtgatagacatagtgtactccaaaaggaaacacccgacccgcagttccaagtgtatttttcagctttgctaaggaaatgcatttgttttctttgccacctgccttatagacactggtattgctagtgagaaggaatggggaatcaaccttctggatgaagcagtcaaggagtctgggacaaatgaagatggaagcacctggtacagggagagtggagacgatcgtggtgataatgggtacaggtgtcgctgggctaggatgggaggacagagtcatgatggtaccactgaatggaaagagacggtatgttcttgttgttttacccttaactgataatattctagtacaaatttatcaagttgtatacctttgtatgatgcacctgagttaagagttaccatctcagttttgtgcaaacaccacattttcgtatgagaaggatctagaaaagatttctgggatgtagccattatattccaatgacttctttatgtaacttctgatgctaatgagctgttgttgatgcttgtggcactagttagaatcgaagatatgtctgccatcctgcaagttgcttcgtgcttgttccaatagctatagcgcactctgcaatagatccaacttgcactttcttacttgactgagaatagggatttggaattataatctcccaggatttcataggccgtagctaactcttttggcacattaatcaatgctggacagaattcttgagttgttaaaaagattttttctaacagatctcaataatttattatgtggcagtggtgggagaaaagtgattggaccggatataaggagttaggtatgaacatatctttataatgaaggctctggtagcaaatggtctttgtaatttgttgttaaatttcctaagaattcagttaattttcttatttatgtgtgcccttttccttttgcatatctgatcagccgtcgttgacttttcattacaaatctctcacattaggtgcggagaagtctggaaagaatggtgaaggtgattcttggtgggagaaatggaaagaagttctttaccaagatgaatggaggtaaattattagcatgcaaattcatttttttaatgatactagctccttgcttaaataatacaaaaatacataatctccactgaattttaactaattttgtcaccaaaaataagtttactgttctttgtttctgcctgctgaagaaaacaattgtttggggaggggggggggggaggacaattgttgaccccttggttatacttctgtgaacaaagaactttgattgtgttaagcgcttggcgcttgcaatttcttgttgtctgtttggaacaattttgtttgaccatatatccatgctctatttacttatatttgaaatttagcacattattgactgttattaccagacatggctatacacttcaacttggacttttggacacatcatatgtgcaccaattatcgattagcatgcattattttcttattcctcttatggccttctagtacctttgtttgaaggaaacttgttctgtgggctcaactgctttaggattgttcaatttagtttgaacaataactgtctagaaccaaaacagcataagctctcctgtggattgggatatttgacacgaatatccagtgaaaatcacagtgctgattcataaattatcctgttcagagagtagttctaatttctaaacatactgggcacataatatatttctggcttagtgttatgatcataatgatctgtacttttgagtaaaggtcctgaattctctttaagatagggaaattaaagcaaactaggtgataccccgcgctttgctgcgggattcacgaatgagtatatgttaaatattgtcgaaatgatgaaagttgaaatgttaaaaaaataatatgaggaagatgatttgatacatacttgttgatctctataatataatattatagatgatatgtcatgcttgcatgggatttaaaataggctagaatagtaattgctagtgagtgaaaatgtggcatgcttgcatgggattttaaatgggttagaatagtaatggctagtggatgatgatgtggcatgcttgcatgtttagctttagctttagtgggtaccaactatatagaaagtatagattagttaataaatgaccatctagcacaacattgtaaactgtagatcataacatgatttacattgtgcaaacagcaatcttgcaagaatagagaggagcgctgaaaagcaagcgaaatcaggagcagaaaatgctgggtggtatgaaaaatggtgagagttatctcaggctttcgtttaggtttggttgcaattgttctgcaaaatatttgcttgaactgttgaagtgttcatgtttctttcctaggtgggagaaatatgatgccaaaggctggacagaaaaaggtgctcataagtacggaagattaaatgaacaatcctggtgggagaggtggggtgaacattatgatggccggggttttgtattgaaatggtgagcctatatatatagtgctattttgcagactattgttatactgtactttagtttatcttcaagcactataccatacactttacattgtattacatgtttcttatgctgcgcgcattgtggcctaaatttgtagtctaggttgtgcatttacattgtgcatcatatttgaggcacaagttctttatacttttaatttatttgcctgttcaatcatgattggaacatccgatgtatgttaattggtaaccactgcaattcatttgtattacaggacagataagtgggcagagacagacttaggcaccaaatggggggacaaatgggaagagaaattctttgctggaattggttctcgacaaggggagacatggcatgtatcccctggtggagatcgtaagtttcatcgtcatttatatatatgcacagtatccaccttgatgatgggctttgttctctttggatgctggtattaggcataaatgctaagcacctttggacctttgatgcatagaaaaagtttgcctgctgcattggccgaaattcacactggtgcaatctattggaagctatgctggatattttaacatgttgcttttatatatgagctgtatctactgtctgcatactcaggtttagaagttagatcctgtttattgcattgttaaatgtgtgcaccgctcgtagtgtgacttatgacttatctgatttccaattgccatccacttatctgatttgatactttcaggatggtcaagaacttggggagaagagcattttggtaatgggtatgttccatcatgacgctggtctcgcatttggtttgactgacacttgacattaataaatgaattgaaaccacatgggcttgtccttttctaatacactatatgtcattctgcaatggttcttcttgcaacgatactacctggcattacagtagtagctttcttagatactgttgttctcttgtatttcagaaaagttcataaatacggcaagagcacaactggcgagagctgggatttggtagttgatgaggagacgtactacgagtaagattatgtcttgtttggttcttccagacatcttcggagtattttcagatttacaatttggcgttgatctgtgcattgtcaattagggcggagcctcattacggatgggctgatgtcgttggagactcaacacaacttctgtcgatacaacctgtcgaaaggccaccaggagtgtacccaactattgacttcagcgcttcatctccagctccaccttcggatgatccaccaggcatgcctccttcgcctctggaatgagtcatacctgtgccagtacaaaagagaagcttttctgcataggtttccaattttgcctgtaaggggaacattctttgtagaaaggggatcaaccgcagtattgcgttcattggttcattcattctttcgtagcatgttttccttccgcggcttagcgttttatcgttccggactgctgtttgatcaattaggcgaaataatcagtggctcgcgatcatattgtctctatgcttatccatgtgcatttttgcataaaagctccgtataaataacggaggagaaagctctcaatgatatccacgcgttttttagcattgccttgcgatgtggacacctctgtttggctgttggtttgtgtggcgaagagacgtcaacttcgccctgctgtttccattttcctcgcatccagctccggcctgtctgtcctgcttgtatccaagtgtgctgccgtggacgaggctactcgttcacatttgtgactttgaagtccagattggcctcttgtgcaatttaattagcctgacttgggttgccaaagtcttagcgtagtcaagctccccttgaagacgctaagctgcatgcatggctaacgtttgtagtcaaatttccatcggtaattttgaaatttcagtgattttttgttctccaagtctgactcaaaccaatcaattccacacaagttcaccattttctactttgatgcaatcgaaccaaaggatagggaaaggcccacgctgcaaccatttaagtcgccacaagcactagcatcgaggcatactcctcctgctccagtgtcaacacgacagtcaaacaaacaccaagcctctcattcccacctctcgaggagagctttccccaccatggcgtcgctcaccgccgccctggccacgccggcggccgctgccctcctcctcctcgtcctcctcgccgcccccgcctccgccgccaacttcacctgcgcggtggcttcaggcaccacctgcaagtccgccatcctctacacctcccccaacgccaccacctacggcaacctcgtcgcccgcttcaacaccaccaccctccccgacctcctcggcgccaacggcctccccgacggcacgctttcctccgcccccgtcgccgccaattccaccgtcaaaatccccttccgctgccgctgcaacggcgacgtcggccagtcggaccgcctccccatctacgtcgtgcagccgcaggacgggctcgacgccatcgcgcgcaacgtgttcaacgccttcgtcacctaccaggagatcgccgccgcgaacaacatccccgaccccaacaagataaatgtcagccagacgctgtggattccgctgccctgcagctgcgacaaggaggaaggctctaacgtgatgcacctcgcctacagcgtcggcaaaggggagaacacgtcggcgatcgctgccaagtacggggtgacggagtccacgcttctcaccagaaataagatcgacgaccccacgaaattgcagatgggacagattctagatgtcccgctccctggtacgtgccttgctgttactgtttagtatggttcttgcaatcttgtgatcgagctcagaagttttttgtttaacagtgaattttctcagtagactagtcttactagtactataagagaagaaacttgaattagttaggcaggtgtttagttcacttcaaactttctaaaattccatcacatcaaatgtttggatatatgcatggagcattaaatatggacaaaaaaaaaaccaattgcacagtttgcatgtaaattgcgagacgaatcttttgagtctaattacgccatgatttgacaatctgatgctataataaacatttgctaatgacggattaattaggtttaataaattcgtctcgcagtttatatacggaatctatactttgttttgttattagtctacgtttaatacttcaaatgtgtgtccgtatacttcaagaaaattttagcacacgaactaaacacggccttactcgtattactacctctacatggttgactggggagactgaagattagctgtgttgttctgttagtttgcatattaaacttaggttaggtatggtaaattatttgcaatatgctgataatatattgctcggattcagtggtatttgcaatgaacttaggctatggtccccttgcatgatggagtttatcagaatcaaaatatctggttgtgactcggaaagttgctctcaagaaaagatagctagctgcacatgcttcgatcgttgagagattgagacaacatgacacatagctccactagcacatgagtagaaagccacaaaattccatcgcaatgttgaggaatttaagctttagagcttgaattcctgcactctttggacttgtataattagttagccgttgctatcaccggacaaactatctgactttgtggtttaaaattacggaataaactaccaataccaatccacaaagttgaccctcgctactcacaaggtttcaaaatatactattatagtactatcttagatggatcttgatgtttactactattcactttcttcggtaagaatgtcatatgaaacgagttcctagacctagtactaacttctggaaaactggtgtcctcagtgtgccgttcatcaatcagcgatacctcagctgatcacaatctgatgctcctcccggatggcacctatggattcaccgcaggaaactgcatccgctgcagctgcagttcaactacctaccagtatgctcccctattatttccatctccttctaagttgtttctgatcaagcagtaaccaaagaatttacatttcttttcactgtgtcaaccaggctaaactgcactgcagtacagaacaagggatgcccgtcagtgccactgtgcaatggaacgctgaagcttggtgagacgaacggcaccggttgcggatcaacaacgtgcgcctacagtggttactccaacagttcatcgctcatcatacaaaccagccttgcaactaatcagacaacagcctgccagagtaagttgagcccgcaaacctgtacaaactcagagtctctgagtttgtttgagttaaagaaacggcaggtttctaatagttgattttgcaggaggaggatctgggaggtcgcagttcgctaggtccatgtggagcatgtctgttatctccttccacatggtgttgatcattatctgtttcctttgatgttggagactactgcaactctagatggtacatttcaaagagttctctacgatctatgattgttgtatacgatatatgattgttgtcgtaacttagattttgatgactggtttatccagctttgaaatttgagttttgactctgttctttagaggatgagtggcacttgtacggctgcttgaataaaacgtcgatgtattgtattcgatctgcatctgaaaaggaatattcattagataggattattcgaaataaaaagatcccacatgtttttgttataggcgttacatgttctggatggatatataatgtaccatgcggaagtatgaatggacttcccaccttccaatcttccatctacacttcaagccttgcataaagcaaaattgatcttagcaagtctcaggcaaatgctcgaaactagtactagtttctttctgatatcattatttttgttgcgacttgtttttagtattgaagatactttaagcatgacatattttacatatttgcattaagtttctaaataagttgaatggttcaatatcattttcaaaagtccatgtcatgcattcactcctttcatttatatatgacgttggatagttcactaaaatgaattaaccaactcatatataagtggaggagggtgtgtttaaaaacggtgagggtatattcctcattttccccgaataagagggtatattcttttttatgattacttttaagtgcatcctacatgatgctgcacttgactcagttttaacacggaatttatgcaacatccgtgttggtcttcccaaatactgtatcatcagaaaatatcggagtagtcgtgcagggcgctgtcatcttggcagcaaaaccaatcgcagctagtacaatagtacaagactacaacttggatttgctttgcataggcaggcttcccatggccctggccttctcccggagcaagaacttctgcgtcttccccgtcgacgtcttgggcaggtcgccgaacaccaccgtcctcggcgccatgtaacgcggcagccgcgcacggcagaacgcgatgatctcgtgcgccgtcgcgcttgccccgtccttcagcgtgacgaacgcgcacgccgtctcgccccagtggtcgtccggcctcgccaccaccgccgcgtcgagcaccgcgtggtggccgaacagcaccgactccacctcgatcgagctgatgttctcgccgcccgatatgatgatgtccttggcgcgatccttgagctggatatacccgtcagggtggcgcacgccgaggtcgcccgtgcgcagccacccgccgcgcatggcctcctccgtggccgccgcgtccttgtagtacccgctcatgaccgtgttgccgcggagcatgacctcgccgacggcgcgcccgtcggacggcacgctcgccatggtcaccgggtccttgatgtcgacgtcctgcaacatctggtgctgcaccccctggagcgccttgatccgcgcgcgctcggcgagcggcagcgcgtcccactcgggtctccacacgcaccgcgtcgccggcccgtacgtctcggtgaggccgtacccgtgctggacgttgaaaccgagctcctccatcttggccagcacctgcggaggcggcggcgcgccgcccgtcgagatgagcaccctcctcggcagcggcctccgctccgacgccggcgcgttcacgatcatgttgagcaccgtgggcgcgccgcccatgttggtcacgccgtggcgcacgatctgctcgaagatgaccttgggcacgacgttcctgacgcagatgttcgtcccgccctgcgccgccgtggcccacgccatgcaccacccgttgcagtggaacatgggcacggtccagaggtacaccggcatggacgtcatgtcgttgcagagcagcgcggccagcgagttcaggtacgcgccgcggtggctgtagatgacgcccttcggcctcgacgtcgtccccgacgtgtagttgagcgatatcgggtcgcgctcgtcggccggccacctgatctcgaagccccgcggcgcgtccctcagaagcgcctcgtactctagcccgccaccgtcgctgctgctgctgtcgccggtgtcggagatcgcgatgacaaggggaaatttggctttagcatcggcgagcagcctcagggcgtcgtgggcgacggcgaggaactgcgattcgacgaggaaaaccttggcctccgaatgtctgagaaggacggacaccatggccgcgtcgtgccgggtgttcagcgtgcagagcacgccgccggccatcggcacgctgaagtgcagctcgtacatcgccggaatgttcgctgcgatgacggcgacctgaccagcaattaacccatgtcttgttgagagctgaattggcaccaagtacaaagctcatcgaggcatcaagctctggtcgatcacttaccacgtcccggcggccgacgccgaggcgcgcgagcgcggacgccccagcgaggcaccgttcccgcgtctcgcgccacgagtactccctgccgccagagacgacggccgtgcggtcaccgtacacgacggcggcgcgctccaagaagctcaccggggtgagcggcgcgtagtttgcatcgctcggcatacagccttccatggcagctcgtgtaccagcaatcgggatcgatttgtcacactaattagcctctctgaagaagaaccaattgcaactaatgcaatccgatttgtccaaagtgagttggaggataattaaacggatgaccaacactaaaccaaaacgttgttctccatctgagtcagtcttctttcgcgtgcattaattaattgcatacttgatgtgtgcactccggttagattaaagacgaaacgcaggaggtgtgagacgctgagaatacgtagtacatcacgggtcactcaatgagtatcatgctagtggaattatttttcgaaagcacttccagttggcgcaatggaaaaatgccaagagcatttgatcgagacagagggacaatattcaactattcagagcaagctagaaatgcagaattgtgtcagcgttatgtacgttaatgtcggccttttcaactgatgaatgctattactacaggataatggaatggtcgttgaattgtccgtcactattgtcttcgtctcgctccctttacataccttttggatcccctcctagatatcatcgagcgatttgaattcggtgtgcactgatacgaagctgcgctcgtttctcacttctatcttctacttcttcatttttcacatgctcttttcctaagctccatcttcaattcatggctccaaggttactttctacccttatcttatctcctactctttttgccccaaagctcaatccaacgccttcatttttcacatgctcttttcctaaagctccttcttcaattcgtggctccaaggttaccttctatccttatcttatctcctactcttcttgccccaaagctcaatccaaggcctttgtgggtttggggcgataagagcatcaccaagagatacgtataatctttcccaaaaaattatttttgggttttctaaactgaaaataggtagcgaaaaaactgatatctccaagagaaatctaaattttattccaaaaattaaaaaggatccttttgttaaactaacatcagattccgttttcctcccactcacgtgcgcccgcgctcctcactgagaaaaatctggcgcgaatgagagattggggacggcagacgcgccatctctctccctcgaatgaagagagtgaaagatgcggggagggggtttccaaaaaaaaaaggatccggataggacatctattggagactttttttttcaccaaaatctaaaaaaataggattgtgggtgaagtaagggaactattggtgatgctctaagagaggcgtcgaagtaaaagcttgcgaggtgtggaagaggaagagattgccgacaccctctccatggagtttgctttcattattgcctctattctcactaattggtactaactccatcccaaaataagtgcagccgtggatccgtgtccaacgtttggccgtccgtcataaaaaattttcaaataagacgaacgtttaaacgttggatatgaacaggataaaaactgcacttattttgggacggagggagtagtgcgccactcaggggcggagctaggtaggagaggggggggtgcccaggaacccggtcaagaaaactttttagctatagttcatttattttcactatatgtgcacccctctcaattcaaacttagacacttatataagtataaagtagagtaaaacaagtgagtggcacccctcttcatttcgttctagctccgcccctggcgccactagttcaaaatacatagtattggtaaatatatctcgtttaaagtgaaaagatcaaggatagggtggttcatggtgaatcttaggtaaaaataccagctccaatatgcaatttactgaaagtaaaattaataggagccacatgatgggcacaattttggtgaagccactaagataaataagtcatttggccaacatcaaattttgccacagggattggtggcaacctgccagctgacatagtataaattgaaaaaccactcgataaattaatcattttttttaaaaaaaatccaaacttaaactcagacgttcggtaaattttgttcaaaattcacaggttttcgagtggtaatgacaaaaatcggcaaaacccctcgaatcagctaataatctttggaactctgcatactacggcatcccatccaatgtccaacaacagaaatgatattacagtttactattggcagacttggtgagactgcccatggcccgggccttctcccggagcacgaacttctgcgtcttccccgtcgacgtcttgggcaaatcatcgaacaccaccgtcttcggcgccatgtaatgcggcagcctctcccggcaaaagcttatgatctcgccttccgtggcgttggcgccatccttgagcttgacgaacgcgcacggcgtttccccccagtaatcgtccggcctcgccaccaccgccgcctccagcaccgccgggtggctgaagatcaccgactccacctcgatcgagctgatgttctcgccgcccgatatgatgatgtccttggcccggtccttgagctggatgtacccgtcagggtggcgcacggcgaggtccccgctgtgcagccacccgccggccatggattccttcgtcgcgccgatgtccttgtagtacccgctcatcaccgtgttcccccggaacatcacctcgcccaccgtctgcccgtcgtacggcacgttctccatcgtggccgagttcttgacggcgacgtcctgcaccgcgatgtgatggaacccctgccgcgccttcagccgcgcgcgctcctccgccggcaacgcgtcccactccggcatccacgtgcagacggtggcggggccgtacgtctcggtgaggccgtagatgtggtacagcacgaagccgagctcctccacggcgagcaagacgcggggcggcggcgccgcgccgcccgtcatgacgcgcacgggccccggcagagccctcctgtccgcggccggcgcgttggcgatcatgttgagcaccgtcggcgcgccgcccatgtgcgtcaccccgtgccgcgcgatgctgtcgaagatgaccttcgccgtgaagtggcggaggcagatgttggtgccgccctgcatggcgacgccccacggcaggttccagccgttgcagtggaacatgggcacagtccacaggtacgtcggcatggcggtgatgtcgtacgcgaggaccgtcgcgatggtgttgaggtaggcgccgcggtggttgtacaccacgcccttgggccgcgacgtcgtgccggaggtgtagttgagcgtgatcgggtccatctcgtccaccggccaccggatgtcaaactccgacggcgcgtccctgacgagatcctcgtagtccacgcagcccgagtcgcgggcgccggcgccgtcgtcggagatggttaggagaaccggaaggctcgcggcgctggttgagccggcgaggcgcctcagagcggctctcccaacgtcgaggaggtgcgactcgacgaagaacaccttggcgccggagtggctgaggagggtggagatcatggccgcgtcgtgccgcgcgttgaacgtgcacaggaccgcgccggccatcggcacggcgaagtgcagctcgtacatagccggcacgtttgggctcaggacagcaacctgaacatgggacacacgacaatgtgggtcatacgcctgggcctagttttcagactgacccatgattaaatcaggtcgaaattatttcgatcgttgagtggcctgaccaaggaacatgaagaggtggagtggactgtgagtgggacctaaaatccttaccattttctccagaattcctatggatctccgaataaccaataatttgcatggaagccacattacttcgcagttcatactgaaagtataaaagtgaaagatctaaactgcagagaaggccattcgcatgatcgagagttttcatgacttcgctactattactcggtgtcagtagactgtagactcagatttataactggcgttgcaaaaatataaatagcggcaatgcacgaggatattagcagcaaggtaaaattatcccactaactgaagaagtatacgcggcaatgcagaagctttatcgctaactgaatcaagctgtttattctcaaaacaaaaaatcaagctgtttacatgctgatgcatagagagaacattaatatcaagagtactgataggagaagatccgcgaggacgtgaggttatctagcttcaactattcatgggctcatggcaaagattagcggaaatattactcgtaaactatatgtttagcatacttaacaagttttctaccaaaaactttcgggccatcgatctaagctgcatccgccacttcctaccttgttggttcaaaagaagaaacatctaagtagcaaatgctcgcgcacacgataagctaaaagagctagcagcattggtgttccactcaccacatcgccgcgggcggcgagcgcggcggccaagcggacgcaccgcccccgcgcctccctccacgtgtaccgcctctccccgcacaccaccgcggcgcggtcgccgtagacggccgcggcgcgctggatgaagctgatcggcgtcagcggcgcgtggttcgccgcgcaccgcaccgtgccggcatccatgtccagcacctctccctcacacagtcacactccacttagatccaccatcccgcctccatcgcctcgagttatcgaggtggtactaaacgagagctggccgtgctcgagcaggattgctattgcggccgcagggttgggcctgcattgtctttggggctttacttgccctggtgggctttgattggggcgacctggcaagctgcagtgtgaacgaacagcggcgacttgttttcagatggaaaaagtccactttgactcccttaagtaggccgaatctaatacggactcccttagatttggtgtaagggagtcagtgtgaatttttttttccttttcagatcaccacacttaatcaaatgtggatttggtgtggatgaattccctttttgcttcgtacggcgttaggaagatgcaaaactagttgaacttgaacacttgcctcctttttattacccatccacggtgtgctatttttttctgacggattatacctaaatgagaaacatcacctaattgcggtgtttggctaatgggattagaaaatgaattcccaccaaccaaaagatatctttaaatcttaaccattcattattcctcttccatttaatcctaaccctatattcatttctcaatctcaatcccacctcctattttccattatccaaacacacccaataggctaactacggtagaatttctttttttgattttttttagataatagaatcaaatatcccggcctttactcaaacgagctacaaccaattattacatagttcacaaaatagcaaactcacacagtgagtccagaaccacataatgaaaattttaaacaagcccaaaccaatacttgatgctactaagattcataaaagaaagcttgtactaggccttaggcactgcgctgaagtacataattgctgatggtctctacagaatgaaccagtcctaacaagttatgatcctggctcagaaggaacgctagcttgcttaacatatgcaagtcgtttcggggagaggggcagaaggaaaagagactcctagcttaagtattctcgccctgcttcaaaagtacagggcgcgcgctatgccgctatggctttgacataacaaggacattactccactatttacggaggtgctaggccacgagaaaatatatgtgattgggccttgcacattacagaatttcactagattggcccgttagatgtaaatgctaatcgttaaatcaggccgagattatttggatcatcaaatggaccgacaaggatgggaatgaagtgggctgtgattgtgagtttgtgaccgagaccttaagcttatccatctacgcatctccagaaactcccaatggaggtccccgtgaaaccaatgattgcaagcaacattacgcgtcgccgagtttcatgattttgccacgattactcggtgtcaccgtgtcacggtgtcagtaccaatcatgtgacttcaacacgagcgtgcgcatggtacgtaggctaaactaaggccctgttaaatgggactaaaacttttaataccctatcacattaaatatttagacactaattataaatattaaatatagactattaataaagcacatccataatcttggactaattcgcgaaacgaatctattgaatctaattaatccatgattagcctatgtgatgctacagtaaacattctctaattatagattaactaggcttaaaaaatttgtctcgcaaattagctttcatttatataatttgttttataagtagtctatatttaatactctaaattagtacctgaatataggaactaaagttaagtctctgatccaaacaccagctaaactgcctaatcgccgcatcaaagctcgcagacacgacacgccacgccacgataagccaagacgaaaagaaagcaggaacagatcaaatcacgggaagctcgtgttggtaagtactatttccactcaccacatcgccgcgggcgacgccgaagcgggcggcgagcgcggcggccacgcggacgcaccgccgccgcgcctccctccacgtgtgccgcctctccccgcacaccaccgcggcgcggtcgccgtagaccgccgcggcgcgctggatgaagctgagcggcgtcagcggcgcgtagttcgccgcgcaccgcaccgtgccggcctccatgtcgagcacctccccttcggcctccccctcccttcccgcgaggctggagaatagcagagatgctgcgctggatctggcagaagtaaacgctcgctgatggcgccatggcgataaattaatcgcgcggggggaggcgagattagtagtataatccaagtgaggaattgaataatcttggggagattggtgatgacatggtggtgatccggtgctgatgcggcgagctagcctacgcaacgcacgggatgcggctctcatggtgtgtgactgtgccagtgacgctgtcatcttgtatagccgtgtctgtgtcactgtgtgaggctactgttcactccggcagggacgcagcgtatgcatccatatgagctggatttttctgcatcggcatatcgtctcttttcttcgatttttttttgtaaggagtacagaagctttgcccagtatattaaggtggtgtttggatcacaagatactaattttgagtataaaacatagacaacttacaaaactaattacataaataagagctaatttacgtgatatttttttaagcctaattaatctataattagcacatgtttactgtagcattacataggataatcatagattaattaggctcagtagattcgtctcacgaattagtccagagttatagaatatgttttgtcaatagtctacatttaatatttttaatctgtgtcaaacatccgatgtgactgggacatcccatccaaataaggtctaatagagagagtaaaagtatatacagaattatgtacaggtctgaaaaaaagccaaaagaccccggaaaagggcttttcttcgaattggactattctgcatcagcctctcatctagacctttcttctaatggaatgaatgatagagctttttctgccgatgagctgcggcttaccatttgcaagcgaatacgacatccgttctatttttaagtgtaactatgagttttatctgttctatttttaagtgtaactatgagttttattttccaactttgatcgttcatctaatattaaattattttataattaataaaaattacattttaagtgtaactattagttttcgtgtctaacttttatcgtccatctaatataaaattattttataataattaactttttattgttataagatgataaaacatgaataatactctattattttataataattaactttttattgttataagatgataaaacatgaataatactctatacgtgatttatatttttatttttttaaaaaaaataaaataagacagatttaaaattgaacaaaatattgtttttattttttttcaaaatttttttaaatacgaaactccgtagtaggcaagtgaccacctcgatgggaatattttagcttaatctctcgcttatccgcttagcttcacctcatggtagtagcacatagcacccgtcaacttacttatcaaagggcctgtaagtaaacaagagggaccaaattttaaatttaggtaattggcaggggccgcgcgaacgcgtaccccctctaccacaaattatgacgtccactctcccactcggggagatggtaaaccaacgcgctcaccaagtgcaatgtgagccattgatctaggccacggcccttcttgatcggccgtcgaccccgtccaggtaagtatgttgcaacgacgcaccactagcctcttatatagcaggcgctcccatccccatcgcctcgagttgtcgaggtggtactaaacgagacctggtcgtgcagcattgcagctgcctggttgggtctgcattgtattgggcctaattgctgtggtgggctttgagcctttcattggcgcggcctacttggcaagccggagtgtgtacaacggcgacttgttgctttctggtcacgagcacttcagcatcagatggattcggtgtcccgagtggaattgtcaaatcgatgattttagattcctcctttgctacatacggcgttagaacgccagtcatcacacaaaaccagttgaatttaacaattgcctccttttttattatcccatccagatgtaacattttttttctgatgggttagtacatcaaaagaaaaacatctttacctaataggctagtactgtagaatatacttcacgctactgattcagaaaagaaagcttgcactaagtcttaagcactacgctgatgctactgggattcaaaaaagaaagcttgtattctgaagtacatagttgctgctggtctctactaccagtagcaactatgtactggtctccactaccagtacatagtccttacaaagtaaccagaaaaataaacatcacattattacagcggtccaaaggccacgagaaaatataactggggagcttcaggaccatgggtacctgggcaaaaaagagaagcacccttgcataatcagatacccagtgctgtcctctgggaagaaatgtcgaaacatatgctattcctttgaactgccagccaaacatcatcgaacctttttttacttcacaacacttcctggaaagagaacatggattcagacagggtcctagaattactgtgcatcaaacacaaccacatttcttttcacaggaaggtgtagatactaataagggtgtcaacgactaatccgcaaaacccacttttaggccaaaataagccacttacccgcttagtttgacctataagtgggttcacgggttagccacttacacccttaggtatatgattgatgggttcaaaattgcttatttatgtacgggtgagttgttctagaaatgcaggaagtctttgtaaaatcacatgttataaaatggacaaaaggcaatgtgtattactgacaatagaaaactaaccattagctttgtcatctgaaaaactaacggcaacatgctcaaaataatctcttctggcatctggcgtttaatcagaaaaaaatgttagcatatggttaacatgtagctaaaagttaacttgaaaacattggatcacaaaaatttcacccacatacttaccatgtttcatagttaaagaagggtcttccttatctttatacccaactacctttgcagggtttcctactgccatactttaaacattatatataaaaaaaaaggtcagatcaatttgactgaaatactattgtactcatcaaaataaaaatgatgtaaaaacatgcagcaaaaaaaaggcacacgtgtaaaataaataagcatttcattacaaaatacatattacagcgatcacttggggatttgactatgtaaaggcctgctggcataatttgcattatttttcagtgcaagacaataagacacaactgaaggactccttaacccaggaaatatcgaagagcctttcctagggggtatgccaaaagtgaaagggaatatataatctgctgagcacaagagaaagattcttcaccaggcactggtattttggttgatatattcttagattagtctgggatgaacataaccaggtgtcactaaatcaagcaccttaatgggaaacatgatgccatgagcccatgagaaaaaaaataatatctccattaaaatccaaatacttaaaatttacactacaaaaatcaggcaccttttttttatatccgatataatgaagttcctagtccaaaattactttatcatgatcatgttatccccccgcccaccccggcctgcccgcctcccctgattttgctctctttacaaggaaaccacattgcaagaaccagaaaggtcatatctgtaaatgattgtttctacaaatttgacattgcagcaaacactatttaaaaaatattaataggctagctcctaacctgtggggaggtacatcctttaaaacaagggaaccagcagcaatcatggcaccttcgcctacgtttatgttgccgaggatagtagcaccagctccaagaagagccccctgaccaatcttggggtgtctatctccattttccttgccagtaccaccaagtgtaacaccctgtaggaaaagtctgagtttcggtatccaaacaatatcatccatatcgaagtcattgttgttataaacctatctcggcacattgtagtgtatatatgttttaccaactcattagatgtataatcagcacacctgttgtagtgctcaaaactaaaattgcatctagaagtactgctttattttgaattttgcagctagcaaaaactgagttatgctgggcacctgcattaatgaaacccagtttccaacaatggcagtttcaccaataactagacccgttccatgatccaacaatattccctctccaattctggccgctgcagatttagtaataaagaatgtaaggaagataaagtgggaaaaaagggaacatgataaggcataaaagataaaccacaaatgttcataacttcactgttcaaaaatcaaattttaaaagcaatataaaaagaaccaacaattatcaactagaagagtgacataaaattgtcctgccaaagatgataaaacaggctaaatatcgcatatcaccatacaacacttgaatgttaaacacactagcagaccaggaaaatgcaaatatacatcattacagaacaatcatatacctgggtgtatatccactgcaaaaacctgaaaggaatatgataccaaatgttactgaaacagaactatttgctaaagcaatgtaaaaatatgcttcataaagaaatcagtgttcacctcactgatacggctctgcagtgccaatgccagaactttacgaccttgattccataatacatgagctatcctataggattgcacggaatggtaaccctgaagtggttcacaagcaacattagagttcttcatatatgttgatattgtgttttctttgtagcgcagagggctcttattacacataaggctgaatcgaagtatctagcaaatacataccttgaggtacaacaatgcccaactgtattgtgcacaggcaggatctctgtctttaaaggcctgaatcagcagagcgattttatagttgtcaagagatcaatgggataatacagaatgaagcttcatgcaaacacaattacacaaacatggtacatccacagaataatactataacaatgctcacctgagcatcaaggcgaatagaacggcgtatatctttgttgttcatcataacatcattgaaaatgtctattaactgagttgcaagcaatgttggatcttcgagcctgtttgcaaggacgaaactcaacgccctctcgagacagtcatgagatagtacgctggcgtacaagaagctacttaaaataggttccttctctgcctgtgaacagtataagaggcaacaatataaaactaaagctctatcataaataaaaaaccataaagtcatatttaaccacgtatgatgtagctcatgtttaaaactcattcgcatgcaactggagcttggttttattgcttggtcttttattaaaaagaaactaaactttcacacagtcactgatatgcttccgaacctgcgatattggccttcagttctccactaatcagataaattagctataataaactacttgcctcttcactcctagtttttaactggagtaccatttttgcctcctgaattacttggctacactgaactggcaactactcctacacaatagtaactgattcaggagaacaaaatatactaataacatttttttttctcacaagggtcaaggcaactaaattttaattttaaaaaaacattactcaattcatgctatttcccaactgcgcttaactcactcaacacaagtgaaagcagaagacaatatagcgaagtgctaactcagaagaacaagtgaactagcatttctaacccctcaaacccaaatcgagccgaaagaactctctggacctaagaacatgcagaacttcaattaatccaaacacgaccaccaaaaaaaatcgtattttttcctcgttccaacccaaaattcagagtctgtctggcacagtagcagaaaagccgcgatcaaatcagaaggataaaagaagaggtccgatcaatccgcgagagcgatctcgtgagagtactcacctcagacttggcctccgacttgacggcctcccatatggggtccccggcggcgtcgactatgccccgcgccgccgcggcggagctggcccgcgagctccccatcacgtagatggggaacatggtctccgaccggctcctccactcccccgcgcacgatccgcagccaccgccgccgccgccgccaccctgcgcgagcctccctctccccctccccgccgcctcgccgccgtggtcctccaccttctcgagcaccaggcacccgcacgacgtcatgggtgccccccaaggggagggggcttctccctcgcggcggttgtcggccggcccgacgcggcgagtcgccggcgcgcgcgccgcggaagaggagcgagcgagagaggagagggaaggggacgagagcgaatcagcgaacgaaaaccaaaacggcgagtgcgaaagaagcggttggggagcgacggggttattttacggaactgacggcgtcaccgcgcgtctggggatgcgcgcccgagacgagaggagacgagacgacgagaggccccacccttggcggcttgcgcggcggcggcgcgaggaagggattttgcggcgaggtgtgggggaccagagggtggtctggtgctggaacggcagccacggctttttcggtttgcgcctttcggctcgatggctaccactatccccgcgaccccgccccgcggcgcgggggggaaaggggatccagacaaatcgtacggctcgcggcgcccgcgcggccgggtgggtggatgggtggacggggcccgggacgtgtgtgtgtgtggtgccgtgcgtgcgtgcgcgcgcgcgcccaggtcgcgtaggtcgcgtgtgccgccatcgtgtgcgccgcgcgatggtgggcagcgggatgcgccccctgtgccgcgccggttgacacgaaagccttgggtgtgtgtggtgccgtgcgtgcggtcgcatgtgcgcgtgcgccatcgtgccgcgccgggcgacgggtgggcgggtctgtgcaggaagcgtggcctggtcgacacgaactcacgaagctttggtgtttttctgtataaagcaggtgacgccgccggataatcgccaacaacagtgttacagtgtactggagtagaacggaggatgtgatgggcattactgtcatcgtgtcgctgacgcgtgacatgttgtcaacttcctcttttcggctgtgtttagatggattcaaacttccgtcattttctatcacatcaatatgtcatacacataataactttcagtcacatcatttctaatttcaaccaaaatctaaattttgcgctcaactaacacagccttcatctactagggtggtgtggacgggaaatttaactatttgccactcttacgagtgtcaactctccatatgccactattagatttggcctaacatatttaccactagagagagattacgccctaattttttgccactttcgttgggttggagcaccacatcagcatgccagcatggaccggcctagtgaaatgacaattttacccctccattctcaagtggttaatagccaacataatacaattaaatcaactacgcacacatgaataaatgataaaacataataacttgagaacaactcaacacataacatactgcatcattaacacacatgcgcaacaaaaatcaatttttatcccataataacttcttcatcgttagaaatagtactaccaagttcataaccactatcaagttcagagttactgtgaaggccatacataacaagttacatgccattacgcaaggccatacatcattacaaaagcacaataatagaaatagcaacatcaggccaggccatacacttaagttcgttaggccatacacttaagatattcacaccacatagcaaaatatgccataccaaagtgcacatatcatcgcacattacttgcaattagtttttccaaaatatcatgccatagtagaccacaaataaccaatttcactagcaggttgacaaatttcaatccaaaagtttaggtggtgttgcacttttcttcttgcttgcgagcttttttctgggtgtaagcttcttgggtggctccactatagctggagctacttgagagctttggtcaagctccaatgccaacctcctggtgtttgtgatggtgtaaataataaaagaagtttagttcagtgtataataagtaatgaaagctagagaaaaatgaaaagagcataatggtgcttacctcctagtgactggtccagggctgcttgtttgtgatggctgcacttgtgtttctgcagctccttctctagctgtaactgctcttgttcttggtgtagttacttgttcatcactaacaccctttgatttcttccttcccacctttgttgttgttttcttgttcctcttcctgccaaaagaaaaacagttagcatataacagcaagaaaatgaataataattgagatgaaaatacagcacacctctttttggtgccagttagttcacatctagcacttcccttcctgtgtccaaagacaccacattctggacacttaatttgccttgtagccttccccttgcccttctcaagagcagatgggatcctattcttcctttgcctacccacttttcttttcttggacacaggagcaagaagcttgaattctttctcaacttgaggccattgcttcttgtctgtaatgttagggatggttgatgcatatgctgcctgaaatctgagcacagagaaagccttatcaacatatttctccatatttggttgcctcacggttgtgatgactgccaatgcatgttggcaaggtttcccagtaacttgccattccctgcaggtgcaagtgctcttgccaaggtacaccacatgccttgttagctcctcatcagtatgtatctctgtaacgtcagcttggtaaggatc

SEQ ID NO: 4953 - DNA, 2962 bp, Oryza sativa
tatggattgggagaaaaccatcactttcttacttgcgcacatgggggtgcttggcgaaagtcaatgtaccaataacgaagaagcgcaaacttggacctaagactgtggactgtgtctttctgggatatgctcaccacaacattgcctatagatttttaatagttaaatctgaggtacctgacatgcatgttggtacaattatgaagtctcgtgatgctaccttctttgagagatttttcccaatgaaggatacacatagtagttctagccaaccctctgaaataattcccaattcaatcacaccaccagaacaaactgaacatacacatgaacatgttactgaggaggatgacagtgaagctcctcgaaggagcaaaagacaaaggatggctaagtcttttggtgatgatttcactgtgtacctcgtggatgacactcctaagtcaatttcagaagcatacgcatctcctgatgcagactactggaaggaggctgtccgtagtgaaatggattccattatcgctaacgggacttgggagatgacagatcaaccatatgggtgtaaacctgtggggtgcaagtgggtgttcaagaagaagctcaggcctgacggtactattgaaaagtacaaggctcgacttattgctaagggctatactcagaaagaaggcgaagatttctttgacacttactcacctgttgctagattgaccacaattcgtgtgctactttccctagcagcctcacatgatcttctcgttcatcaaatggacgttaagacagcttttcttaatggagctggatgaggagatctatatggatcaacctgatgagtttgtagttgaaagtcaagaaggcaaagtgtgcaaattgttgaagtctttgtatggtctgaaacaagctcctaagcaatggcatgagaaatttgacaaaacattgacatctgtaggctttgcagtcaatgaggcagataaatgtgtgtactatcgccatggtgggggtgagggagttattctgtgcttgtatgttgatgacatactgatatttgggacaaaccttgaggtgataaatgaggttaaatcattcttgtctcaaaattttgatatgaaggatttgggagtagctgatgttatcttaaacattaagctaattagaggtgagaatgggattacactcttgcagtcccattatgtggagaagatcttgaatcgctttggctacattgatagtaagtcttctccaacaccttatgatcctagattgttgcttcgtaagaacaagagaattactaggaatcaactggaatactcccaaatcattggctcgctgatgtatctggctagtgcaactaggcctgatatctcatttgctgtaagcaagttgagctggtttacctctaatccgggagatgatcactggcgtgcgcttgagcgagtaatgcgctatctgaaaggtactatggaattggggcttcactattctgggtatcctgcggtactggagggatatagtgattctaactggatctctgatgtggatgagatcaaagccactagtggatatgtcttcatactgggtggtggtgctgtttcgtggaggtcttgtaaacagactattttgatgaggtcaaccatggaagcagaactgatggcactagatactgctactgttgaggtagaatggctgcgtgatctattaatggatctgcctattgttgaaaaaccggtgctggctatccttatgaactgtgacaatcaaacggtaattgtcaaagtgaatagttctaaggataatatgaaatcatctagacatgtgaaaagacgattgaagtctgtcaggaaattaagaaactccggagttataacgttggattacatccaaacagcgagaaacctggcagatcccttcatgaagggactatcacgaaatgtgatagacaatgcatcgaaggagatgggtttgagacccatgtgagttatactatggtggtaacccagtctatgtgatcggagatcccgtgaattagatcctgggaagaacaaaccattaataaactagaggagagtaccaatatatataccctctccaagtgaagatgcatatactctcgtgagctgcaaggcaggttggctatgccttaatgagttctgttggctttaattagcaaagatgttgtcctgcagagcattcttgaaggaactcacctttgtgagcttgactgttggtcgcagtctatgaagattttgggtgaatctgctaggaagcttactaaagacctaggagtatgacttatacgctccacccgtggggtagtctacagacgatctagtaccagataagactctgagtgaaacttgcttgcacaagacttgcgattcaaggcgtagtccattgttcaagttgtgagtaagtgtagcttgaagttctaggtggatgtttaaccttgattggtctccatcgaaccgctggtatataaacagtacattggaaaaggcaaatctcagtgggattttgagatttggtgggggattgttggaattaatgaatgggccttagcccactcgaagattaattctttggaaaatcacaaaagcccacctcatgggatggcatacatgtggagtttagtaccaccttgcttattctaggagagggggacctccttaaaagggaggatgccctcctagccacttgaagcatgtgtggtggagagaagaggggaaacacacgcgcgcgctcgctcgcctcgcctcgcctggcagggcaggcggcgcgcgtgcacgatgtacgcgtcgaatggtccgaaaaattggcgcgcgtgcacgacgtacgcagatgcagcctccttttgcagttttgttttgctgcaaattcggattcgtttttgttttggaaacgttccgaaaaatccggtgtgtgcaaacggcgtggagtccggataagttacgcgcgacttatccgg

SEQ ID NO: 4954 - DNA, 14370 bp, Oryza sativa
  unsure (1)..(14370): unsure at all n locations
actgcttagtttacatgtgtagatctaatgatgcgttaatgctagtatacatctgtaatgtcatgatttatttataaaatatattaaatcattatatgcctatattctcaacaacatgttcctctcctcccaccccagcgttgtcaactcgattgaatggatccatagcttcagaatctcttcaaattaagttgaaaattgacggctgcgcgcttttgcgcggtggagtgaatttcagttcaaacatgcatgggatggaagtcgctcattgaagaaaggttggaggcgcaactgccgaggcaacaataaagcacatgcaacggagttgtaataattcatcagcggaaaagctagcggcctctctcctcttcctgcaaatgaaaactaaaaaagcagccttaacgttcgtgccacaaaaggagaagagaaaaaaaaagagaaacgcatcgaattcagtggttgttacatcatctttaatttgagcgaaaccgatgccgtgctgacgccgtcagcccgtgcccatcgacggcgacggacggacggcctagctgacggagtaattagcaggcagcaacagcaagtgccatcttctttggtgtttatttaccacgctgccattgcattgccatccgatcaagtactgtacaatcactgctactgttgaagcttagtgttcagtttgaacagcaagagcaatagtataattaaagcgtgtagcagccttgacaggcaggggcaacgagctgcctgcctgcctgcctgatcaggttctgatggagcttatgacgaactcaagaggccagagagaaaaaaaaaacgactgtcactgagactgccaggtatcactcgctcgtcttgtgtttgtttcacttgcagtttggcagtgatcgagcaaaaccaacacaaagctgatcgatttattactgcttctccatggattcatcacaactcaaatacagtctctctctttcatgcaattcatcaaatggaaggatggagataggagtaagtttggtcagagtgtttggtgtagttgccagccaggctataaacaaacagtagattggtgagttggcaggggaaatgcccagttggagcacgacaggtcacacaaacttttgctgtccgtccacgtccaaacaggacacggccgtgggtccacaaagtaaggctctgtcgtgtgggcacatctgagccgtctggtgacgagacggggcccatccgtgccgcactgcagcagtggcaattctgtagatataggcccactcaaagggcagttacggaagctggagccggactgacttacccgtagtaataggagagtacatcgggtttccgtttcatgggccaatggccgtctcgtctcttcttccacgataatcgaggcatacaatcgctgccggctgaaacgccagtgaggggcattccggcgaggaggaggtggtcgtcgcgtgctagctgcggcggtggcaccgtgttcgttccctgtacttacagttgaacgacggtgtttaatttggattggtgggtgggcctcttgttatctcctcagttttgcatgtttccactcagctactaataaacaggggaggggaagcttcccgtgtttcccgacggaatgcggcgccaatttggattggaaggaagcttaatcgccatggatggagatggaaggaatcccccgaaatccggacagagacgatggcagtagcagacacagtgggtggccgcccaccattttgcccttcttccccgcgtcgccatgcatctatccgccaagcccgcagcacccatataaaagttgcaatctttctctcaatccgcagccgcagcgactcgctcggaccccctccctgaccccattcaactagccctgcaaaaaaaaaaaaagacggccttttctttcttttttgtcctgtggtttctctactccacagtcaccacaacagtggagtactagtgtttactgtttgcctgcttcgtctccgggcattaaagtccccggagctagcctagcggtgcttgtctctctctctctcattttggtgtctttgaattcaatttttcatcacctgttggttctgctggtgttcacttcatttcttgctgaaaccgaaatgcttttgaagcactaggaggctgctcgagctctcggacatggcggtggtctccggtccggacaagggccggggagcggaggcggtggttgtggtggccgtgcgggccgccgccagggacatctccaaggccgccctcgtctgggctctcacgcacgtcgtccagcacggcgacaccatcctgctcctcgccgtcatgccgccgccgcacaactctggtatacatgcccttcctcttcaacagctttgccaatttacgatgccatgcatttttatactgtatcatggagctctttggatttggtcttcatggatcaactttcactagttcaattatttcctctcgttttaatttcaggcaagaagttctggggcttcccgctctttgcagggggttgtgcgagcgcccacaggagcgtgttgactcagaattcggatgtcgctgatttgtgtaatcaaatgatgctgaaacttcgtgatttttatgatccgaacaaggtatcaaaagggagctaacactagctgctgtgtgtttttacttcaatctttcagcacaagcacctttttctctttctctttttttttttgctaaaaaaatctggttacatttttgtgtagataattacaaaacttaaggttatccctgcatctcctggtggtgtggctactgaatcaaagcgtgcccaagcaagctgggttgtgctagacaagtaatgttatcctgtactacatttcacagtttttacagtgcactgttacttttaacccctcttccgtatctgcatcattgagcaatggtcttgttactcagggagttgaaacatgaagagaaacgttgcatggaagaacttcaatgcaacattgttgctatgaagcgctctcggcccaaagttcttcgtctgaatctggtgaggtctcccccaaaagaatcaaaatcacctctcccgccacttcctgagttgagtgattcagttggtgaaaccgaaagcagtatcaacgaacagcgatgtccgattcgtgaaccggctgtgacaccaagtagcagtccagagtcagaaacagcttttggtagcactgatgttggaacatcctccgtttcaagctcagaccctggcacatctccatattctgcttcagaaacgaatagcacattcaagaaagaggcaaccaaggataacttccagcactctgatgtcaatgtatctgattctgagagtgaagcttcaactcctccagcagcatcatcccttcagccatggatggctgacattttaaaaggatctgcgtcctcaagattagcaggaaaccgtcctagaagaactcgtactcctaccgcagatgctttgctcgagaagatctcgaagctagatctcttggctgaaatcagtgcaatcagaagcaggtctgacttgaacttcagaggaaatgtgagagatgttgtttcattgtcaaggagtgcacctcctggaccaccgcctctgtgttcaatttgtcagcataaaacacctgtatttgggaaacctccacggtggttcagctacgcggaactggaacttgcaactggtggcttctcccaagcaaatttcttggctgagggtgggtttgggtctgttcacagaggtgtcctacctgatggccaggcaatagctgttaagcaatacaaacttgctagctcccaaggtgatgttgagttttgctcagaggtggaagttctaagctgtgcacagcaccggaatgttgtaatgctgattggtttctgtgtcgaagacaagaggcgtttgctagtttacgagtacatttgcaatggatcgctggattcccatctctatggtaagctaattattattctgcaaattctatgtgactgatgaatatagcttagagcaagtttaatatatagccaactactagctccaaatcatctataaccaatctaatagctcattcatacaatagttatctataaaccattaataaatggtcccacctctcatacacacacaatattagagttcgtgctacagctgaccacaaatatgtagcctgtttttcttctctctcttctcttctctcctccacatgtgtttatagctgacttgtagcctgctattggagaagagtgcattggtcctgttgcaataactctctgttgatttagcttatgtcatggccatgttggagtaaaaagcatgagtgttaccttttcaaaccatctgttactccttaggccgtaacaaagagacgttggaatgggctgcaagacagaaaattgcagtaggagctgcgagagggctgcgatatctccatgaagaatgtagggttggttgcataatccatcgtgatatgagaccaaacaacatccttgtcacacatgattttgaaccactggtatgatattccatccctatattatgttggatcttagtcgatggatatgaagatgcataataaacaagactggtcatcttctttccattgaaatgctgttctgtttcaatagatagtaaaattcagtactacatgattaattgatcatatatgcatgcatgatgctgtgaagatgtgccgtacttgtcattctaattggcatcagtggtctttagcctcaacttccttccacataatgagggtgaagtatcgtcatatcgtgtgcaggtcggagattttgggttggctagatggcagcctgatggagacatgggtgtcgaaacaagagtaattggcacatttgggtaagtgctcagccatacaatccatcaatcctgtcctttgtgaggtgtaacttgtgaaaaaggcatatctgagaccattttcggccatgtgcagttatctggcacctgaatatgcgcagagtgggcaaataaccgagaaggccgatgtgtactcatttggggttgtgttagtggaacttgtcactggacgcaaggctgttgatattaacaggccaaagggccagcagttcctcactgaatgggtgagttcgttcacctagtattgcactatttagtgctatatcatcacattagattatgttaagcttggatatttacttttctgacaagtgacaaacgctgataacctcctttttcttatagtacaatggtaagtatgttttgagcctgatggcctcagtagtgccagactgtcagtttccactttcctctgttgaattgactcatccacagttccacactttttcctgatgataagtggcatctctgaattatcattcctgttttgatccatttgcaacaggcacggcctttactggaagagtacgcgatcgacgatctgatcgacccacggctaggggaccggttcagtgaaaatgaggtcctgtgcatgctgcatgcagcaaacctgtgcatacggcgtgaccctcattcgaggcctcgcatgtcccatgttagccacacaccattcttctccacatttctcagtacctatcacctaagcttgatttacatctgtactaataatgatgtttctcctcgcatgtatgaaaaggttctacgcatactggagggcgacatggtggtggaatcaggttgcgtttctgctccatgcagtgaagctgggagcaggagccggcgaatgcttctccaacaagagcagcagagcagcccggctcagcaagattcacagatcatggttgatggtaaaccacagtcctatgtggcgaggagaattgcctgggatagagatacgcagagcttgtcccacagattctagaatctccatctgcacaagaatgcagccaattctgtgcagcctgtactgatgcaattcttttctgctctgctcaaggcctgcagtgtgtgtacagtagtagtggtggtggtggtacagtagtagtaggcttacattatcttgagctctatctaggcttgtaagtgcctgttttgtgtcatgaacgggggaaaaccatccatgggtgttttatgggagggattgttttgcttgtttggaatctcatgtgttgggaacaagatagacaagattgggtttgctattgcttgttctatggctaggatgctgatgtttttgtcaccatgtatccagtagagagcatatctgatgactgatgaggcccagcaagaacagctcccggatgcttcttttcagactccgttgcgagcaatcatccatccgttcattcagcaacgagccatcacgtcacgtcggccgatgcgaaactgaagcagtggtggccacagcgataatccggcagggactgtgggatactgttggtttttacagtacagcaactgcaagatgaagaagctgtggcgcaagtaattgcgtgcagtgacagtggtgtggtggcctcggtcggaacgagacgctgccactagctgccattctgccaatcaatcatgcctgcacacacacacaaaagatgattcctttgcttttgaccattccttggatctgcacagtaactcacaccgtgtccttttctttcccttcgattttctgctcaacttttttcaccaggtgtaaattttctttcagaataaatcaaattcccttcgagtccatttgatgattagcttggagattcatacttcgatgagctcgtcctcatttcggcccacaatgagcttctgggctggaccggacaagagaagtacaaccagtagtgggctggatgtgcattcaattcacacatggataaactgttcctctacaaccacatctgacaaaatcaaccttacagcaccacaggtgacaggtttcagattagcctctttaataaaccatgggatccattctcagctgagcaaaatctctgaaccaacgcacacacgactactcatcagaaacatggcatacactgtccactcctgtcggaaaatagaagcagcacatgagctactatgtctgacaaacacagcaatggtgatggatgggtgcacctcggatatgcacggggatacagacaggcgataaacacaacactcctatctgggaggggcgacataacaacacagtactcaactcgacgacgacacagttttcaggtgaaccaacaagacaaccgagccgctagatccgagcgttcgtttcatttcccacctagcgaggggaactgggcctgatcttcgatcaccggagcggcagcctgtctgcgaccaccgttgccattgtaaccaccatagaaacccccacgatcaccacgacccctgccacggccacgaccacggccagggttgtagtacctctctccttcagccggcttcaagaattcattgatgctcagggacttcaccaagaatggaccaaacaggagaaggacaaagacaagtcaatattgtgagccagaacagccagtgtaggcttatgattaatgagccaaaaaaatgaaataccttcttggtacgttcatccttttcatccttttctttctttttcaagtccttgtcagagccctgataataataaaagttgagcggaaatagacatgtactgaaacatgttcagaggacataacaccaagcatacaacttaccagcttgataaacacttcctcattagcctttttgacagagagctgttgcatggcctgcaactccttgtcgacttcaactttcctctcctcagccttcagtgcaagcaaagctttccgcttctcctccagcactttctcatattcctccaaagtcatctcctgtgaaatggtggtagaaaattgttatttcactatcaaacgaattgctacttgaatcgcacggagtgctaacttcaagcaattacttagaaaaccctttaataggcagagaaatgagacagtagaaacaccagaatgagcaaacacatgctatataacaggcaaccgttaggacagtagggataataggaatatccaaacatgtactagaaccaacacaagaacgcctgaatgaccaagagaatttgatcaacaaatggaaggtgccatagctgaacgttcaccatggagaaaagaacgggaaaggcccaaataatattatggatacccaaaagatctactacatagcagataggagatagcattcaatacagaaggaaaaaaaattaaacaacagaaacttcaggtaatgatattgaattatgcagaaaatcaatatatacagcagcttctagttccaactgatgcaagcaaaattgcaaactttatatttctgtatttaaagcgggcacaagtcatccaccagttttgagtgtggcagactactcacagaatatataaaaccttcccatcagtcaacttaaacatcatcttaccgaagtcctggctattttgtaacatgagtatcaaaagcaaattaactaagcagtaacgcgatacattctgacataattatattgcattggctagaaatgagcaaaagcacaaaactgaaagcaagaagagcctgcaaaaactggagaacataatgcagttctcaaaaaggcaaatttaacccacatgtaaaccagttgaatgattgaactacattgcttagaatagtacagatgacatgttttcccacactaaatgaatgacctgtagctagtttctgacgaaatcaaaaaccaaaactatatgtacccgttgtgcttaaaatgcatccacatgtttgaccattcaaaggcaccagaatgtaatacccaaaactgtatgtttaccatgccctatgcccagaaagagttatcatcacctcctaaacagtaccaaatgtgcacacatgcattaaggtattaaagcacagatcagaaatataccttatcctcaggttctttttcttcttcttcattctctggactctccttgtccttgtcgacctcagactgtggcacatcttcaggtttcttctcatcctctgcagttgcaggagcctcctcagtgttaacagcctccgcaacttccctaatcaaccatatagaagagttatattcaatcgtcggatcaatcaatcacatctacaaaataagccaacaatcgcaaaccaaattgcaaaggaccaatcttaactgtgcaaggccttcatcggtgacagttccccaattgccgcggccagacccctcacgcttcaactcatagccacggccagtgccgctgtggcgctcatacgccctgcgcggacgtccatagtcgtctccactctgcccatcactatagccaccgcggcgaccacctccacggtagggctggcgtggcccacggcccctctctgcctgtctcccctcaccgtcttcaccgcgagccaatccaccatcaccaaacccaccaccaccaccatagccaccctcaaagccgttggcatcaccctcaccgaaatctcgcctcggaccgcccctgcctcctcggccgccgcctcttccacgccctgggccaccacggccagccccatcgcgtggagcaccgtagttcctcgcttcccttactgtagatatatacataaaaaatcaaatcaaatctttgcgcctaacggaaaaacagccatggatccaacaatccggtaatttctccatcaatatgcgtacggtaatcgaatcgaatagagagcactgagaagtgagaagcgtgtcatactcaccggcttgcgcgggtggcgcgggcttggtgggcagcttggccggagcgggcgccggcgatgaggcgagcttgggcgacgcggccgccgccgcagccttcttctcggcggcggcgatgaggtgggaggggtcatcgttgtcgacgtcgacgaggagatcgaactggttcttggaccccatttctccgcgccgccacaccacttagctcctctctattcctcaatcccaaacaagaacacacagacctttcaagccaccatccccgacgaaatcgccgccatgagattgatgcaaggaaggggattagggtttggcacacaaaaccctagccgccaagagcaaagcctttggctctcgtctgcccggaggctgctgctctgctatacagtacggtcatacactaaattaattccattttcagagcacggcctcactaattatttccttttatttacgaaatgacgcatttgggcctaacagtttgcgctaattacgtccaaaattctggttaccaacaaagtgtcgtgagggtagttctgtcttatcccctttgtactggagaagtactgctctttatgggcctagtcggcttacataggcttaagtgcttattagttgggccttcggattaacgggccttcggcctaaatggacaatatgtgactgcatcatgattagcaagcttaatagcgattctgtttgttgatgcttaatcttacccatgcgtcattaagcaatgggattataagattataaaagattttttatgcatgcaccgtagattagcggcagccagcgttagtggatgaaagattagcagttagtgaccaattaggtagctgtccgaaatctccgcgcattcctgaagcaaagctgcaggacaggagagggaccctgaacctaaacaaaaacaattctatgattaaccatcttctctctgcttagtcatttatttaaccccaaattaattcggttctatcatgcatgcccgtctccatcatggactgacaggcactttaaatattgtccaaatcccttgcttcaacagtggatcaaagattcatagagagtgcatgtgtgtgttcaaagaaagataatgcaaagaattatgatggattgacctcactaaagtactatccctcctatactcagataattagtggttgttggaattaatgaatgggccttagcccactcgaagattaattctttggaaaatcacaaaagcccacctcatgggatggcatgcatgtggagtttagtaccaccttgcttattctaggagagggggacctccttaaaagggaggatgccctcctagccacttgaagcatgtgtggtggagagaagaggggaaacacgcgcgcgctcgctcgccttgcctggcaggcggcgcgcgtgcacgacgtacgcgtcgaatggtccgaaaaattggctcctcacccttgcgcagatgcagcctccttttgcagttttgttttgctgcaaattcggattcgtttttgttttggaaacgttccgaaaaatccagtgcgtgcaaacggcgtggagtccggataagttacgcgcgacttatccggttcggttacgcgcagtagagatcgtgcgggcgccctgatcaagcgacccttctctatataaaccgacctgccgtcttcacgcaacatgcgaaaatcaatctagggtttgcctcctactctgtactgcgccgtcgctcgtaaactactccatcccgctcgccggcgtgcaccagcgatcgggagagcaggtctccggaacctctgcctttgacgtcctgcaccgggagaaggcggcaataaggtttttgggaagcgcttcgcgcgactgctccctgttcgttcgcgacggctcgccttcctcttcgctcgcgtgtttcgtgccttcgtagacacctgcgaaaagtttcgaccaagcagccggtcttttcgtcacctcggtacgtgttcaatatgttgcgcatatttgatctgttcatgttattctgcgtagtttacatgtgtagatctaatgatgcgttcatgctagttttcatctgtaatgtcatgatttatttatggaataaattaaatcattatatgcccataatatcaacaatccaaaaaccttattataggcactgtgattttactatggctggttttgccgatgcactgaggccggataaattcaccggtgtgcattttaaaagatggcagatcagggtcactctgtggctgacatctatgaaatgcttctgggtgagtactggcaaacctgaaggagttcttactgctgaacagcagaagcaattcgaggaagccactactctctttgtgggatgcattcttagcgttcttggcgatcgtctggtcgaggtgtatatgcatatgaccgacgctaaggagttgtgggatgcactgaatactaaattcggtgctactgatgctagcaatgatctgtatatcatggagcagtttcatgactacaaaatggctgacaaccgttctgtagtcgaacaggctcatgagatacaaaccatggctaaggaactcgaactccttaagtgtgtcttacccgacaaatttgtggccgggtgcattattgcaaaactacctccatcttggaggagtttcggtactgcactcaaacacaagagacaggaatactccgttgaggggttgattgcgtctcttgatgttgaggagaaagcttgggaaaaagatgccgcgtctaagggcgatggtgggcagtccagtgccaatgttgtgcacaaggcccagaacaagagcaaggggaaatacaaagctcagcagaccaccaacttcaagaagcagaagaagaacaacaacaatcctaatcaggatgagaggacttgctttgtgtgtggccaagttggtcatctggctaggaagtgtccacagcgcaaggggatgaaggcacctgcagggcagacttctaagtctgctaatgtgacctttnttgggggggcccaaaaaaccaatttgggagagatggaagcgggtatggtaatttacctactgttttttcagttaatcaatctactaattggtgggttgatactggggccaatgtacatgtttgtgctgacatctcattgttttcttcttatcaggtcgcacggggttccaccgttctaatggggaatgggtcacatgcttctgttcatggtgttggcacggtagatctgaagtttacttcgggaaagatcgtgcagctgaagaacgtgcagcatgtcccttctatcgacaggaatcttgttagtggctcccgtctgactagagacggatttaagttggtttttgagtctaataaagtagtcgtgtctaaacatggatattttattggtaaaggttatgagtgcggaggcctgttccgcttttccctttctgatttctgcaataagtctgtgaaccatatttgtggcagtgtggatgatgagactaatgtttggcattcacgtttatgtcatattaattttggcttgatgtctcggctttccagcatgtgtttaattcctaagttttccattgtcaaaggttctaagtgccatagttgtgtgcaatcgaagcaacctcacaagcctcacaaggctgtcgaggagagaaacttggcaccactagaactcctacattcagatctctgtgaaatgaatggggtgttgacgaagggtggaaaacgatatttcatgacattgattgatgatgctactagattttgctatgtgtacttgttgaaaacgaaagacgaggctctagactattttaaaatttataaggcagaagttgaaaatcaacttgacagaaagataaaaagacttaggtctgatcgtggtggagagtttttctcaaacgagtttgacttattctgtgtggaacatggcattatacatgagaggacgcctccctattctcccgagtctaatgggattgctgaaaggaagaaccgcacactgactgacttggtgaatgccatgttggacaccgcgggattacctaaggcatggtggggggaggcattgttgacctcaaatcatgtgttaaacagagttcctaacagaaataaggacaaaacaccatatgagatatggattggtagaaaaccatcactttcttatttgcgcacatgggggtgcttggcgaaagtcaatgtaccaataacgaagaagcgcaaacttggacctaagactgtggactgtgtttttctgggatatgctcatcatagcattgcctatagatttttaatagttaaatccgagataccggacatgcatgttggtacaattatggagtctcgtgatgctaccttctttgagagctttttcccaatgaaggatacacatagtggttcgaaccaaccctctgaaataattcccagtttaatcacaccaccagaacaaactgaacatacacatgaacttgtctctgaggaggatgtcagtgaagctcctcgaaggagtaagagacaaaggacggctaagtcttttggtgatgatttcactgtgtacctcgtggatgacactcctaagtcaatttcagaagcatatgcatctcctgatgcagactactggaaggaggctgtccgtagtgaaatggattccattatcgctaacgggacttgggaggtgacagagcgaccctatgggtgtacacctctggggtgcaagtgggtgttc

SEQ ID NO: 4955 - DNA, 28639 bp, Oryza sativa
  unsure (1)..(28639): unsure at all n locations
aatgattaatctatgtacagcagttcatcatttgataaaaacatgattcggtggggtaactattagtagtggtattgatcaatttgattatagtagccaaaatatgatgtttatgttgttggaattaatgaatgggccttagcccactcgaagattaattctttggaaaatcataaaagcccacctcatgggatggcatgcatgtggagtttagtaccaccttgcttattctaggagagggggaccttattaaaagggaggatgccctcctagtcacttgaagcatgtgtggtggagagaagaggggaaacgcgcgcgctcgcctcgcctcgcctggcaggcggcgcgcgtgcacgacgtacgcgtcgaatggtccgaaaaattggctcctcacccttgcgcagatgcagcctccttttgcagttttgttttgctgcaaattcggattcgtttttgttttggaaacgttccgaaaaatccggtgcgtgcaaacggcgtggagtccggataagttacgcgcgacttatccggttcggttacgcgcagtagagatcgtgcgggcgccctgatcaagcgacccttctctatataaaccgacctgccgtcttcacgcagcacacgcaaaatcaatctagggtttgcctcctactctgtactgcgccgtcgctcgtagactactccatcccgctcgccggcgtgcaccagcgatcgggagagcaggtctccggaacctctgtctttgacgtcctgcaccgggagaaggcggcaataaggtttttgggaagcgcttcgcgcgactgctccctgttcgttcgcgacggctcgccttcctcttcgctcgcgtgtttcgtgccttcgtagacacctgcgaaaagtttcgaccaagcagccggtcttttcgtcaccttggtacgtgttcaatatgttgcgcatatttgatctgttcatgttatactgtgtagtttacatgtgtagatctaatgatgcgttcatgctagttttcatctgtaatgtcatgatttatttatggaatagattaaatcattatatgtctataatctaaacaatccaaaaaccttattataggcactgtgattttactatggctggttttgccgatgcactgaggccggataaattcaccggtgtgcattttaagagatggcagatcagggtcactctgtggctgacagctatgaaatgcttctgggtgagtactggcaaacctgaaggagttcttactgctgaacagcagaagcaattcgaggaagccactactctctttgtgggatgcattcttagcgttcttggcgatcgtctggtcgaggtgtatatgcatatgaccgacgcttacgagttgtgggatgcactgaatactaaattcggtgctactgatgctagcaatgatctgtatatcatggagcagtttcatgactacaaaatggctgacaaccgttctgtagtcgaacaggctcatgagatacaaaccatggctaaggaactcgaactccttaagtgtgtcttaccccgacaaatttgtggccgggtgcattattgcaaaactaccttcatcttggaggagtttcggtactgcactcaaacacaagagacaggaatactccggtgaggggttgattgcgtctcttgatgttgaggagaaagctcgggaaaaagatgccgcgtctaaggacgatggtgggcaatccagtgccaatgttgtgcacaaggcccagaacaagagcaaggggaaatacaaagctcagcagaccaccaacttcaagaagcagaagaagaacaacaacaatcctaatcaggatgagaggacttgctttgtgtgtggccaagttggtcatctggctaggaagtgttcacagcgcaaggggatgaaagcacctgcagggcagacttctaagtctgctaatgtgaccattggcaacactggagatggaagcgggtatggtaatttacctactgttttttcagttaatcaatctactaattggtgggttgatactggggccaatgtacatgtttgtgctgacatctcattgttttcttcttatcaggtcgcacggggttccaccgtcctaatggggaatgggtcacatgcttctgttcatggtgttggcacggtagatctaaagtttacttcgggaaagatcgtgcagctgaagaacgtgcagcatgtcccttctatcgacaggaatcttgttagtggctcccgtctgactagagacggatttaagttggtttttgagtctaataaagtagtcgtgtctaaacatggatattttattggtaaaggttatgagtgcggaggcctgttccgcttttccctttctgatttctgcaataagtctgtgaaccatatttgtggcagtgtggatgatgaggctaatgtttggcattcacgtttatgtcatattaattttggcttgatgtctcggctttccagcatgtgtttaattcctaagttttccattgtcaaaggttctaagtgccatagttgtgtgcaatcgaagcaacctcgcaagcctcacaaggctgccgaggagagaaacttggcaccactagaactcctacattcagatctttgtgaaatgaatggggtgttgacgaagggtggaaaacgatatttcatgacattcattgatgatgctactagattttgctatgtgtacttgttgaaaacgaaagacgaggctctagactattttaaaatttataaggcagaagttgaaaatcaacttgacagaaagataaaaaggcttaggtctgatcgtggtggagagtttttctcgaacgagtttgacttattctgtgaggaacatggcatcatacatgagaggacgcctccctattctcctgagtctaatgggattgctaaaaggaagaaccgcacactgactgacttggtgaatgccatgttggacaccgcgggactgcctaaggcatggtggggggaggcattgttgacctcaaatcatgtgttaaacagagttcctaacagaaataaggacaaaacaccatatgagatatggattggtagaaaaccatcactttcttatttgcgcacatgggggtgcttggcgaaagtcaatgtaccaataacgaagaagcacaaacttggacctaagactgtggactgtgtttttctgggatatgctcatcatagcattgcctatagatttttaatagttaaatccgaggtaccggacatgcatgttggtacaattatggagtctcgtgatgctaccttctttgagagctttttcccaatgaaggatacacatagtggttcgaaccaaccctctgaaataattcccagttcaatcacaccaccagaacaaactgaacatacacatgaacttgtctctgaggaggatgtcagtgaagctcctcgaaggagtaagagacaaaggacggctaagtcttttggtgatgatttcactgtgtacctcgtggatgacactcctaagtcaatttcagaagcatatgcatctcctgatgcagactactggaagaaggctgtccgtagtgaaatggattccattatcgctaacgggacttgggaggtgacagagcgaccctatgggtgtaaacctgtggggtgcaagtgggtgttcaagaagaagcttaggctgacggtactattaaaagtacaaggctcggcttgttgctaagggctatactcagaaagaaggcgaagatttctttgacacttactcacctgttgctagattgaccacaaatcgtgtgctactttcctagcagccctcacatggtcttctcgttcatcaaatggacgttaagacagcttttcttaatggagagctggatgaggagatctatatggatcaacctgatgggtttgtagttgatggtcaagaaggcaaagtgtgcaaattgttgaagtctttgtatggtctgaaacaagctcctaagcaatggcatgagaaatttgacaaaacattgacatctgcaggctttgcagtcaatgaggcagataaatgtgtgtactatcgccatggtgggggtgagggagttattttgtgcttgtatgttgacgacatactgatatttgggacaaaccttgaggtgataaatgaggttaaatcattcttgtctcaaaattttgatatgaaagatttgggagtagctgatgttatcttaaacattaagctaattagaggtgagaatgggattacactcttgcagtcccattatgtggagaagatcttgaatcgctttggctacattgatagtaagccttctccaacaccttatgatcctagcttgttgcttcgcaagaacaagagaattgctaggaatcaactggaatactcccaaatcattggctcgttgatgtacctggctagtgcaactaggcctgatatctcctttgctgtgagcaagttgagccgatttacctctaatccgggagatgatcactggcgtgcgcttgagcgagtaatgcgctatctgaaaggtactgtggaattggggcttcactatactaggtatcctgcggtactagagggttatagtgattctaactggatctctgatgtggatgagatcaaagccactagtggatatgttttcacactgggtggtggtgctgtttcatggaggtcttgcaaacagacaattttgacaaggtcaaccatggaagcagagctaacggcactggatactgctactgttgaggcagaatggctgcgtgatctattaatggatctgcctgttgttgaaaaactggtgccggctatccttatgaactgtgacaatcaaacggtaattgtcaaagtgaatagttctaaggataatatgaaatcgtctagacatgtgaaaagacgattgaagtctgtcaggaaattaagaaactccggagttataacgttggattacatccaaacagcgagaaacctggcagatcccttcactaagggactatcacgaaatgtgatagacaatgcatcgaaggagatgggtttgagacccatgtgagttatactatggtggtaacccagtctatgtgatcggagatcccgtgaattagatcctgggaagaacaaaccattaataaactagaggagagtaccaatatatataccctctccaagtgaagatgcatatactctcgtgagctgcaaggcaggttggctatgccttaatgagttctgttgactttaattagcaaagatgttgtcctgcagagcattcttgaaagaactcacctttgtgagcttgactgttggtcgcagtctatgaagattttgggtgaatcttctaggaagcttactaaagacctaggagtatgacttatacgctctacccgaggggtagtctacagacggtctagtaccagataagactttgagtgaaacttgcttgcacaagacttgcaattcaaggcgtagtccattgttcaagttgtgagtaagtgtagcttggaattctaggtggatgttcaaccttaattggtctccatcgaaccgctggtatataaacagtacattggaaaaggcaaatctcagtgggattttgagatttggtgggggattgttggaattaatgaatgggccttagcccactcgaagattaattctttggaaaatcacaaaagcccacctcatgggatggcatgcatgtggagtttagtaccaccttgcttattctaggagagggggaccttattaaaagggaggatgccctcctagtcacttgaagcatgtgtggtggagagaagaggggaaacacacgcgcgcgctcgctcgcctcgcctcgcctggcctggcagggcagggcagggcagggcaggcggcgcgcgtgcactacgtacgcgttgaatggtccgaaaaattggctcctcacccttgcgcagatgcagcctccttttgcagttttggtttgctgcaaattcggatacgtttttgttttggaaccgttacgaaaaatacggtgcgtgcaaacggcgtggagtccggataagttacgcgcgacttatccggtttcggttacgcgcagtagagatcgtgcgggcgccctgatcaagcgacccttttctatataaaccgacttgcggttttcacgcagcacacgcaaaatcaatctagggtttgcctcctactctgtactgcgccgtcgctcgtagactactccatcccgctcgccggcgtgcaccagcgatcgggagagcaggtctccggaacctctgtctttgacgtcctgcaccgggagaaggcggcaataaggtttttgggaagcgcttcgcgcgactgctccctgttcgttcgcgacggctcgccttcttcttcgctcgcgtgtttcgtgccttcgtagacacctgcgaaaagtttcgaccaagcagccggtcttttcgtcaccttggtacgtgttcaatatgttgcgcatatttgatctgttcatgttatactgtgtagtttacatgtgtagatcttatgatgcgattatactagttttcatctgtaatgtcatgatttatttatggaatagattaaatcattatatgtatataatctcaacatatgtatgcatatctcctaagcatgttactaatatggtgttaatatgaaatttcatcaatttaaaactagcctcgcatatgattacaaatgcgctatcatagcccatctaggcctgttaagaacatgacagtccattaagtatgtgattagtggcaacagcccgcccattatgacggcccataacacgtactgagtattgtccattggactattgggcctagagacatccggcccatcacgcccaacgccccccaccccccaacccacgctccccttggaggcgcatccaccggcctccgccacggggagagcgcaccgggaggcggaacggcgccgcgcggtgggcataggttgccggcccgacgtggagaccgcgggcgagccgcccgactcgacggaggggacgtgcgcgactgactggtgactggtggtgggtgagaacatcgcttggtcacttcctcagatccattcgggtaaaccaaacccatttttcgcgatattttaatggctacgagcagcggaggggcgtggggatttgattgcggggtaggattctactcataatgatctagtaccactgccgattccgattgaaggaattggtgaattgattgaccatgattgtagcaggtgcgactttcactagtttaacttgtgtaaattgtgtggtcctttgatatgatcgattgttgttgctccatcctccagccatcatggatgttgtggtgatgtttcaccaattgacctaaataggatcctaaatcgccctgtgccttgttcaatcgaaagtcaatttactcaaagttgagtattatcaagggttaatacggcaacacaacttcctccattttctgtatataactaagaataactcctatgcatttagctttagcatttggatttccaaagtaaaatgtatctgtcatgtgtgtagccgacccatccactaaggttgtatggttcccctcttagaaaaggtgcttcaaatcttatgttgcataattgtattggcaaaacaagtcttttttaatataagggattttggctatagaattgcttgcatagccaaaatcccttatattatgggacggaggtagtattttgctaagtcagtatgggaactgcagcattagcacttaatacattgttgtactgcctatataggtcaagccagtatctttgtacaattggctgaagaaactggttttatcttaggatgaagtctaaggaaaatgggagcattcagaaggcaggaaaagttgatcactcccaaagaggcagaccaaactgggttcttgttgcaggaggagttttacttagcacactgtcagtcagacttgggtgcaaattaaagcaaatgttcgatgcaaagaagcaaaacagtatgcccaaaggtttaatgtgcccatttacagctgtaacattgaccgctttgtccatattctttatgtgtgctgctgactctgcaaaattgcagtaaaaagaaggcctggggcatgtgatctgcactcgaatctctaccggtttaatgaccaaacaagctgctactgttgtatgtcaggtgcctttctgtaacatagcctgttcttttgcctctgtcacgcttatcagtgaataatacaggttatttggtgtgtaattttcaagtgacactaaatttagagctaaggatatgtaactgtaatatggactatctaggattccaaaaatttcaggtcaatagttatccacagtagaatagcctgccctttaatcaccatatagaatccattatcctcggtggattaaattttttgagtggggagatttttatgaacataaaagcaatgctgtatggtcagcaatttttctcccaaaaaatatttgagagtacatactaatacgctagcttcataatccaaacatatactatgctatttgcagtgccagttgatacttgatacgaatatgtctatacttgaccatacatcaatctcagtatgttaagtttctgacttactacagttggtaacgtgatgcatatttttctataagaaactcagacctagaaccttctgaatgtttgctgagtttcaacaccaaatgatacaaagtctggcctaatatctaataaatttggcctgctttttatctgcacatatttgattgcttgtaagttgatatatcttttggttatgttcattcttcaatcttcagtgcatagtcctgtaaacaacacgcctttttatttgagggtagaatcaaaatagatgatacctgagtgttttctatgattgaatgggtagagtcaaatgtgttaattgttatcacctcatgttcaagttccttattgtgcaatggaatctacaaaggaagaaaaagattatgattattagactgttgcatttatgtcctatattccaattagtaactttggatgggtttaatatttgtccatatcacgattacatctttgtggtccatttgctattacttggagccttcgaccatgccagtattgcgcgcttacatactaagttgtataagacttttcataccttaatttggcttttgaattctatttatctttattcctttgtggtggaaatatttattgctggtttatcgtatgcagcggttgcagatggagtggaaatcaggcaggctcctgggagtcctctaccaaaatcaactgacctctcccctcttcttcttgtggagataccagggccagaatcaagcaaagagaacagtggtgtcatgtggacatcatcacctgatcggctcgaagatcctcgtaaaccatttcagtactcgaacagttctggctctccctgtttttcagaatcaggttctgacatctataacaagagagaggttatacagaagctgaggcagcagctgaagagacgtgatgagatgattgcggagatgcaagctcagattgttgatcttaagaactctcttgttgtccaggtgacgcagaccaccaatttgcagtctcagttggatgctgctagccgagagctttttgaatctgagagagagattcagcatctaaggaagatcattgcagaccattgtgttgcggaagcactctctcatgataagcctttgcaagctggacattggcaatcagatgctaccaatgggcatgctaatggctatgctgatagcagtgttgatgaccctgagctgcattatattggtattgagaaaaggaagggagaggtagagaaggtggaaatgctcaagcgggaggtctgtgatctgaaggaagttattgaaggaaaggatttcctgattcagagctacaaggagcagaagctagagctctgtgggaagatcagagaattgcaagaaaagctctctgcacaagttcccaacatcttgtaggatcttctgaaagtttttaattaagttagtcatggagcagaaggggtggagttctgcttcacattaggccacggattttctggagaaggtctcagcacatggaacatcttgctaggatctttgcaggatgtttggctatcttcatttctgtgttgttaggttgattcgctttcttcagtttttctcctttgttgcttgtgctgaaagggtccctcttttcccaattgataggcctaggtagctgaactaatgatgaacttgacacgtacgtgttgtacaggtttctgatttgcaagcaaagttatgcgatgtgcctccatttagctcggtatggttgaggggagtgtcgttttggaatgtaaagatgctcttgttttgctgtgtcttctgtttgacttagagaacctaaaaaaatcttacctgattgatatttattggaagtgcttggctcgtttttcatttcttgtaaagttgcacttacaaagataaggtaattcttttgcattgtgttgacttcattattcagaagattcacaagctggggttcccaagggtgatgggctatatatgctgagatgacaaagctttccttatccattttgtttcgtccttgtgattagtgtactgtaagaaatcattagaactagggtagtaattattatttttcattcctttggccatattgcacatcttgtttgacattgttctgaattgttgccagcaactgagcaatactagtagtagcattttctgtggcttagataagcactggagcacaataccgtactgtgccactttactgaagccattttggtggcactgaattttgtagcatgcaagagcaggactcctctagtttaatgccagtttgatgagcaccagaagaatggacacgaagaagatgggcaagctggacttcactcgtccgcaggatatatctgacgatcatcatgggaaagggcaggatacccatgttggtgcgagtactgcagccaaccacagccaaccagtgatactccctccgtcctataatataaggggattttaagttttttttcttgcaacgtttgatcacttgtcttatttaaatttttttgaaattattaattattttatttgtgacttactttattatctatagtactttaagcataacttttcgttttttatatttgtaaaaaaaaattaaataagatgagtggtcaaacgttgcaagcaaaaactgaaaattccttatattatgggttatgggaaggagggagtagtttttattcatgttcaaggcagctggctcaggtacacaactacatcgatcatgcctttgtagtatggtcttaatactatagtgttgattgaaatggtcagcttaatttctatccatgcaaatgcaatgcaacaagacaaccaaacaacctattgctagagctagcatacacttccaacaacagtacaagacaaccaaacagcctagtgttcattcttgagtaatgaaaatcatgaagcgaacagtagtgcccggaacccatgcatgtgaactggcctaatcagagatatcacgtcgccgcaggtcaaaagaaagtagccgtttgtcgaataattgacactacactattaaaatttaactttgactgcttgtgtttttttttcaaaaaaaaatacaaatacttgaaaatatgttgtaaattgtgtgccgtcgtaaatataatcatattcatatatacaatttctattaatcaatcatttaaaagtacatttatggtcaatgcatgtgagacgatcctaagtcaataatgtcatttattcaagaaaaaaaaaggagtagcagcagtaatatattgatgcaaacgccgggcattcggcgatggagatggcggtcaattcatcatgggcagccggccgctaaaaggtgatgagcaaaacgttacagcgtacgaactgtaattagacaagccaacaaaaacagttttggataagcattgcatggctccatcggagacgtccatccggccacgttttcagaccggccgaatggttggccgtctccatcagccatgcatatatccgtttccgtttcattccatccatactggaagaagaagatgatgcgtgttcatcaacatacttcctttgtcatttaaaaaaacctaggtgagaatatgagaatatgactccatataaaacaacccgattatttttttatggaggaaatatatattattgttgccttcgtttgaaggctttcccaacacacttctcttattttcactctcaaattgttaaacactgtattttttttaaaagaaaaagaattatatgcgaaagttactttaaaaaattcatatttatttttttaagaaaaaatagctaatacttaattaatcaatacaaatagactactccgtttaccgggggagttcctaattctatattccaactagatcatctatactttgaaggatttatccagccacgacggcgtaggtcgtcgcctctgtcgtcgacgacaaacggcacgccggctggccggctgccggtgagctagctagctagctaaccacccgagctaattaagcaagaagcaatctactcctactctcgtactgtagccattttgtcagtcagtcgtctcgtcacaggttgatggcatcagtggcacggcatatgacatgcagctactgtgcatgatgcatggagaaatcaatcaggcgcgcccactggtcgccggccgggcctcacgtgcctgatataaaagatatacttgttcttctgctctactcccttcgtccaaaaaaaagacaaatcatggtttccgtgtccaacgccatccgtcttatttgaaaaaatcataaaaaaaattaaaaagacaagtcacgcataaaatattaatcatgttttatcatctaccaacaacaatgaaaatatgaattataataaaatttcatataagacggacagttaaaatttgacatggaaactcagggtttgtctttttttttggacggagggaatatcatatgatagagaggagagggcatgcagggatggcgacgctgctggctggagacatgagaatgtgatgagcagtccagaaataattcacgatgcatatgcattcgacacggagggatgaggacgattcgatcgatcgatcgatcaaacaagctagctatatttagctaggcccggctgatcatcgatcggccacatatagtatatgacaacactgtgctgcatgcaaagctgcacccttgatcggctttcactgtatcacagcagcttcaattcgttcccagggcagcaaaatctcgacttctttttgaccatgctacagtatgcctacagtacatatgatacaagttgcatatggcaacttgcttattcctccaagttaacaggcagggccacttaattttcactcctcttcagtctgtcactctgtcttcttcttcctcctccgatccatccatttactattattatgggcctgtttagttccaaaaaatcacataaaatctttagacacatatatggagcattaaatatagataaaaagaaaaactaattgcacagtttgcatgtaaattgcgagacgaatcatttgagcctaattaggccatgattagccataagtgctacagtaatccacatgtgctaatgacggattaattagacaaaaaagattcgtctcgcggtttccaggcgagttatgaaattagtttttttattcatgtccgaaaaccccttccgacatccggtcaaatatccgatgtgatacccacaaaatttcatttcaccaactaaacatgccctatgtattgccttaggccctatttagtttaggggcgaaaagtttttgtgtgtcacattagatatatggacacccatttaaagtataaaacatagtctaataataaaaccgcgagacaaatttatgaagcataaccgcgagacaaatttatgaagcataattaatccgttattaacaaatatttactttagcacaacattatcaaatcatggtgcaattagatttaaaaaattcttctcacaattcacacgtaatccgtatgattagttttttttatctatattcaatattctataaatgtgtccaaacggttcaaagtgtgacaggctgaaatgttttttgtttaggaggccttattatctttctaccagcgcttctggctcactgtcactgcagcttggagcgacgcgcgtcaatgcatgcatgcatgcagtcttacgacgacctgacctgcatcaatttcagcacaactcctgcctgcctgctctagtgctgtagcacgagagatctatggagtccttgttgcagatagatgcaggacaggagagccaaggaattcagagaaattcagataaggcaggcaggggatcccatgaaaagggaaaattgttcgtctgcttctctctaaccctatcctcctcctgatcgtctattcgtctagctagctctgcagcatatgcagttgatcgatcagacttcaataccaagcagtagccatgattcatcgatcgatcgatacatatgcgtggagcacgtgcgatggagccccacctcacgtggctgaggagtgcacagcggccattgctaatgctacctctctccaagactcacgatgatgctctcaccacacctggccatgcatcaaaacgcggcgccttcaattcttcagttacggatacaccacagcagtaaaatctggttcagttcttctctgccgtcgctgttggtttctgaattattaatgctgattgatgatgtgttaattgccaatatatggcaccaggctaccctgcattgtcttgttcctcctgtacacatttggatggaaatctgaaaggaaaagagagatgaaatgaaagaaagaaaagcatttcagttaaaaaggaacatgtcatgtcccctattcctttgtgagtagtgatcattcttagatctaggaaaagtcgttcaggcaagcttccagctttcgataggaatcactttacaatgcacatgtcaaagagagatagatagatcagtccaatggaggagagtagttgccatgagcaagccttcaattttagtggttggggttcatgtatgtttgcccatattttcccaatgagatcgatcgaccgatggatgctagttgaaaagttgcactgttgtcttgttgcggcaatggcccataaatttctttatttattttggctcttttaatcaccattgcatcaaactgatcctacgtaccttcatcagcttaattgggtttaatatatttcagcaaagacattctaacaatgcagatactaaatccactaaatgaacaaccactgaactgcatgcagctcatggatgtttatctgtttcagtttttcttaggagtaatcattacgctagctcctgtctgattaattagtttaatttcttttggtcttgctgcaagacagagtatatatacatactaccatcctactagctgcagatatataaaatgcacacatatgcatgccacttctggttgatctcccctgaatgagctaatcctctaattgatgtttcattggatccccttccttgcacaactcctgagaccaaatcaactgacagtgacaactaaaggataacaataacaattctttgtgtttaggatcttgagggctcatggtaaataaataatcaattgacccttcatcttgaggcaagtgtattaagaaaactagagtagtacttgcaatccaatgcaatgcaaggcaatgctggtgtcacatgaggtcagcgaggaaggaagaacgaggctatatatctatctatctatctataaggtggttggagcatcacagatcacaaagtacaagcaggtcttgagttggaagcaatgtggatgggtgtatcctatgctaattatttatggcctttattagcttgtggctctctctcaaagttgtgatagcatctgagcagaataaatattgtgcagtcacaggtggagagtgatctgtattaagttggacaggtgtgcatttcatctacttttctccatcctctctctagggttcaaagaattgttcctcattaacatttatgttttggtgtcaaactcacatgcttcgctagctagctgctcctcctgctgacactgtccaatgcttaacttgcttgcattgacagcttctagtggtggggtgtgtgtatcttgattcttgagagtgtatagatttttccaggactaaactaggtcaaacagcctggcaagttttagtgtgttgttttttttatccaagctccttcattgttcttgcctgactgtgaattcaatgaacacacagttatagttttcctcaggactaaaaaccaggtcaaaccgcactcactgaattctgaacctgtagctttgatcagttcttcagtcatcatttatctgtcaactagtactaaattttcttttgcagcaccaaaaactgcaaatgccagagtttcatactgcaagaatcttataaagtgataatatgcaatgattaaggtaataaggggcttcatcttttgctctgaccaatgaagactgaacatattagtaacataaaacgcttcagcttgaatacactgaagactgaactttaacacaaaaagatactagaaaaacaatactgtgctcttagatcagtgaccagcaaacagagtccttgacaaacaaattatcaaactaaatctggtgtttagtatgtacacgtttacttgctttctcatggtttaataattaagaaataaaagagtatatacaacacatttggtcaagctagttttgattgaacagtgcaaaggaatctatctaattggacctggtttctggcaaaggggcacaagatgaggctgtagttacttatcctcctgcctggtgtctaattggacctgacaagcatcacatggcctcctgtgttcaaatccatttgttaaaagcctctcaaatcttgcaaacatgcatggattgtgccaaatactactaatccactcactagtcactagtatgttgcttgcactcaaactgaatcccaactgtgcaaaaactaatttattcataggggcaatcaaatcaaatacacacacagcttggcaatttagaaagcgcatgtttcttgttgaatcccatgaacctgaactggtcaatcaccaccagctgaggggctctcaactacttctaaatgttagaaaatgttaacaaacaaatgctgaaattagtactgtctgtttcttaccagttatcaataatacagttaacccgcaggcactatatatacatgacatgtatatatgcaaagtgaggtacatagtttaaacacacgagtcttagtttaatgagcagttaatcatctgtgtatggcaacattattgagatgcatggaaagcaagaaacttggcttcnagtgtctgcaggatggcacatgtagtaccagctagctaagcctgccttttttttttctgaaatattcctctagatctccaaatctgaaagtggtgttgttttcctgttaagaaagggcccttggctcttgccccttgagacatttgtgatctatcatctatctatctatctatctctgtactagtaattaagatttgattttaagagtagtagttagctaagagtaagatgattaggaaccagcatttgcatttcattgtcatcggtggtgatctgatgagactaaatgtaatgagccgagaagggaatgcgtgcacagtacaaccgacccaaaaccaaagaattaggttgtctcctgacgacaaaacacatgcttacaggagcatcagagaaggaatggctgctaattgaaccagtgggctccacaccctcccaggacctgcatgtttatctacattgggccttgttggcccattactttcaaagctacctccctccatctcaatctattgctacctggcgcctgccatatttctcagtttacatgaaagacgcgcatacatgattaaatgcatatccttcagttttatatatttgtaactttttcagagtaaagatcatgatattgataatgtgctggctttgtcagaaaagccaaggtattagttaatacatttgtaactattcactaaccccaactgccaagcgcccaatgcaaattcaactcgaccggatggatcattgctaatactgtgaaacgtgttctaatcaatgatcatcggctgaatgcagtgcatgttcaaccacctaaagcttgcatttcaagcagcttcagattaactactgcaatataatgtccactaccaacaactatataacatacgtatacgtacggtcttatcttctttaccggccgtatgcgtgtgaccatgcatgcatgaatgatatgatttagctgataaaatctgcatttgcaaaactgcaaaagagaaaaattcagagatgcatatggtgctgttagttcacatggagtacagagactttagagctaggatccaaacccccaattcgatcattgatagtgaccacttactcgttcgatcgatcggtcgatctacggcgatctatcattctatccagcgtcgatccatggatgcatctatctatctgtgtccatctcatgacaaggaaattcagctaagctagacgcatagtgtggtccgtgtactgccagttgatggcttcagcagcatacgagtgctagctagcaatcgtggccatgcaaattagcttcagaatcgttcgatcacaaattggaatgggagcaaattagcagagctgtctgaatctatgtggaattacatgctacactccaatttcaggaatgtgtcatctgctagatatgcttgttaggtagattattgctgctgctgctgatgatgatccatcaattaatggtaagtaattcagtgctggtttaagcagagatggatatgacaaaatggtgccagcaacaccctaatcagggtggaaacatgagcaaaacaagtgatatatatgcacatttatgtaggacaaaaaaacaaaagaaatgggctgtttctgctggctaggttggaccaaaaggatggaatggaataccccctccatccatgtttttctggggtgggcccacacccccacaggccaccactggcaactggccaactcgtgaagtcagaatacagatcacaacccaaaatcactcaataaattcaaagaaaaaatgttctttttcaaaaaaaaaaggaatgccaatagtttaaatttaagtatgaaaatcaccaaaaatgtccactaccagaacttttttttcctacaagcaccaaagaagagcatgagttgtcattttattttcttattaaaacaacaatatacttggtatttattatacatgcatatatatatatatatatgtataggaaaaataattacactcctagtattatattaatccctagtgactagtgacttgtagtgagcgagagtgagagtaggctttaacttggggcattaacctccctgctcttcttcttcttcttcttcttcttctttctttctattcctttccttcctcctcacttcttccttcttcttcctccttcactctcctctcccctccatccaacgctgcttcgtctttggagttggagttggagttggacaccacccaccggcacctagctaggcttctctaccatcatctgtgatctttcttgtcgagagagagagcaagcagttgcatgcctgattggtcagcgagtgagctgctggtggcggtggcggccgcgcttagtcagcggtggtgactgtcccggcgatgtcgggagctgaccggctaagcatccgcgccgcggcgctggcgctcgacgatgctgccgccgggagggacaagccggacaccaagcgtgacgtcttcgcggatcttggctcgccggtgtcgccgctgcggctgcggcctggcggcgccgcggccacgccgtcgtcgtcctcctcgtccgctggctcggccaagtcgcccgcgctgtgcaatgctggggcgggggtgggtaggggaggaggaggaggccgggggagccactcaggcgagctggtggcggaggggaacccgccgcggccgccagggcaccgccgctccggatctgggcctctgatattctccggcgggagcagcagcgccgggagcggaggaggaggaggaggctgcggcggcgggagcacggcgagctcgccgttgaccaatgcgctgcctaccggtaacatctgcccgtccgccggcgtcgcgagcgcggcgcctgcgccgccccgacgcgcccgtcccgacgtgcttggatccggcacggggcactatggccacggcagcatcatgagaggcggcggcggcatgactccccttagaagcagcattgacgccagtccgtaccacggcagctactcgaggtcgccggcgccgcagggcagcagcgggggtctccaggaggtgaccagggccgggaacgagtggtacaagaagggccattacggcgaggcgctgcggcactacgaccaggcggtggcgctgtgcccggacagcgccgcgtgccgcagcaaccgcgccgccgcgctcatcggcctcggccgcctcgccgaagcgctccgcgagtgcgaggaggccatccgccgtgacccggcgagcggccgcgcgcacagccgcctcgccgcgctctgcctccggtgagattctttcgcccttgcgcgttcgcagattcgtgtgctccacagccccaaacggattcacagatctcgccttgacatctccgatctttgatgctttcgtctttgcttatgcattagtgcctgacataacttgtgggtcaatagaacagggaattgttaccgatatatgctgctccgtatacctaccgtttctcttgtcttcttgtttgtttgatttgagatgatcagtagctttgcctttgctgatcatcaccagtaacaaatttacttgttttggaagtaaaagtttgatcttgaagttactgagaagtttttttttttttaaactgaagttggctagcaattgtgtggtgagactgggaggtctggaaatgtttgtatctttgcctctttggttggtatgctgaagttaatcaatgtgctcttaatatgattcgcatcaaaacaatgtagttgagagtgagtgcttacctgtattgtacattgtatttagaccgtagtacaggggagtcagtggtggtcctaatctattcagtgctaacgttcaatcaatttatgggcagtagctgtttgattttgtcactgaaaattgcaccatgacggctgcatgcaggtttggaatggttgagagggcaagggagcacttcatgttagctgggcaagtaaatcagtcagacccagctgagtttcagaggctccaagaggtggaaagacatctggggcgatgcatggatgcgaggaaaactggagactggaagagtgcgctaagggaagcagatgctgccattgccaatggagcggattcctctcagttggtaatatccccttccagcttatatctttgttgtcctgtaggcattgttgttttgtggccagtgttaaaactcagtcaatgaacatggaatcgaattatggttgcagcttcttgccttacggtctgaagcacttctccgtctcaacaaactagaggaggccgattcgactattacaagcttgtcaaaactggacattgcatcgctatcttcaatgtcaactaaactatcgggcatggttgctgattcatatgttcatgttgtcgaagcccaggtcaacatggcttttggaaggtgtgtatgattctcatcttgataattatgatttgttttcgtggtccgtagcaaaactagcactgaggtttattcctgcaggtttgacatagctgttaccatggctgagaaggctagggttattgatcctggaaatacagaagttggaaggattacaaacaacataagattagttgcacaagctcgaggacagggaaatgagctttttaaggcaggcaagtttgctgaggcatccttagcttatggtgaagggctcaaatatgagccctcaaatccagtactgtactgcaatcgagcagcttgttggtcaaagttaggtcggtggatgaaagctgttgaagattgcaatgaggccctcaaagtccatcctggttacacgaaggctctcttaagacgtgcagcatcctatgcaaaggtaagcgatacatgtatcattgtatttctgattatttgcgcattgtggtgttgatatctccctgttaacactcaattagcttgagcgctgggccgattgtgtgcgggactatgaggtgctacgcaaggagcttcctaacgacacggaggttgcggaagcattgttccatgcgcaagttgcactgaagacagcacgtggggaggaggtagcaaatatgaagtttggaggagaggttgagacaattaccagcatagagcaactccgagatgctatacattcacctggtgagcttttcttctacagatttttgctgctgtaccgcaaggtcctgtcatggtcttttgcatttactcattgaactatagccgttctagtattgtgggtaatcagaactatcactgttcttattgacacacttcactaggtttctacttactacatgataaaatttcaaaatcttgcatatcagcatgtatttaattgttttgaagttcacaaggcggcatgagcctgaacataatttatgtggtatttgttcaggagtatctgttgtttacttcatggcaacgatgaatcagcagtgtcaacagataaccccatccgtggactctctttgctccgagtgcccttcagtgaattttctgaaggtaatccacctaacatctctctctctctctctctacaatgtgcatcgcatttgatagaagtttcaaaggtgctaatacaatcccctctgtatcgaaactgtttaggtaaatgttgatgagagtcctatggtagcaagagcggagaatgtgcgcatagtcccgagcttcaagatatacaaggacggtgcaagaatgaaggagatgatctgccccagcttacacatcttgcgctattcagtcaagcattatgctgtctccagttcttgaggaggtcttactagtggcactcatattttttgatgcatataattccctgtcacctaccaacattttaccaacaaactattctctataatcagcctccacagcatttctccagctgcatagttactctccgctgagcataatgagctaaagcttgattcacgaagtagtttcctattggctatctttcctttgttacctgttgcatctattttctgatccttcatccttccaaccttattcttggatcatttaggttccttcatttgcttattcccacccatccatcgttcggccaacctgcattgtgcaattctttcatctcttacattctgttctgccacctcataatgcatttgacacatttttgctgcagcccataggccactcctcaagaaaaagaatgcttctgttctgacattgtttagatgcaggcatgcttgttgttagagaaagaaataagaggctgcagacagaattggtttttttcattacatgtacatataccatatagcaaaaacatgaaaccaattggaagatttgattctatggagggatggtggtgccactttgcagtggacagaagtacagggctagttgccaattgtagagagaagatagatgaagaaagacaatgtaattggtagggagataatgagggaggtggttgatgtctctttgcatatgcctctgctgggtctgtggtgctgatacatatatactacttgctgacatttttatgaataaaaatagcccaacattctttcttatttctactcagatatgcagtcttgcttccatttctgtgctgctgtgatgttgaagcatgtttctgtttctgtattagcaacaattttgtcaaaaccataggtgtgctgtaacttcagcagatgatttcataggtgtgctgcacactaactacttatagtcggtgagaaactgcaaaagtagcagatgatttcataattttgattgtctgatttagattgggcccacctgtcaggattgtgctaatgttgtttaggcagcaagtacctcctactgtagtataatactgctcctacagaaataggagtagctgcttttgcagcagatttcatgcacagcacagcagtaacaggaatctcttggagaaagaagcaccggccacgctcttgtttacttgtttttttgcatcatttgtggctgaagattgaagcacctgtcgtccagcaatgtgcttgtcgcaacttcccacgaacttggtagtgagtgtaagaaagaaagagaaaaggaaagctttatttttcctctgagaatcgaagaagatccagccatagatttcagagtggttttcgtcagttctgaaagccttgcacttttttcagtggattggctggtatactccagcctccaggtgtcgactgactgctgtgcaatgcaaatactagtactagcatgcaacaacgtgacgtgatttggtcgtcagagtctcgagagatgatagtccaatccaatgcaatgctgccatgtttttgggtgtgtttagttcacgtcaaaaatagaagtttggaccctgtttagttctaaagttttttttaaactttcaattttccatcatatcaaaccttttatacacacacaacttttctatcacatcgtaccaatttcaaccaaactttcaaacttcagtgtgaactaaacatagccttggttaaattggaacgatgtgatgaaaaagttagaagtttatgtgtgtaggaaaattttgatgtgatggaaaagttggaagttcaaagaaaaagtttggaactaaacagtgttggacacttggccatctccattgatgaaaccaatcaggattcttctgcacgctagaattgcagtcctatggcgatctgactgaaaccaatcaagctgtgggtgctttgcagtttgcacacacacatgttcaggtccacatgatgaacgagatgtagtgcaggttacttgatcactgggcagggtttggtaggagtagcagcaatgttgattgtagtaactagagattgtcttctggttcttgacttgatcactggaatgtgtcgtactgcagatactaatgcacaatgaatgtaatgttaatgttaaaaaagaaacaacagctactactactgcttggctgatgaagaggtagtaatgctggatctcttggtgtagaagtgaagcaagctgcttagcaatcttgtcggaatttctgcgtagagaccgggctcgtgtgaattcagatacagaagagtagttagcttagctgagtgagccatgtgagtgtgtcactgaccatttcatcgctgggttgtcgttgaagcctgcctgccattaacaagggtaccaacacatgttctgctcatcgacactcgttgacgcgtgtcccatttcattgcttgtttgtttggggtcgcccccctttttttatctccggggaaaagagaagttttttccctgatatcaggccgacatggcgacaatataactatgcactccaatctcaataagatggcgatcaaagtataagcaggctgcacaactgcagagattgggcaccgacacgccgccaagcacgcagacaagctaagcataacaccacaatttctgttccatttcagtcccttcaggtacacggcttctgttccatttcaaaactcgtttgtttcggttcatactctttccgtctcaaattacttgccgttacaggtttatcctaagtcaaacatatctttgactatatgagtttatagaaattgatagtcaaatattaaaatgtttaccttaggacaaaactagaacacaagtagttcgaaacagagggattacttgattttctgcaggtcactggctggaaactacactacctcatgggcactgtctttatttcactatactgctatctaccaaagtggaaatatctaaaagaatgaggtgaaatccctactgttacagatgtgagtgaaacccccttcacaaaatcatctaaagacactccagcgcttagcaaactagcactggagctcaactagttgttgcctatacagctatctaaaacaaaattttatcctggtagatatccaatgcatcgatgattttctgcaggagcagcttccggtgtagccgatatctgcatatcaacagaaaaaatgtgttaacaagcaagtggtacaaacaaacataaacttcatgggagcaatggctaaaacaacttgctagttcacatacttgattgcgatttcacgtgttcttctgatatgtccatcagaatctgcaacacattacagaccaatcatttgcatgtatttctcggaaggactatgaaaaaggctaaattaatacttgggatcctgatgggccttacctagaatctcctggtcttgttgaatagtggttgaaaaggactccagcatcgtatggcattcctcttgtaatgcctgagcagattttctttccaagcttggtatggcaggaacatcaccttctgaccatgtcggcagagttcttgctgctgccacgactcctccatcaacaaagttgttttctcctgaggtcaatgcagctgcaacacattggatagttcaaatcaaaggttccgaatcaaggcatgttgcagaatggttcgcaaggtcatgtgttcctagttcctaccattgtggtagagctcatcatgcaagccagcaatgttgaagaccgacaggaaggagtcaagatgaatcttggcatcactcgagaagtttataagctcccaaggattctgtagtgtttgttgtgtgcacacaaccatataagaagtcacattttttttaaaaaaaaaaatgacactgtagttgtttcaatgcatggtatcgtattaacatgcctagcaatctagcatagcagcacaacatatttgatgctagagttgtttcctttaagcagaaccataatctcgcagatatagttatacttatacccaacacaatattcctcaatgctaagtcctgccaagtgggaaaggacagatgtggcttgcaagaacaagcaagaattaaaatcaaacacatgatcataccgttggtgatgagaaaccatatctttccataaatgagctgttcactccactcatataatcaattgtcatctgtactgggtccatagaatgaaatgatcaaactggtttgaaattttggatggcatttaagtaaagttggcaactttccatgcaaataaggaatttttaattataatataacattaaactagtcgctctttgctcacaaggaagctaattgtactctaagctctaaacagtacctcatctccttttttgacagcatgcccagccttaatcatgacttcaaccatacgatctttgaaacgccaatgcaggaaacaattagcatcaggtgaatgattcagcatatctggagacaaataggcaagctataagttatgatgagactcagtatcagtaatcagaagctagaatatgctgattatcagaacagtatagttttgaatttcatgcctttgtgataattattaagtaattcaatgtaactatactgcctgactagaacgtctagaaggaataaagcgtagtattggtgtgaaaaatgacaatagatattagttagatccttattccaacagagtttaaccatacagaagtagtgctgatattagaaaatataatatcttggatcagttggtaactatgatttactgtgcaagtaacattagcgctataacattataaaaacctttatagcattcgccagctcaaaataaatggagcaaaagatccctcagaccgcagccttgacttagactgttagacatctgattatcatcgcaagctgaagaaactaagtgattttattcttaattttagtaatcggtgcttaatacacactgaaaataaaaataaagagcataaaggggaacagataagaaaacatgtaccagcatacggcactaggacatttgcatcttggaggaaggctcccattctcagtttcaaattgacagagcgagactgaacaatactcagtgcccatagaaatctttcatggtcaggggcaagacgctttagctttagagggattgttttatgctggacattacccatcaagctagtgttagatgtacccaagccagcgaagttgatcaaatagtacagaagtgtacccaatgtttttgccaaaaatcaattgctctcttctggttctttaacattttcgtggcaagatcttggtcttctagttccattagatcgtcctggcaagccaggcatgtaaattcattcaaactgtattgtcaggtttaagaagactacaattcattttgtttagatttacaatacctttggtgccaaaagcaagctagtgcattcatcaacactaggcaaaaaatcaccatatagctgccaaaagttgtcttctacatcaaatgcatagagaagaaggcaagctaaccttagatcccaatctgtctgcaagagggtacagattgcgttaggatgcagtctacatcacttatgaagctttgacaccgcatgaaggaagaaaacaggttgcaagtgtgatgagctactggcagtctgtaatcatcg

SEQ ID NO: 4956 - DNA, 26622 bp, Oryza sativa
cgcgggttatgacccttgtgaagacgtgagacccctttgttttacaccgactggctggtttttttcttctgcatcacgtagaatcggattcatttttttccttttttttcaccctttattttattttgacggacagcgaaaacatctttttaagtagtagagatagagatagagatatacctggagaccacctgaatttcgtttcaaacgtgaaacaactcagccatcccgaaggtttagagtacaactagtataatgaaaaattgtctcttcttcttcctcctcatcccggcgaacgatcagcctgattcgaccgtgagcgcgaggatcgccttgcctaaatagatttgtctcatcgattcttcttctttgattcaggtgttcttctcttgctcatctccgccttgcatgtactacgtagattgattccagattaattacttggattatattgttgtgggcaatatgtaggcactagctagtgtcatctcctgtccgattaatccatacatggctgtcgttgcaacttttttatattcatcaatgatcaattcttagtttgcattaaagaggatatatgcatcagtccatgcacctccatagaacagaacatagcaactttagttttcagatagagaaactattaaactctcgaggatacgttaccctctctgcagatatagatatatccctgtcccatattgtagttagtatatggacatactatcatcctctcaacattgtacttgtggttgctagctttgcacaggctaattaatctatctctgctctaattaagcatggcaaacaatcaggagcggccaaaatgcagctgcgtccagtccagctgcacccagctgtaagtacatacattaccgtctattgtgacgttagttagttagttaattagctaattgctcttactgctcaccgtctacttcttattttgccgtgcctaatttatctgcagatattgccggtgtttccgctcgcgttacttttgttcagacaactgcaattgttctggctgctacaacattaaatattacgaggatgcgatagaggagatttccgacatgatccagatgaaaaacccgaatgcatttgatcccaggattattgttagtgttcaagatgcaacggcagctgatccccagagctctactagtgctatttcagacccaaaaaacacctccgatgcaatgccggtaatatacctgtttctaatttcttattggagcaccaaacttaactgattccatgctattctagtctagctatttaattaattttgatgatgcatggttttaagtggcttgagaactcacgcatattcagtaaaatttcacggcaatgaacaacggaagcatgccaaagggtgcagctgcaggaagtccaagtgcaacaaactctactgtgaatgcttcaaggtgtgtatatactagtacttcgttttttacataaaacctatatttattagtattatgattagatggctgccttttatttccctcttcaagaacagtgtggggtgcactgcaaaatgcaagtgcctagagtgcagtaacagcttcggagtaaaaaatagtgagtgttcttctaaactgttatttccttgtctttcagatcagaagtgtgcgctcaattcgtttggaggccctgaagaatctcattttgctcttcacccgtgtcaatggttttgtcttgcctgtgttttttatctgacctattttatacaaaacaggtgaatcaagcaacaaaccagatccagatgataagagtgctactgacggcctgacacatgaagaaacaactacggaaaacatcacgctacctggggaaacctggaactctgatccaaacaaacgcccaagatattttgtaagtttttcgccctttaacttctttaatatagtttaccaatagaaactgtaaacttaattacaatgtgttaaacttgtcataacctgttcaaactgaaactctgacgatatgctcttttgttcagtgacaaactgacaacaactttcatatcatgatgatttaccgtcctccaggcagtgatcactttctgccaaaaaaaacgcaactgtaaacacaaccaggtttcagtatcgaggggtatctatacattaattcttctctagtatgaggtttttaagtcatgcaaaagtttgttcggctttagtagtatgtaagaatatatatataaacatgattgcaaggacacttgtacataatatacaaggcagctgccttgccttctttagaaaaaaaaaacagacaaacaaaaatgattgcaaggaaaggagcctcaactgcattattggcacttggtgacatatgctcaaaatccttaataagtaacagagcacaatcaagccttggcctccacatagttaacaccattccattccacgtactgttgcgactgtgtagtgcacaagtttacttccataaagctttattcggttaatccccgtatgggagagattgagggggattaattccacacctcaataggtgtgaaattattcatctccaaattctcctcaatccccttgtgagtgggattaaccgaactagtccttagcgggatctgtcgaggccaagccttgagctgagccacttgccaacgtcgtccatctcttcagggatggtatagtggcctagcctgcatcataagaaactttgtcaatctttgctaaaagaattctgttttgtactctgctgtgcaaatgcatgaatatgtacccattgtaggatttgaaatgcagatataagaaccccgaggatcgcagagtgtcagatgacctctcagcattcctgtaggatacaacctcatccgctgcaacaacacacagaattgagaacagactgacgcatgatgcattgactggtaatgactagttatactgtttctggagggaaggctacatgaatcgacagctttgttacctcttccatggctaagtaagataggcaaggaggcagctcttcttgcagctatgtgtgagctctccatcttgcccctcagggtcctaaaattacagtgcattagcaacactaggattcaggaacaagtgacactagtaagtagcaagtgtttgacagattaatttctgcctaggatggcaaactggcacctggagcaagggagccatccactcaagctgatgaccgcgctaagtgtgattgggtaggggatgccacttgcgaatttgccatgagcatagcacgcagctgagtagagggaagcagcagcacccatgctgaaaccaccaatcccaagcttcactgcactcgcaaagtgtggaaatcagtggaatgagtgtcacaggagtgagtggtcaccagcatacatctgaagaacatatcatagttagtgctagttttgtatatatactggctcgcatttgatcacctaattaacatatgcatttaccggtgccactaataaggatcactttgaaaaattaaaagaaaaagaatctggtaagaccataatatatgttacattgatgtggtcctggaactagtaccatcaggcggctctgacgacagcaagtttgcaatgtgcgcagctgaagcatccagtccttcaatgtcgtcacggccatccactgaagtatcctccacatcaaaccctatttcagttccatacaaaagctaataagtcagagagaaatggcagtacccctaagttttcaaacttcagagagatggtagcatagtagtcctgaatacagggtattctgccaagttccaatggagaagaagaagcttacatgcagtgcaagggaatccaccaaatgctgtgacaggctgggttgctgcggtggggcaaatccacttgatctacaccatcataagcttcaaggtgaataaaccatggtgcaacaaaaatagactgctagttgctactgaacatgataagctacactgatctggagatagaccggtggagagagaccggtgtgtgttaataggggaataaggaacggtgtgtgtatgtatctatcatctgtgtatgtgtgtctgaagtacaagcatcgacacttacatttggcaatgaaagagaatccaggagttgggaccagctgaaaacagaatgaacaaaacagagaaaaggaaacggatcagtgcagaaaagcattgtggatgcaactagtataggtattctgtttcatattctctgagaacttatgattaacacatcatatatgtataaacaacaggcgtcgtctaaaagtatcagtgaagatataagaacatctggaactacaaattggaatccatcagatcagactaaagagagaacatttacagtactggacagaatttttacagcaagttgagcaactagcctgaatttcttagcttatcttaagagaataaacaattatcttatcaacaaaaaacgtaacatgtaagtagctgagttgctgatctttttagttactggagacaatagggaaatgaatgaaaaagaacaggaaatgaacatctgccgcagagcttaacttggcaaatgtgtactgaactcttaaaagaaattgtgacacatgcatcataccaaactgaaaggcggccaagcttactttttaccttctttgctcccggagttgatactggccattaaaaactctatttaatggagccaagatactctaatttagtggcttatcataaattatgctgttctttagatgctttgtgcagacatggaataggaaattaggaatctttcataagctaccttacatttatgcaattttaatatgccattagcccacatcaattagaagtatttgacattcctctccatttctgaatggaaagtgagatgcattatctatgtccttggtggcgcagaaggttgtcaggtgtgcagaaggacaagagaaacatttactccctccgtcccaaaataagtgcagttttgcactattcacgttcaacgtttcaccgttcgtcttatttgaaaattttttatgattagtattttacttgctattagatgataaaacatgaatagtactttatgtgtgactaaatatttttaaataagacggacggtcaaatgttgggcacggatatccacggctgcacttattttgggacggaggtagtacttttgagtaaagcaatactaggaatatatgcatgcacggacacagaaaggacaacacttcagtcatttctggcagaaagatgcaaagggactgattaaagcgttgcatctacattgccatgatctagtcccataaaccataaaccattggttgaaaagtgtagtgtatttgcacttctattaaatttgaagaagatagtattgcttgaaaggggagcatctgagtaagcaagaaaagtttgtggaacaggcaaatctatatcaaaccagcagcatacagctagtaccttgcaccattgtcacctaggccatgaagccacacaatggtggcttggtgccttccctttggcctcaccacataggtcctcccgtactcaactctctgaccaccccgtccacctgaatcaccatttaaatcgtgctcagaattgttcttttgcagctatatagattattataatgggcaaataagttttcgagaaaaaaatgtataatggagtagacagattaccagaagaactgcttccatagtaactcatgatgttttctgcagcaagtctgtactgatgctactcagctatagtactatactactatttctgtatgatgtgcactgaacgtccgaacgtatggaagggtatgaagagcacagccccagttggcatgtatttatagtgaaggttatctgaagagggaatattatatgtgtgtgtgtgtgtgtgttggacactcctttgaatctgcatctcaggacagtgcggttttccgcagcaaagctgtcataggaggagcatctggagtctggaatactcaagggatggtagggtaaaaaagattgaagccctttgctctagagtgaagaatcctgtacaatgcttacagccttgcacacagagatacacacacagtgacagtgacggtgacgatgaaagtgatgcctaaacatatcatgcaagcaaactaaggccaaggaggaaccatataatacataaatgctgtttcatgtcccttttttcccttattttttgtctgccaagcatatatccgcttgtaggatggagtactaatgcccactgcattctgcccacaaattgttgcaactccatatgggaaaactttaaataaaatggcaaggaataagcataacggaacaaattgtccagtcattgagctttcttttcacatcatacttaccagttactgctagatggaacttcagatgttcttgctggaagtacaatttcaaaaagacggagtacaaattctgattttggtatttcaagtttttttatgcagatgacaaagcagaaagaatttttttttcctggaatgtgcaaaagaactgtgcgccttgcattaattttaggagaaagcaaagcaaaaggaattgtatgccacaacttgttttggcataccatcaagatatagtgaagagtccagaaaggatgattacattggtagaaatatctatcaagtgtcgacaccaaatcaacatggatatgggaaccaaatcagacacaagtgcaattacacttgcagattgcctcataaacgtggtgcaatcttcatgaaggtacagatgcttgcaacagaaacatgacatattgttgctacaattacgtcaactgttaactgtagccattcaattagttaaagggtcatatcaaactagacagtagtttgccataacatttagctgttgttgactttatgcaacacaagttttaattttcttttagactggaaattgtctcaaccttgatgcaataattctagtgaaatttatcctgtttacactgttgactatgcgaatgttactaaataaataggacaactacagcctttttttttacctttgatgagctagctttatcttaccctagatttgcttgccaagaaaggtggacaactttaccaatatgcctcagaaatggagctgagttgatccaccctcaacaataaagattaaagatgaaccaaaagtcaaataaaaactgaccttgaatgaaattttggtaattcggtagcagaatgatgcaaaaggtctgcatatcttctttcagagaaaaaaaggttcacatctggtttttccatgtgttagcccactacacacaggaaggatcatattctgttctcctttttattttctaatgattggtacaggtaatgtggggggcagcccaagccagaatatgtgatttatatgtcattcttgtctctcttagcaccagaggtttgagtctacagtgagcaagaatgaggatgggacattagccacctgatctcactttttctcacactggaaattatagactatgattttgttgtgccctagtactataagcctgcatattcctccctacgcacatcattaattttctttattgcacatgttcctgtgaagagttaagttttctgtgaagtcagaaaaatattctaaaaaggccatggagaagatattggatttgtcattactaaaacatataattaaggaagatatgaccacaggaaaagatatattcttctttaaatgttctctattctgtccatggttaaccaagttcttattcatcagtattctcattccagtccatttctgctgctaaaaggatgaaacacaagggcagtgacaatatgataaattgatatatgcctgtagtgatgtagtataatgcgattaccgatacacaaggaattcttgtgattgcaattccttgcaagcaaattgctgattgcagatgccgcctgaatcagctcccaccagagccaaatcactgaataaaacaggaaaaatattacctttggccaaaccactgaatagtggatacaacaggcaaaatattactcacagtaataagaagtctacatcaaggcttaacagaagtcaacttccaggatgcaagagggaatgttgcaacatgaaagatccacggccaccattagacgaggaattatgccttataaagtactggggcattatgcatgcttctaattacattgcttgatcgcccagaaattcttcagtaaaatctcctctcatttctatttcatactttattgagagaatcctttctactcatactgttgatagttcatgagctaatactttcttctagagtgttttcctatatacatgctctcctattctcttttaacttttagacttataaaaattactttgggcgagagaaaatataagaaaggcaaagtgaagttgacatcactaagtgcagaatttatcctattatcactttatcaaccttaggcaatccaaaacaaagcgaatatttattttcctatgtgtttgaagttgtgcgataggacatatataatcagttgatggtaggaaaaatgagttataagttgcatcatgtctataggcttaaagaatcgaacctgaacttttcgacatatgatctcccatagatcaaccggaatttcttttgattgcccagccattttctatttctaatgtggtagccagtaatcatagtatttgttctcatcaggaaaaggaaaagagaaagctatggtgattagttcggcgatcgatcgattgcaaaagtatttccttaaatcaatgatactaaaaatttttgtttcacactaatataaaattttaaatattggtgactaaatcatatattggaaaccatgaaatgtcaacaaatgtcaagtaaaaagagtatctatcaaaattcaaggtgttacaaagcatactaaaggttaatatatagtagaagaaccagatcattattgcctagatgtggcctataaatgtagagtaactagtttgtaaatgtcaatgcataccttcaaaattcaaacagtggaaggctcggaaagaacatccaacagtctataatgtggggtctggtttatctagctttcacatagacaaaaaggcatcggacataaccagaccatctctagttttttttttctagtacattcaacactaaaacgcagagagtctagagtctaatagaagtgaatatggatatttagtcggcgcgcaaaaggaaacagcaatgaacaaataaagcatagccatctttaaaagaagaaagaaatggcaaagctaaacaaaagtacacgagtaaagtatctgggaagtaaacatagctagcattgcgcttgatttgggacaatcaatttagcaggacatttaacagtgattgctatataagtagactttgtttctctttttccatctagttaagatcaaaagactgcctgctgacccaacgcaatcaggagcctttgaggagtcgcaactcacaactaagcagaagcatcaggattctctctgacacagagtattaatggtctaaaaatactacgtaacaatatagcaaccacaaggataaagaagctgtgcacaggcttccgcaggcagtcagtccgcccagttgattcagtccatagctcaggttcacaatcaccttctgcctgccaaatcaagaaacgatctcagtacatggaattgtaaaactgacaaacaagaatacatggaggcagcatcgagacattaagccctagtatccaagggaaaaggaaagtgttcagctaacaagaactacaatgtatttctttatgagcttgcaagtgaaaggctgatgatatccaccactgaagactacttaggatttagtcataacaatgttacctcttttcctgactttcaactataaagcccacctatatctaaacatgccaattaagcatgcaaatcataagattcttatattattgaaagggaacactccaaaacacacaattgaacaaactgaatcatataatcttccctcagttgtgcatgtgactttcctctggtaaatgtggtacggtgtgagccagaccgtaggaatttacatcacaaaacaaatgaaaatataacatataagtaaaattgaagaagtttcgaggtggatatacactatcagtctatcaccatgaatcagtttctgtacttgccccaaaaacaattcacacagcaataaagagaagtgatacattgacagttttattttatcagaaaaaaatgaaggtgttaaaatagtaactaaagtaaatcaattgaactacttaagtcaagcaggtggaacatacctgtaactagttaattttagggcttaagtagtactgcggatctctgaagaacctgacaattgtctctgccttatccgtggaaaggtcagtgttttctagaataaatttcttggatgcttttgcaattgcttcaatagacccaatagcttgggcaagcttgaaaatcaagtgtgacatcaatatcagcatggcattatatgaacagtaaaatgttatctcatgttaagcatgaggattgaccatatatatctactgggtaggctataggagaaaaggaataaatgctaacagattagtacataaatatatcaggaatagaaaacgatcaattctcatcatgaaaagttccaaaaggtcagcactttgcatggagaaggtccaataactgtgtttaagctcagttataccctgaattagctgtggagtaatgctaagcttatcctttagaacgatttagtagaatgagtacacaaagatggtacttatatatgcaaacaatgtctctaatacattttccctaaagaaagaactatcaattaagtatgcggacttataattaacatttttatgcaagcaagcaaaagaccatctggtcatacataaggctaaaataattgagtgcataccgcattggcgtcatgattgtcaataccaggaatagaggtgagcacacgtagaaaggaatcagtgcactgaactgcttgctcccgctacagacaagcaggaaatcattaggctccatttcaattatagaccaagaaatagagcactgtgtatctggaaacatgtgaaagcacctcattcttcagtcttgagataatgtcttgctgcttgcatactgaataagaaaggagtgtcgatcaatgtcagcttacaattcagaatttgaataggactgagagaattgctaaatgaagtttgagatttacctccaagtgcatgagctatcttcacgattttctcgaaccccatctccggatcagtaacaggcacaaacgtaggaaagccaagcttcataccataccttgaataagaaatacatgaaaatcaatagctcaactaaaatattctggcattaacattatgataggtgcatacttgtgatatgatcgattaaatgattcgttttgctcttttgtaggaacagcaacaacaacatatagatgttttaactgcctcttcagcatattcaccctgaaaaggcatatcgaaactgaagtcattatcatagtcgttagggtggattggaataggagtctcgcacctgctaaagacagcaccttcattttgacaatcccagtttgtctcaaagataaatgcaacagatagctccccattgttgaatataaagtcctgggaaacacttgctcaggttacagaaaggcgccacagaaacagttgtgtgacgttgaagcaggaagaggtgcttacaggagatattgacaggaagtttaggcggtatgagtttgcagctaagaatgcagcaataaagttgatgaggcttggctgttgtttatccctccatgaagtgctcattgcgcatactccacgacctgcaggacggtgcccaaaaccccaaatagagtaaccaaaaatgtgctcagtgtaggataagctaaaagcagcctgctgcttctttgcttcaggcttcctgtactggtctaacattggagattccatatgaaagaattctagagtgcaaactgaatttctaagtgctcctgagtcctaacatactgaaattgaacagcagagtactgcagactgattggtttaaatgaaataggacatgaacatgaacatgccattagcaagtaagacgtgtccacaagtagcaacaggctggtgcttccggaaacaagcagccattcctagaactagaagtaagaaatgccgaaattgaacaggtgaacactgcaaagtgacggccttagctccttaagtaggagatgaacatggccacgcgcccatgccatataagcaagtaaaacatatccacaagcagcactagcctgatgcttccagagaggcagccattcctagaactagtaggattgagaaatgtaactcgtaccgtactgaactcatgattttgcgacattgcgggcttgattgatccagtatggggcgatgccctagcgcgtgcgtgagagggggagagagagagagcgagaggcgagggagtggatgacctggagcagcgggttcgggcggcggcggtgggaggcaggtccagccggtggagtgggtggagcgctccatcggatcggaggaggacggcgagacgaggcggcgccgcgacggggatcgagcggaagagccagccaactcgccgccggtttgccgtcgactcggctagtgcggtttcgcggcggcttttgctcgcgctgggcctcaagtgctagactgctacttcttccttgaggcctcgttttgttatgggccaaagcccggcacttcggcaaggatgggccagatgtttgaacccagggatttggtccgtttgaaaggaaatgaaaatgggccaaatttcctggatttgaacaaaactcttttcttgtgtgtgcgctggatttttcatcttttttgtccttttagaaaacttattttacagatatcttttttttaaaaaaaaacttattttagaaatggaccatttttcatggcatcaatgaattggcgtcatctctattgtccccggtgaaaactaagtcactaatataaagggaaaaggcgccaatgtataataagtttttcaaaaggtgaaaaatcgggagggggtgtaattgctgaatggctgttaaattattggcgcatttcatcaagtagtaagtatatattatattccccttatgtaagtattgcgtcatgtttgaacattgtttaatcgtgcttttccggtatttctgggcactgacagaaccatatggcgttgctttatatttctcttcttttcttttcggactgaaaggatatcactgagtttgaagcctgatcgtgtcgtgtaattctgcactgtacctcaatttggcgagttaattctagtattgatcatctgtaagctaacggttgggcaaatgaagagcagcacgcaccgtgaaaaatgatgatgcagctacatggtagtatctcttttgagcttcacgccgtggagactagttataattcagctccaatgatgctgcccccgcgaggcacatggcgaattcgcccaacggccggccaaacaacaccatcagtaaaatctttttttaagaggctcgctagctagcggcagctaacaaaatgatcaaccacaaagcgaagcgactgaagaagtcttcttaagtttcagtttcagtttcagggcgtccagttgcgtgcgtgctactgaaacaaccacgagttcagaccacggtttacatcaccagtttaccactaaattttgagccccatcaatatcacgatttttgataaattttgatcggttttcgataaatttcaactgaatttcgatcaaatctattgtttaacctttaaaatttcaatcgaaacttaatttcgagtcgtgtcaaaacatcgaaatttcacgaaattcgaccggttttcatcggaactgtgaacctgattcagacttgagagttcagacatcgacacggctggctactgaatgatagtatatagtagtagtagtacttacatatccgtggcgaatgcgatcgattgaaaactgaatttgagaggccattattcagagagaaaaaaaaaagggtgagcagcagcatttgctcctatcctaatcggtcaccatgattgcccgatggagcgggcatcatgacatgagccggcttcagtactccgaaaaggatatcagggtaaaggactgattaaaaagcgacaacgtacacaagcatgcatgtccaagtagtagtagtattagtttgaactagagaaagagcaagcaaagcgccgtcggggcggggcatcgtgttcgcagttgcaaatgttcagtgagatggggaggtatatgatgcatgtccattcgatccattgcttgtgatccacgtacaaatcgaatccgaggtgctcgcaattcgttcgtaaggcctcatcaattcggatcctcatgatcgaacgcaatgcgattccgagtgtcgatggcatgatgatactttgcttcctccttccgcgctccaattcgccttattactccctccgtcccacaatataagggattttgagtttttacttgcaacgtttgattattcgtcttattcaattttttattataaatataaaaaataaaaagttgtgtttaaagtactgtagatgataaagtacgtcataaataaaataaataataattttaaaaaaaattgaataagacgattggtcaaacgttgcaagcaaaaactcaaaatgcctaatattatgggacgaagggagtagcatttagcagtaattcctctctatgtctgtgtcggcggcggcgagtggtgactgctgagcccctaatccactgtaaactatcactagcaaaggacgctaatgtcagtcgatcacactgtttgaccagaaaataggagtactcagctttctttctgcatgctctgtttcttcgaggtttatgtcagtcgaagattcttcactgctactgctctcggtttctagtgtacagtagcagaagttccacgttaaaattgaaagtttaaagaaattagaacgatgcgacggaaaaattgaaaggttgtatgtgtaggaaagttcgatgtgatggaaagttggaaatttgaagaaaaaaaaattggaatctaaacaatgcctggattatttgaaactctcgaagggacgttcactcattgtttatatcattgtatgtcacttaaatagctatgaaaaaaatataaattaatatgtgatagatcacatgaacatttcataaatatacaagttactcattccgtctgtaaatataagggattttttgttggatatagtagtagtagtatatcatatgaatgaatgtggacaattcaatcaaaatctcttatatttagggacggaaggagtataatttaacttctatatgttacagtgaaaaaaaacaaattttattataaatatacgtttaactaacttagtttaatatgtttccttttacaacttacgaaagtgaattttaagttacatgggaagtgtataaatgtaaatatatcttgttatttcttaaaaaaaatcttgagagtttaaaattcctactacgtagaagtagacagcagtggaggccagaaagagaagatctgggccgtttattttaggcgatacggacggaagcaggacgtgtcccatctggcacggcacggtacaatcctccaattcccattcccattcccattcccaatcccaagcataaataaaaccaaaactccctcttcatattcccacccatgactccgactccgacactgacccatgcccatggccgcgctccgcctcctgcttctcgcgctcgccgtcgcctgctgcgccgttgccgagccgccgcagcaggagcgctcggctctgcgtgccttcctcgccggcacgccgcacgagcgggcgctcgcctggaacgcctccacgcccgcctgcgcctgggtgggcgtcacctgcgatgccgccaacgccaccgtcgtcgcgctccgcctccccggcgtcggcctcatcggccgcgtcccgcagggcactctcggcgcgctccgcggcctccgggtgctctccctccgatccaaccgcctcttcggcgacgtccccggcgacctcttctccctccccgacctccgctccctcttcctccagggcaacctcttctccggctccgtcccgcccgacgtcgccaagctcacggcgctccagcacctcgcgctctcgcacaacaacctcaccggcgccatccccttcgcgctcaacggcctcgccaacctccgctcgctccgcctggacggcaaccgcttctccggcagcctcccgagcttgactctcccgctcctcgaggacttcaacgtctcctacaaccagctcaacggctccatccccgcctcgctcgcgcgcttcccgcctgagtcctttgccggcaacctccagctctgcggcaagcccctgagccgcccatgcgagcccttcttcccgtctcctgctggcgcgccgacgccgacggatggacgaggcagcggaggcggttccgtgccagtgtccgagaagaagaagaagaagctgtccggcgcggcggtcgcggccattgccgtgggcggcggggcggcggcactgctggccctggtgctactcgtggtctgcaccgcggcctcccggcgccgcgcggcgaacggcgaggtcgggaaaacagcggcggcgaggggcctgacgccgccgtcgacggcgtcgggggagctgggcgaggtgacgtcgtcgacgtcgaaggagatcgctctggcggcggcggcggcgacggcggagaggagccggctggtgttcgtggggaagggggcggcgtacagcttcgacctggaggagctcctgcgggcgtcggcggaggtgctggggaaggggagcgtggggacgtcgtacaaggcggtgctggaggagggcgccacggtggtggtgaagcgcctcaaggaggtggcggcgtcgcggcgagaattctcggcgcacctcgactcgctgggcaaggtggaccaccgcaacctcctccccgtccgaggctactacttctccaaggacgagaagctcctcgtctgcgactacctccccgccggcagcctctccgccacgctccacggtcagtcgctctaaccactcctccattcgaccggaattcgcgcggtttttgcttgcaagtacgcgcccaactccagtccaactaaaacgctaggaattgtcgctgcatatgcattgcagtatagtacgataaacagtgtgggtgtcatgctgtaaagcgaaagccattggggcacacctacacacacgacacactgactatgagtacgatacacgcaatgctaatctcatcaagcgagtgtcgtctgtgatttcaatttcgatcggagatgctgttgcgatatcaactacgaacaggtgaaaactgtagctactgaattcgtcggccaagtgcgtgctagtacttcagaatgcagtccagcaattgagcaaaattatcaagtacatttccacgcatgaaacattctctgtgttggcgattactgtttggagctacatattcagttattactactactttaacggtacagctactttggtacggggtttttctttagaatgtttcatggcatggaggtacgtatgtttgctctaacaaaagcaacagtacggcacatagtacatatcactgtagagtgtaggttaagcattgttttagacaacatcgtcgtttgatttgcatcaacatcactgcaaacttcctcagtagtaaaccttcagtctaattcaggaggtggttggtaggaggtgtaaggtgaattttgggtcaagctgtagataattagtcacagtgcaatccaatgattcgagatgctacaactacgagtagtcagcaaggggcatgtacaagagatgtggactctagcttctttccagcggcgcatgggcttgaggttccaaacctaggaaagtgattgagagggtagcgtttgcatttgaccagcgttcttcagattccaaatggcttatgtccaaatcatccgaaagggattgaaagataaatgtaaggttcagtacccatcttctgctatccatgatgccgccctgaattttaaaattttctgaacgactggccatgctagtttgtttctttcgattttatgcaagtagtagcaaaatttaattactgctgttcatcagttaccagagggcaactttgctttattttgggtatcactcaaatgtcaattgcctgtcacaagcgaagcatttagtaccaaatccttaattctgagatttctctgattgcttagttgttatattctttttcaataagtcaaggttttttattaactgtaaacgtcacatgttctgtcatacgcgtatgctaattactacctactacagcttatccagcatgttgatctttcatacaagcaacgtatgtagcatgcataatctgtgtgttttacatcacaattgttatatttagaagtccacgaacacgtacggcatagttttttgcttcttaatttcgaaagagaatccattatttctctaacttttttttttgctgggctttctctaaccaatctctcattctctctaccaactcgaccaacctgagtacaggttttgtattctggtttcaataatagaagatgcttgccttcttgctgtccagtagtagtgcctaccaaaaaaaatcaggtttactactctgtagtgtatgcaccaatggaaacaaaattggaggcgcgattctgtatcactaataattcagccgatagagacaggctcatgcgatctttatcccgtttaagaactgtcttttcatcacttcacttgtaaaactagcatgtagaaatcacagaaatgataaaaattttcatgcaaaactaattgtagcataattgtaaattgtacttgtttatgttcataatgaaaagtgtgcgcgtccgtattgtgttaaaacaacactcccttcttcccacaatataagatgctcactcatttcaagatttcagatttaaaacattttgaccaacatttaatacaacatttagttttactgtgcattgctttgctgctctgtgttttgtggctggaaatggctgacagtgaattgacctcagggagccggggcaccgggaggaggacgatggactgggacgcgcggatgcgcgccgcgctgtcggccgcgcgcggcgtggcgcacttgcacgccgcgcacagcctcgcccacggcaacctcaagtcgtccaacctcctgctccgcccggaccccgacgccaccgcgctctccgactactgcctccaccagctcttcgccccgctgtcggcgcgccccaacgccggcgggtaccgggcgccggagctggtggacgcgcggcggccgacgttcaagtccgacgtgtactcgctgggggtgctgttcctggagctcctcaccggcaagtcacccgggaacgcgtccgtggacggcgacggagcggtggacctcccgcggtgggtgcagtcggtggtgcgggaggagtggaccgcggaggtgttcgacgtggagctggtgcggctcggcgggagcgcggaggaggagatggtggcgctgctgcaggtggccatggcgtgcgtcgccaccgcgccggacgcccgcccggacaccgccgacgtggtcaagatgatagaggagatcggcagcggccacgggcggacaacgacggaggagagcgaggaccggtcgagggggacgccgccggcaggcacgacgccgtgaacactctactctctctactggtgtcgtaatgcagcagcacatgtcagggtaaattgatgcatgaacagcttcgttcgttcgttcgtggcgaagttctctcactctgtttttttttttgtcctccatttcttcagtttatagcctctcttgacttgatctagtaattcttccattgtttcgtcgatcaaatgagttgttactacctgttcgttcctcttcagccaagtgtaatttttcagtccgtatctactaccaccattgtagctcttcgtatatgcatcttcattttgatgctgtgaagtatatgtaggagtatgacacatgaataaacagaaaacctgtgaagttctgtaccatttgacaaagctgggcgctacctgaatctgaagacccaagaaaaagacaaacatgcattgaggctcatgctgtatcgcaaaaaaatcaggaaaaaaacaatccatctcatccagaaagaaaaaaacgtgccctcagccttgttgacacgaagtactagtagtacgtacagtaggttgtttgattggagtcagcacgtcagaatgtgggatgtcatcttgctgaagaatctgcatttttgcagctgtggatgtcccagcagaagtaacatcgtcaggttagatttacaggtgctctgctccaaccctcgctatccgggccagaagggggaggctgcggcctgcgggcgagtaggccgtagtgaattgggcttttgtaagttgggcctttgcggtgcgcgcgcgagtgggccgcggccttttgacttgttcctccaactccaactccaactaaatcggtggaacctttcgtcgcgcgggcgcggcggcatgcgcgcgctaatcttcatctcctcgtgaatcaccactgcagctgcagctaatagtagtaaattccatccatggccgtcgcctacactagtgaccaccggcaccaccaccaccaccacgacgtcgtgggcaggctgagcagcctcgtcgccttgtgcggccgcggcctctcgcgcgtcagccgccgcctcctcctcctcgaccgccgctgctacggtggcgggaggtccgcgccggccaagcaggacggcggcggcggcgaggccatctggcagcggacgatcctgatgggggagcggtgccagccactggacttcgacggcgccgtccactacgacagcttcggccgccgcatggccgccccgcgatccgcctcctccctctcctcctgctgctcctccgatagcctcggcgccgccacctccgaggcaagctacatcacctccacctccacttgtgacgatggcgtactctgaatgtatcaccatgccatgcatctagctctagcttcatgcgtttaattgccttcaattagtatttttgtcaccgatgatatattctgcattagttgctttatacatgtgcatgcaccgtacccttcagtttaattagcctccctcatgcattacaagagcgaggccgccccagctcatccaaagcttaacaacctactccctcgatccatttctaaatatttaacgtagttgatttttttaaatatgtttgatcgttcgtcttattaaaaaatttaagtaattattatttttttttcttatcatttggttcatcgttaaatatacttatatgtatgtatatagttttacatattttatataagtttttgaataagacgaacagtcaaacatgtgtatcgatctcattgcatttgggggccttttgctcacatatacctgcctcttgcatagttggatatgtacacacacaaagaagctgcctgcatgcacgggcgaattcagtgggtccaaacagaagagcagctgcattgcctgcatccatgatccatatccatccaacagatcgattataacccgtcacagttacatgcacgcgcgcgtggtgcgtgcagatccaagcatgcgtacgttgtgatactgcatgtgtgatgtgcatatatgctgcatggtttgtgttagcttcgatcttgtggttctttgcatggcaagatatatagcatatgtagctacacagcggaggagtcgccgtccttgggcagctcgagggcgcccttgttcttggccgtcgacccgtcgtagtagcagaagtagaggatcaactgcgccgcgcccagcagcgtccccatgccgttcggtatctatttatttattaattatgatacattaatatatagtactattagctagaattactctatgattataataacaactatactacttactgatcctagtaattatttatgagataattgaaagcatatatatatatatgcatgcataatatgtataccgtgatgaggatgtcaaagcggatgaacgcgtatattgtccagcatatgccgttgatgaagctcaccagcgacaacgtgaagggcatgtactccacgctctttgtcgcgatcacttgtttctacattcattccatgtagtaattacatcattttgccacacacatataaatcaaataattaatcatcagatcagattcatgcaaaaaattaataatcgacagatatatatacacataccatgatggtgagcggcgcggcgtacatgagggtgccgaagaagacgcagagggtgccaacgatgagcgagcgcttgtcgtaggtgtgggcgccgaggagcacgccggcggcgacggcggcgaggaagacgagctccacggtgaggacgccgagcatcctgcaccgcttgggcttgggggcgtaggcgaagtagatggcgaggtaggcgatctcgatgaggagtccggtgccgttgatggtgacgacgaggatgctgttggggtggatgaagggtaggccgtagaacacccacagcgcgcagttgaggaacgtcgccaggtacggatccggcacgaactcctccacgtccttctttttcacgatcgtcacgaacgtcgagaatggcgacaagaacaacccgaacgatatcaagttacctagtacaattaatcaattattagtcaattactaagtggtcgggcaatatatatatatatatatatatatatatatatatatatatatatatatatatatatatatatatatatatatatatatatatatatatatgaagcatctacaagcaggttcaattcgagacgacgtaccgatgattccaacgacattgcggacggcgtcagggttcatcaccatcttgcctgctcctctttgctgctacttttcgatattttctcaggcgaatagatgggagtatgtattagtacagtggcagctagcgagagcgtgtagctgatagcaactaatcaaccagcaagagattaattaactgtcaggccagcaactgtaacctgatcaaatagttaacttagcagctagctagctagtgtgctgctaagttaaaattgggggttaaattaaatatataaaatgcgtggattttatttccactgattaaaatggcggcctctgccctccaattcctccccccttaatcttacgagagtcggaataatggagaggcagagcacggattcagattggccatggccgcccttatatacacgacctatggctaaaaaaaaacacatacaattaacctgattaattaaagtggtgctagctagcttgaggtgcagagacaatctagctagttttggcttaattacgtggggccaaaaaatggacaagccagggtggagagcttactggagctccgaaatgcatgcacagccgtctgctcagttttactcttttccgtcacaaaataaattaattttgccatgtctatagcattttccaaaataatcatccaaaacagtctggatagtagactgtaaaaccagaaattgacaaaaccaagtctattactcgctcattaccgcctctctaagaggatctaggacgccataagcacatgatcgcagctacataacaaaccaatagagttgacgaactgtacaacaatgtagcagtggtgggtgaaaaccacctccgtgcaaaacatgccaaagaaagtactcaagtcgatgattatcctagtctcctgggagttgtgaaaggagattaactcttttccctcttttgttagggccgactctaactctcaaatgatgtacatatttgaggatctcctaactctatcaatataaaagataattcttttgccttctttttcaaacaaataaatcaaaataaatatgtttgtaccactcaagttctctaccgctcgtctcaactaactacaaccattttacatttaatttttcacttactttcttttatcaaccaaacatcaatttgtacctagcttttaatatccgtatatagcttcaagatacttatattttaaaatggagggaactgtactcacaaattaataattattggtcatttgactgacacgtggcacgcaattggcgttagataggcatccgtaccgatccgatccgaattattaaccgtacacttgcgggattgcaggagagcatgcgatttgcatggcaagtgaagtgattgatgatggttcgaggttttgcttgcattggcatgccgatagcatgaataacgttcgatccatcaaacaatacaccaagcattttgaaagcacgggctttcttcttagccgattcagcccaacgcgttggtgcggttagttagtttcagttgggctgatttccaaattctgatgggccgatcgagttggacccgatgaatagtaagtttacctcgtgtccctcaactttacaccaagtttgtttgacatccattatcctcaataccagaaatattcacccctaaactatactccctccgtccctaaatatttggggccattgactttttaaagcatgtttgactgttcgtatacataaatgtttaaaacttttgtgaaatatgtaaaactatacgtatacataaatgtatatttaagaagaaaaggaattaataattacttaaattttttttgaataagatgaatggtcaaacatgtttaaaagagtcaacgggacggagagagtatacaaaaccggataatctgatttcgttgacgtggcaccctaccagccacattagcacggcccaccccctctccctctccccagcaattggactcggatcgccgcctcataaccgcatccgactcatgagagcgttgcagcgttatatatgtaggatggacgttacgatcgatgtgatacgtgtatccaaatagcggtagcgaattgaaggaagatatatcgatcggttgaaagtgatgatggacgatgtgatgagcgagatcctgctccgtctgccgtccaagtcggtggtccggtaccgcgccgtctgccggagttggcggcggatcacaagctgcccctacttcctggccgcccgagatgctggtgggatcctgcgacggcctcctggtgctggagcaggaccacggcctgtacggatgctggtacactgtagcatttggacggctaggttcgtgtgtgtagaggagagggatgatgtgatggtggtgtgcgagtccgcccatgacaagaaacttaatacccaacatgctgctggcctttaccatctccgtgacaacaagtttttggagcccgcacttgatcttggggaatgctccctctcagagtttcggttcaaggaaaagcctcgtccgacatgccttcttcgacttgccccgctctcccgacttcaaattcatacccttcgatctaccccccccaccaatttccccttttctcacatataattataggccctatttagatcccctggcaaaattctacacgctgtcagatcggatatttggacacatgcatggagtattaaatatagacgaaaaaataactaattacacagattgcgtgtaaattgcgagacaaatcttttaagtctaattgcgccatgatttgacaatatggtgctacagtaaacatttgctaataccggattaattaggcttaataaattcgtgtcgcggtttacaggcggattcattattagactacgtttaatactttaaatgtgtgtccgtatattcgatgtgacacatcaaaacttgacacctctggatctaatcacagccatatatcatgatgcaacactgtaaatatatatatattgatgatgaatggaatgcctggagataagggatgtggggctctgttttcgtctgtttcacaagctatatgaaaacttagaggcatctgctttttatttttctgaaataatttatgtgtcacaatacatcacgccatgtacattcactagatctatagaggggggggggggggggtgtatgtacagatttacaaagttacagggtttggagaactagcccaaaaggatcaatttacagggctttggccaagtccgctacccaggttgagaagatagagagttactacaggagagcgggaggttgcagagctctctgcctaggcagaacctctccctagggctggttatgctgtgtcctgcttctccatgaaaatttctgcttccctccagatatcctcaaatagctgttgtgccgtgcacattttgtgttgaaagatccttgcaaatctatagccttctgcagggctgcatataactacatgttcaattatgagcttgattccctgagccaggctgagaaaaactcggtggaccgttctccaaagcgcgttttttcctgtaaaagacatctataatgtcgaaatagctggaaccaataaggaattctaatcattctgtcaaaggatccttaccttctctgaaaatggttctgtttcatttttccagtgtcaccatgggactcacaacctccttttgcttcctcacgaccttgcttcggcaactcaattgatgtctgaattggaatatcgcaacaagggaaaaaaagacacatgcaacagttgtgaatatctggggctgcagg

SEQ ID NO: 4957 - DNA, 13980 bp, Oryza sativa
caacaatattttgggaccctaaacagttttaattcaaaaacttttcaactacaaagttgtaggtcacatcgagggctacaattttgatataaagtttgtcttcattagagttcacatgaaaaagttatgaattattttttatataaagtttttagaccgtcatgtttagggaccggggtgacataattgaataagttggaggatctaaacgagtgatctgcaagtttagagaccgggatgacacaatcgaataagtttgaggacctgaacggtcgatttgcgagtttagggaccgggatgacacaacggtacaagtttagagaccggtgatggactttactctatacaataacttttcctggcggaaaagccatcaccccaagccatatgattaaaattgttctttggtggatacgtgaccttgatgatttttttttgaaagttcaaaccttgaaaatcttaaatccgagcacaatcccattttgacaggttgattcataaatcatcaaaattctttacaagtgtgcagaagttttatatcatgcatttcctattgaattctgtgatcgtccgttctcatccatataccatctgtttaatctctctcgagtaatctctacctgaaaaaattaaacatgaagcacatcattaaatgagaaaaatatgctcttctaatgacccatgaattttctagagagacccttaaattatttgaaaaaagatatttaatcagaaaaaaaggataagaaaaaaatatgagcagaggtaaaaaaaggcaacctgttttttccaatcggtcctaagtgtgatgaatagaagcacaagagtctggactagtgttccaagaagcatgccgatccaaataccctgcaaaaagaatgaacataagtgagggacacaacttaaatccagattaactagtgaaattctatcatacaaaaattccttacctttgcttgaaatcctagcacatagcctagtattgcaccaagagggataccaataaagtagtacgatgtaacattaacataggcaactacactctgccaacccgatccgatagcgacacctatagataaattagaaaattagtaatttcattgttaaattttgaattactttgatatacttgtccttcaaatggaataacatacctgagagcactggttgaacactattcaacaaaatagagaaagctagaaggggagcaagatcagcgacttcatctgctactgccttactttcagtaaatatgtatgcaaggcttccacggaagaaaaggaagagcacaaacaacacaaatcctatcaagaaagaagtggtgaccacattgaaaatggcaaacttagctcttcttgcactcccggctccaagttcatttgccacccgcactctaaaaatatacatgcattaagtatatgtcaaatttatggttcatgttgcatcagttagatgaaccacatagtgagtgacagctgagatcgtgaagttaccctattgcagacaaaaatccgatagaaatcatcatctcccaaccattgatattaaggctacaaagtttgcaagtgaaaacaacaatgttcaataagcaaccttttcaattactagaggagaaacacaaaacaatacaatgatatacatgatacaacatgatctggttgttgttttctaaactaatacacaacagattagagtggaatatattaccatatagaaagagcatcaagagcaacctctgcattcttcatataaccagtgaggagcaccaatatggtgttgtaccacaattctaaactgaaaaggtaaaagaaaaatgagaataaattaatgagcttctaattatttgtataaaagaacttgattaacagttagcatctaaaatattaactttctatttgccatcatcaatttttttgtcgaaaatttcatatatacacataaacgtaaccatgttacttaccaaagcatcactccagacgataatgaaagcttcataatagcaccaagatcagtaaaagcagaggatgagaaccctgtccatgttagagggcaaccaccaaagaagacaaaagcgagttggccaaacacagggatccaaaaggagatgaccatggatcccatgaccccagcaagaccaagttggaacttgactgttaggagccatgacaagaagaggtgaatcccaagattgaggaaggcaaggtaagtgacaatcatgttcttgctctgcgcttgtaggtacatttggagcgtgaatgcccatatgtaagagaacattacggggatgtaccatagagagatggtgccagcgacggcagagatctcaggatcttgaccgagagcaatcaggagtggagttgtgaagatatagaccgggagaaggatgactgcacaacagaagagaactagccatgagcgttgtagatagatgcccaacatgtgatattgcttggcgccatatgattgtccacacaacgtttctaatgcgctcgccatgccaagctgcaatttacaacaatgtgcatatacagttaatttgtagtatatactgtttttatatgcatattttatatgcatatcaatagatgacttatagtgcaaattaatatttagtaaaaagaagttttcataggagtgacttgtagtatggtctggttatgttttatttgtatattccgttcaaaaaatctaggtaaagacttttgctattgttgcacagctagtagacagaggtagtacaaactactttaattacagaagaaaaaaatatatatatcagaagatccaacaagaatacacatgaaaaaagacccggcaaaaagaatacatgaggtagatgctatatactccttccgtccctaaatatttaatgccgttgacttttttaaacatgtttgaccattcgtcttgtttaaaaacatttgtgaatattattaaaaaatttgagtagtagtagtatatttaacaatgaatcaaatgagaggaaaataattaataattacttattttttaaaataacataaacggtcaaacatatttaaaaaagtcaacggcgtcaagtatttagagacggagggagtactaattaatgtctggagagaaagccgtgcaagggaaggatggctaggtcaagagtctacttcaaagttttactagtaatttaaaaatccaaggaggcaaggtctcacatgattaattttcttcctgcagtatgtactatatccatttttttttaaaaaaaaatcgagcctatagcttcttagctatagtacaacaatgctggacaagatcgaacactctgttttgaacctataaagacagcaactgaacatccattgtttgtctcaattaatcgatgggcaaattaaagcacaacaaaaaacttccagcgcgcgcggcgctgttagtctctgaatcggcacaattaagtcaaaacttaacgtcatcaaagtcagcttttagaaataaaaaacagctagttgccgaaaacacgaaacaggtaaaaagaaagatcaatttgaattgttacaacgtagtaataataatttaaacccaaaactgtgtaatgataactctgtaataataagtaaaaagggaatcagcggcatgacttaccaggatgccattgctgaagcgcatgaggacggtggagacgagggcgtaggcggcgagctcggtggcgccgatgtgtccgatgaacgcctggctgatgacggtgacgccgaaggaggagaagcgggcgcagatggaaggacccgccaccacccacagcttcttgttctcctccaccactcgccgcctcaccgatccaacctcatcctcctctgcatcatcatcttcctgatgcttgtaggtagccggcttaggctccaacagaggaaccgtcagcttctcatcatcacccggcttctccattttgctaattaattagtggcggcttgtagtttgcagcaatggagatggagtggtggtgtttcagattcagtagcaatggcgctgctggaggaaagggaagcatcaaggatgctcaagtatggagctactgatgatatatataaagggagtcgaatggaagtacaggattgcacctgtggttgctgcatgaagccgtgggttggtaacttggtatggcggagggcagaatcgggaattaacaggacttaattaatcgatgattattaattaatagtgactctagtctagttgatcagatcaatgtatatatccatatacatgttgagaattaattagcaatagtaggtggagtaagaaggaagggtgagattcgatctggggttttgtgtacattgtactatgtggcaatgagggcaagaacgtgtactgtatatagctttgcagcctgtagttgtagactgtaaagacgcgaggtatacatacgcgtacgcggtacggcggcttatgttgcgaatgcggggcgtcgggagatgccacgtagagatgccaggtacccgttcctccagggcaccaccaggcaccagcaggctgcatcgtgattcgtgaagcacaggaggccacgcacggcggaggtaggcggccggagtagtagctggccagccgccgtcagatcagcttcgtcaacaaaatataatggatgcttgtccggcctgcaatcggccactgcatgcctgatgcatgcatcgtgcaggtcagccactggccgccgcaccagtcgaccacgtgccgcagagccgaccacactgagcaggtgtgcgcttgaccagccacgccacccaacggtcgtacccagcaggatgccatgctagagcaggcccaacgaccacgcctactcgacagccgcgcgccctcgacggtgcatcgttgtgtgcaaaccctaactgcgcgttgattgtgccatggccgccttacggtgtaagtggctaccacttattttgacatgtaagtggattcgtgggttaaccacttatatccttagagtcgcccatgtcacgatcaagcagcgccgccgtgctacagagtacagagtgatggaccatgccagcatgtcgggtcaccgaactgccttatagataagtggtcgcatcgccatgtactggccatgccgttgtgagcgtcggccatggaacgaggaaagaaggaaaggaagaagaaagatacaaaagtaatgaaaatggaaaaagggaaaggaatcatgtgatttttgcataatgggcctgagctttctggaacatatgagcacagctccctgtattgagatttttggtgcgcacgtaaaaccttaaatttaggataacaccatttctaaccctctaccgcatagaatcttctaaagtggcccttgtatttttcaaaattcattgcaaatttgtattttagcgtcaaaattaatgattatgtattttgaatttgaatttcgttttgcaattgaggtattttactactgttatttaagattttgaacttctcttatgcccataatatgataaacataagattgtaaactccaaaattttgccaaaaacttaaaatctaatatttcacaaattttgtccaaattttggaagtttttgtcccaggtattttggtcatttggataaattgtacagtactaacggaggttaactgaacgacaatgataaatcgtagaacttgagcaaaagtcgatggcatattgtaaaacgtgataaattcagtggtaaatagggtttacgattccgagatagccttccgtttcgggctctgatggaatgacggttttcgcgaaatccggtggaaagccgatagattccgaacaaatttcataaaccaaaatttgaatgcaaattctctgaatttgccgataaactcgcaaaaaccggtcggctttggcaaaatttcgagcgaaatcatcgaaatttcaatcggtagctagaaaaagaagtaaattgaaagtgttttcctttttttattcgttattttattatttcctactgtatatttcagtaaatacacggaatacatcaattttttcgtaaatttatatcccaataggttctataaatatcatactatttataagattttacttgattttttttccttttttttcaattcaaatttgaatttgaatgaaactcactaaaatctcagacggcttctactttcgagcctcgtcgaaaatcgaccgattttcatcgaaattgtgaaccttggtggtaaatcgtagacccatggtaaacttattggtatataatggattcccgcacaagtcaatgacgatgtgtgtgtcagcaagtctggtactgtacactagctctagttggtggtgctcgcggctcaggaagcggccacgaacaacgtccatccaccgtccaaccatgcacgcacgctactcatggacgttgccaggttcagtagcgctttcatatcagactagatttactatttttgatttgactccaaattattctatcaagctagcaactgcttttgactagcccgcaagaaattacacgggaaaattccctagctaggtactgtttagattccaactttttctttaaacttttaacttttccgtcacattaaacttttctacacacaaactttcaacttttccgtcgcatcgtttcaatttcttcaaactttcaatcttagcgtggaactaaacatagcccaggaaatcgtctccattttctgtcggaattaattcacgcccaggaaacgcattcaagtggatgctttcacctgccattgctttgcttattcacttccctccagcttaattacgagtagcttacagtacagtcatcgctgttactctgaattataaaatatgtaaaactcataatggtcaagcatttgctacaatagtttcgatgacccggtaaaaatggataatttatgaccatatatatataaggttccttcaataacatcacgggtttttccatggtgtgacacttggggaaaaacatcattccaagccatttataggttcattgaaggatgatgtcaccttgaaggatcttaaactctgagggcaatcccattagaacaagctgattcatagatcaccataattcattacaagtgtgcagaagttttagatcatggattttcacccggattctgttgtctcccattctcatccatagaccagcggtttaatctctgtcgagcaatctctacctagaaaaaggaacatgaaacacatcattaaatgagaaaaaaaaatctagagagacccacatgctatgtgggttaagagatttaataaaaaaagataagtaaaattgtgagcaattaacatacctgtttttcccaatcagttctaagagtgataaatagaagcacaatagtctggactagtgtaccaagaagcataccaatccaaatgccctatagaaacaacaaatggaattgagaaacaaaatttaagtcccaaattgactaatgaaattttatcaatcggttcctcacctttacttgaaatcctagcacatagcctagtattacaccaatagggataccgaacaagtaatatgatgtaacattaacataggcaactacactttgccaacccgatccaacagcgacacctatagatgattataaaatattataattccaatgtgcaatttcaaattatattgatatatttgctattcttttaaatggaataccatacctgagagcactggttgaatactattcaacaaattggagaaggctagcaagggagaaagctctgcaactgcatctgctactaccgtactttcagtaaatatgtatacaagccttccacgaaagataaggaagagcacaaacaacataaatcctatcgagaaagaagtggtgaccacattgaaaatggcaaacttagcccttcttgcacttccagctccaagttcatttgccacccgcactctaaaaatgtacatgtataggtatgtcaaatgaaatttatgtgacatgaatgattgatcaaatgaaccacttagcatgtaacaagtaagatcactaagttacccttttgcagacaaaaaccctatagaaatcatcatctcccaaccattgatattaaggctacacatggaaaaacaataacgctaaataagcaagtttttcaactgctaaaggaacaacaaagaacaatacagcaatgtacccacaaacatgatcccataaaaggggcaattgcaaatttaccactactttgaatcgttattgcaaaactgccactagaaaattgcaaaaatgccattagaactgtcattcgagtggcatccttgcaatattgaaaaaaccggtggcaaatttgcaaatgccccatcttttattgtctaaaccattatgcaacaattgaaagtggaatatattaccatattgaaagagcatcaagagcaatctctgcattcttcatataaccagtgaggagaaccaaaattgtgttgtaccacaattccacactgaaaggcaaatgagaaagaaaaaagaataaaccacatgagcaattaattagctctaaacaatatgttggtcaacatttagcatctaacatattgcatatctgaaatttcatatgtatgcataaacacaattgttacttaccaaagcatcactccagaagacagtgaaagcttgacaatagcaccgagttcagtaaaagcagcaaatgagaatcctgtccatgttagagggcaaccaccaaagaagacaaaagcaagctgaccaaatactagaatctagtaggcaatgaccatggagcccatgaccccagcaaggccaaggtagaactggaccgttaaaagccatgatagaaaaaggtgaagcccaagattgagcatggcaagataagtgacaatcatgttcttgctctgtgcttgtaggtacatttggagcgtgaagttcccaacattggatatcataacagggatgtaccacaatgaaatagtgccagccatagcagcgatcttaggatcctggccaagaaaaattaggagtggagtggtgaagaggtatatcgggaggaggaggactgcacaacacaagagaactatccatgaacgttgtagatagatgcccaacatgtggtattgcttggcgccatatgattgcccacacaatgtttccaatgcacttgccatgcctagctgcagtttacaacaatgtgcatttaaggtgagcaatttataatgtgtttttatgcatatatagaagataagattacatctagaaattaattgttagtaaaagtctaaaatataaagaggtcgtcattacttgtagtaaggtatcttttgataccaaagtatgtgattgagagcattgatagggagagaaagcactgcttatggagatagtcagatatgatcaactccaaaaacaattcctggctgcttggcataaggtgcagactaagttaaaggagaagaggaggccattaacttgacaatccaaaattaggcaccactcatgaaacacttgaacaaattttataacaataaggacttgccttaggtaaaactgatttagaacaagtattatgtctacctagtgcctaatttaactatcccaaaagagtcctggtggaaggatgtttgtaaaacaagcatccactttagaggaattcctagatgtatcttacatatgggaattcctgctccttctaggaagatatgtggtctcactagccacctccatgcaatgtatatctaaggctatattcctttgcttctaataaggaggcctctgtcaaagtgtttgtatctactgatatggatgataattttaatctgccatcatctcggaaaacatatgatgagctttctcgatagtcaaacaaactcctaaacttggaattggatcacactgctgataagtggaagtatatatggggaaacatgaactatgcctctcagaaattctactctctgatctttaattacatccgtgtagcctccacattttatttggttatggaagagtaagtgcacttcaaaagttaaagtttttggattgctacttcttatgaatagattgaacacacgatatatgcgagatcataaaaaattgctccaccaaagtatgacctagtatgtgtgttatgcaatcaaggggtcattgaaacaatgcaacatttgtttcacacgtccattttcatcttcatgttgagcttcaattggatttagttggaataccgtgatgggaacttaaattatgatggttaaggctaaaaaccaatatgtgggttacagcttcatcgataaattcttaacttctgtctagtgtatttggaagataagaaataacttcatcttgagcagaaacctcccaccttttcttccgggagacatctgtttaagactgagctcctccttttaatatttggactaaatgaggagataaagatcaataaaaatatattactgtagggcctccctccctgctgtgcttccttaaaaaatatctagatatataaaaacttggcagtctgctattgttccagagctagctaacacagatatcttacgagcttatttgtacttgaagtcatgaagagcacacaagtatataattaatgcataaagacaatgccctgattaagaggggggtggctgaactaagaaagtgatgctttgaattagtcggatggcccctttctaaacaaaaaatacacaggtctcacataatttagtttttacagtacgaattgtgtcttttttaaaaaagaaaatttttttatgtgcctctgaatattttggatcccttccgtgaccttaaatgttgcctcatctctctgacatgtctgatatttttttccccattaatacactttccattactttgaccgttagatttttttttctaacatgactatatgtccacactatccatttctcatagactcgcacttatgtacactttaaaatataaatctcaacgtgaaaaaaaatgcagtaaaaatcaaattgggcagagtttgagagttatttgatggaaaatttggaaaacaaagtttagattagtttaaacacaaaatgtaattaaatagtattaagtgtagtgggtagagaggatagttacaaggatgccgccgctgaagcgcatgaggacggtggagacgagagcgtatccggcgagctcggtggcgccgacgtggccgatgaaggcttggctgatgacggtgacgccgaaggtggagaagcgcgcgcagatggaaggacccgccaccacccacagcttcttgctctccaccaacacccgccgccccaacgacccaacctcctcttcatcttcttcttgcttgttgttgctgccttcgccatgagcatgcttaggctccagcagaggaaccgtcctgcagtcatcatgttcatcacccggcctctccatttctcctagcagcttctgctaactttaattgtgcagcaatggagcgaattaatgggaataattgtacttgagtggcagaggagctatcagaattgatgaagggaagcaggttaggaaggctctcagctaccgttttaaaggagatcgatcaagtagctgagcttgatggctggaacagagagttgagtgaggagttgggtgggtaggtagtgagggcagggtgggaaagtagtagtaacagtgactcgttaatcatcgattcaggaatcagcattccagacaaaaggaaagaagaatatatacgcgagtgtgaaatggaatctggggctgtgtgtgtagtgtaaatggctcaatgcgtgtggcaaggagggaaaagcacgtctagtactgctgcagcctgcaatttgatgaaaaagatcagtagcatatatacacgtacagaacagagataggattgtgctacgtacgtcagggcggggcttgcatgcggcataggcagcggcagcggctacacatatacacatcatgtcaccggccggtctgttcacggcagctatagttgccggacgtacgtgtggctgaccggcatccccgcttggcgctcctcaactcgtcgtggtcaccaaaaccaaaagtagacttcctcgtaagtccaacgatccagggccggtcctaacatttgaaaagtcataggcgaacttaacattatgggcgccctaaggagttaagatttttttttacttctaatatatatactctataaagcacatatatcagcacaaatatcatagagtaacacaaataaatatttttaacatggtaaataataaatcaagcagtttgcaagttgtaatagagcaatttattctcaataaataatattgatagtataatttacaactaaaagaaacaccgtacaaacaaattagtatgaatttcttaacacccgaaatagtgaaattgcaaagtaaattgatagaggcatagcagaatagagcgagtcgttgattgacttataggtttgtgatcatgatataccttcagcatgaagaaaagaggagcgaatgggcgatggccgatgacgatcacagcctcacaggatgagacggccgggcagggcagggagcagccaccaggcagcgtcgcaacgatgccgccttggtggcttggctgatgggcgacgggccgacgtacggtgagtcggcgcctagaggcactcgcagcggcgtctcgcggactagggcatgggcaagacggcgacgaagcgaagcgacccggtcacgtggctcggcctaggcgtctggcctgcggctgggcctgttgaggggagggggggtggtaagtgatgggcccccctccggcctgggaacgatgccagccaatatgcaactgggaattcatgttgagaaaaaggagatctcgctgcaaggacggcgcggcgttccatcattacatgctatgcatggcgtcctcttgttctgatcaggatcagttaggttgttaatgccctacagttcaggtaatacccacacaagaattgggtttgaaagtaacactagaaaagaaaagaaaagaaaagaacaaaataaggggaaggccggccgggggattaaataagaattgattttttttctttttcccttttacatgcgcaatgctgcgtgcgtgtcacaccgccctttgtacgtattttggttatcaaatctgcattctttttgttgtaggacttggtgatttaattaaattttgaatatgcatgcatggagctctaatgtataggtctcacaataatctctatagaaaatcccttgtatacccctgcaattttagctaatcctttttatgcctctgaatttttgcttactttcttgtatgcacccaaaatttgatttcgatccttgaccgtataatttctataaaatgacaattttgcccttttgatgaacatagaaatttatgaattacattattgaaaatgtaaaagtttgtcatatgagactattatagttatgagtttgttgtgcgatacattatttatgacaaaaattatttttagataatgaaacaaaaaatatgtatttattttattttttaaaaagtcataaaaaaataggagcatccatataaagataggactacaaattctcacgatagatttttatgaatgctcccgatgaaaaaaaatccattgtcctattgaaatttcaaataaaaaatttaatttattaaatttgttttattttcaaattttatgtcaaaatttcttgcactaattatttttgtttcattagtttcataaaatgcacatattgtgcactcgaacaaagcttatattcaaacctaaatcttcaagggcataaaagacatttgcaatcaaacttaatagtgaaatgaaggaaaatataatgggaagggcatggaagaaatcaaattaaaatttcaggggtatagaagggatcagataaatttcaaggatgtgaaagggattgagtgagtttttaagggtatacagggaatttactctaatctctatggagtgtcacatgccatcttctttcgtcaaccaaccaatcgtcctaccgaattggctcatcatgtgtcacccctcccgttccttgtcaaatt

SEQ ID NO: 4958 - DNA, 3853 bp, Oryza sativa
ctctgaacaaaatggaaacagcaagttggtagcactggcaccacaatacagtaactgatattggaagcagatttcatcaagaaagagagaagcttaaaacttttgcagttctgacttttcctagatgcatgcatgacattgcacgaaactgacacaagaaagaagaggccatggaccatggagcatgcatgcagagcatacacggctggcaaatgacgttgccagctgatgaatgccaccctagctagcaatgctatgctgactcatcattcaggtcaagagagagagagagagagattaattagagttaattaatcagtagtcctacctggcaacgcctctgtacttggagacacccctggagaaaccgctgctccggcggcggagggaggccaggtactcctccctcgacacaccctccatctccgacctctccttctcatattcctccagctgcaataattcgcattatcttcagtaataattcagattacacaagtcgcaattgtctagtggtaagttggcaaacttactgggaaattgagcactgtctcaggaccccagtacttaagagctgcaaggtcatatgcacgagcagctgcctcttcactatcataagcccctaaacatcattaaacattgcactaatgttcagaaacagaccaaacaccaaaacattaagtagttatgtaacaactagttgctatatgcctatattcttagggataaactgttttcatattgagacaaaccaaggatgtgacagatcaaacaaaggaaatctaagattatacaagaacaggaagcaacatgcagcatgaatctgacaaaacaggtgtgtatagacaactagcttgtgggacttacccaaatagactaatgagaggagcatcaagcagcagcagatcaaggtcacatgcgcatcacaagggcaaggtcccccaaagataacagcaaaaaagaaaggagataaaaaaagcttaatcagaatgtcagccttaaaaaattcgctccactttatagtaataagctttgtactaatggccgatgtatcaagatccttggcagtatacagaagtacaccaaggaccttgtatgtttccctttttctttcattatagtacattatactgtaaaaatactcgtatttaactttctttagtattttcagagaaaattcaggttaaaaatccttaaaaaaaatcaggcaactaatgcatgttgcgatcaatgtaccttgcctccctttcttcttgttctgaagtgaagtggagcaattcttgtcccacagatgggcctcaaatctgccagtccaccgatgcctgtttatacatacagatacatgcatgcaacaaatgattccaccgtatattgaatttattgatgattgataaataagcagcattaagcattagtgtttgctttacaggaggaagaaaaactgaaggagttgaccaccccagcagtaaatgtagaccaaccaactccctacttcccagctaataataattgactcactccaaggggaggagcagcaagaaaaaaagattaaaaatgggaattatgagatcaagaaatggatccgatcgatcatgctcgccaacctccaaaagatgaggcatgaaaaggggagcagactcaccacccagaaaacgataaaaataattcatgatctctgacatgcaagtgaaatgttcagaaacagattggaaagaagcggctgataatttcgggagcctgaaatgatggaaacgatgcggaattttgggctgaaaatcagccattgattagctagcggcaatgcaggatgaattcgcgactgaaatcaagaggggatcagaaagaacagcagaactgggatcagagggatggaagcaactgaccatgcagagacgcatacctggtgactcccctgtagatagaactcctcttgccgccgccgccgccgccaccgccattggaagaaggatcaaccacctccttgctctccttcttgggcctcttggccttgccggtgctcttgtccgtcctcggcctcgccctcctcttgcagggcatcgacatgggcgaagaggaatcctcggaggaagaggaggaaggagacgacggcgaggatgatgcagatggagaagatgatgcgggatcaggagacgatctcttcgccatgatctctcgcgttggtgcaggtgcaggtgaggtgacgaggaggaggagaggcaacgaagtggagccccggaggttttgtaatttatagcggaggggggaacgaaagtaagtgcagtgcagagatgggttttttgggttgctaatcaccatcatcagcattaactgaagatgacacctctgttttttttgtatttttgtgcgtcagggcctcaagctggccaccatacgactctacgagaataggagtcaattttgatacacttattcattattcttttattttatttcagagatttcctctgtttttaatatattattattattgatataagtgtgcattgcattgtgcacaagtagtggtcgtattcagatttctttttctttctttatttttgcagatttcggtacacgtgcagacgctcatatacacacgtgtatactcaccttctataaatacatacgctatctctatgaacacctttaaagattaggcaaggagattgtcgtttctgaattgacataatttacatgggaagtacaccgataataatatcttgagatttgcgaagatacagaccaaatttacatagcatggcagatgacgcactggcaaattaactcaagatgacaccttgttttttgtatttttgcgcgtcagggctctgctggacaccgaagattagcaatcaattttgctgcacttattttaatttgtttctttttgagagatttcctctgttttaattatattattaatgagtatgaaaggtacaaacctgagatagtttctggaaggacacaatttccacggagactacaccgagtcactggcaatatttgcgatgttgaactgccatttgcccaagctacacttcatttttacatagcagggtacactaggaagtaaacaagctcataaatgactgcaaattaaacgttactggagatgatttttttttgtctatattgaaccgtaagtcttactgcaagagctttcacctctgattcagatcagtgacagacttgcagtgagttaattctacagaaagaggacaaagcaacttaaactaaaaatggacggacggacggacgccgctgggtcagggtccttagactgaagaaacaaacgaaggtgcatagcatagcagctacacaaggagacgaatagcatcgggacgtgaaaaagaaacaacacatgtaacatgtaacactgaaaaatcaaagacattagtgccatgtgtccaaatggcagagctctgcagccatgcaaaatatgcaattcctcattcagaggaaagcatcctactagccatgcaaccacaacacctgtccccaacattcagagcaacctactgtgtctgtgtgcagtcagtcaattactgtacacaacaagcatctactgtagctccgatgcaacgaccccctttcgatgaagaatcatcaaacaaacagtgcatccttcaattagaaaattcagcaattactcatgctgtattactggagtactacagatcatgtgaaacatgtgtgttgtgttgtaccgtggatgacggtttgatggctgaccgtgatgacctcaatatttgagtaaattagtcatcccaattaagctcccatgcctgactgccaaattatttgttttgtagtagatcatactcaccaaaatggtttatcacgagtctgtttt

SEQ ID NO: 4959 - DNA, 2538 bp, Oryza sativa
ttcatatactaacattcatgatagtaaaatatttcattttttttatgacaggatgctctgaaagaactttggagattagcttatcccagccgacaacttcctcctctgaaatcagatctatggaaggagatgggctggcagaattctgatccagcaactgattttaggttcgtttcgctaatccctagtaatgattttaggatatatatataagctgtcatgcatttatcaacaccgcttgaacctcgacaactaatcttttgaagtatctaatgcttgcagagcaggggggttcatgtccttggaaaatttaatatattttgctagaaattacccagtatgtttctattaatcatgaacatttactccgcattagtctgctgttattgggtgatttgattaggtacaatgctcaatgtctgctttaacatgcaggattcctttcacagtttattacacaaggcggatggtaagagatctgaatgggaatatccctttgcagtagctggcgtgaacatatcttatatgttagtgcaaatgttggacctgcaatcaggtgaaatttgcagtaacaccttatctttgggccaatttacctcctttgctcttgacttcgaactctctttttttttcagctctatgcagagctacagcttatctctttcacttcttttgtaggaaaaatgggcacaaaagtcagttctcaatttgttcaactacttagagaagacgagatggcttttgataaccttttctgtatggcctttcagatgcttgacgctcagtggctcacaagacaagctagttatatggaattcaatgtgtgttctctgtagaacatctggtctcttctattggcttctcattctaccaccttattcagttgtcttcatttccatttttcaggaggttctaaagtccatgcgtattcagttagaacaagaacttactatcggaagcatttcttgtgttcaggagatgccatcatttaggttgctaaaaaggtagccatgtttgttgtttacagaaaggagtgtatcttacttgtcagtaggatcttgtgcatactaccgattctttcattggttgtacaacatgacacactgtaagattatttatcatagaataataaacccagtatatatctggtactttggtaagtgttcaatgttttctggggtaacaatttaagtatttctctaatgaaaattacctgcaacaggtttgcttcttaaaacatgtgacaaatgtaagtaaagtaaatatcttttattaacattgctgatgtttggaatatcaataaaagatgcagcatttatgcattcatgcctcaaccaagatgtatagtatagtttattctgaaagttagatagatttacatattgtgatttctgtataacatatgctccattaccttataaaactgtgaactacccagagttttcttgtgggaatacctatagtactactcaagcattcaagattctgagtaatcagaattaactagctcaatctagggtaagggagaaaattgtctccctagttaatcaatcagccttgggggtattacaagaaaaggaacacagacacttgtctcatgccaagttgaatgcctttgggtttctaggagactaggaccatagggagaagcatatgaatcttccccacctgaacagaacgcctacagaagctttgcttctttgtggcagtgccattggacagagaaatataccccaagataaaaacctgaaaacttccctgtatatctcaagattttcaacacccagaaacacacacacagagagaatcagttgcacacactgatcattttttgagggcaggagatattgtttgcttgaggagatattcgctccctatctgaaattgaaatgtccttatctaaaaaatctgaaatgtccttgtctaaaaaatctgaaatgtccttctccaacatattgcattcctcaaacaaattgtattctgtcacacctgagttatccatgctgttgccgccttcagttatactggagcacccttcaaataggtactccatgccgccttcgaaagcctcatcattgaaccattcactgaaattcatcgagttgctgaagtaagccccaggcattgtatccaattcataatccaagcaagggctccagaggctttcttcaatgccatcaacaattggaaggggttcattcatgcattcagcgctgtcatcggctgcaagtggctcattgttgtcacttgatgtatttgcttcactggaactgagctcttggactgcattctcacttcggtcatcatcttgaggctcttcatgtaatgctggcaccacctgtagctcttgttgcagttgtgccagtaactgtggttcctgttgcagctgtgccagtaactgtggctggtccaggtagcagctgatgtcgaagttggttaccgcattggcacctcggtattcaattgcagcaagatcataggccttggctgcctcctcttgagtatctgtaaaaagaggtacgtttgttgaaatgagaa

SEQ ID NO: 4960 - DNA, 3531 bp, Oryza sativa
  unsure (1)..(3531): unsure at all n locations
cgcggatganattctgctcggtacccaaataaaataaaatgttaaaaataggcaagacccaaggtaagtctcctggaaaaaaatggggtcctcccctcttatctccctcctactcctctctctcactcagcgagtacagagagagattgccaccgccactccactacaagtgtactcctccgtccaaaaaaaaactaaacctagaaggggatgtgacattttctagtacaacgaatctggacaaagggctatccaaattcattatattaggagatgtcacatccttgcctagattgtgtttttttgggacagagggagtacacaagaaggggagtataggggagggcctccatggatcatctccgagtggtacatggccctccgttttatgctactgctaggagcatgcctcctagggtgtaacctccgccacttggaagccaaccccagctcgccaaccgtcaccagaggcatgccatcgaaccatgctgccagttggaatagagagggccaaggagggttggctcagtccggaggaagagtcactcaagttcgacggggtgatggcaagcgtggtgctcgagctcgagcgagatgttgccaaggacttaaaggctcggggagctgaggcaccttgtcatgatgtcgatggtgcaactcgacagaaggagtagcgcggggacagagcaactgcttggaggtggccatcaagtcaagggagtatagtatggtgtccagttcccactagcaccgttgtcaccctctcctccatcacatccaaagatgtcgttgttgtcctggttaaccaccgttcgagacttcgagctcaactaccaaaccgaacctcatcacttccctatctttgagaagatgccaccaccacacaggctgccttcacagtttggcgagggaaccgagagaaaaaagagtgggaagggaggagagatgtagtcacttacatgtggaccctatatttattttgttaatttctttgatcaacgaaaagccaccatagttgagggagtcttgcatcagctttaatagtggaagggatcgccaattttttcgggttttacggttatgtgatacaaatcaaatcagatttgcccaataattgagcgagtaaaaacgaactttttcctactttttgcatcacgcctgatgatgcgtttgtgatattgtgggcctcaaccaggtgcaagcactcccgtcctgagtccatcgacgcatataattttggcccggaactccaattccatcacatacaatatcggcccagtatgtttgtgggcttccggcccaaatcgccttgggctgtagcctgcgggtactcaggtctctgggggagtcaagggtttaacccgtcctgcgacgcggagcaccggccgccgctcgccgacgcaagacaacgacgatgccgagcttccctccgcccggcgccgtcaccatctgcgagatcaaccgcgacctaggtgtgctatctccactccctgctccccctctctctgctgtctccaagctcattccaagtctgtgcgttgcagttgcggcggatgcggtgtccgacgatcgagccaaggatgcctacggggatgtcctcgtcagtacactcccatcttccccattcttcctccgcctcgcataatttcgtctttcttttttcattcacaacactaattttattaggcctctaattgaaacttcaatttggggtttccagggaatggtcttcagcccgattcctttccagccggatgcgattgttgcccacccacgagcctcctgctgccactgaagctgctgagcctgctgagattgtccccagaacaagtttagcttccaccatagctgagtccttcaaacaaatgatcttcccttcatgcgatgtgagttgggtcttcatcatatcttactggctccatgtctccattgcttgtgttcatggttatattgcttttctgtcatacattgacccattctttttgttcacccaaaatctacccacaagcatatttttgtgtggaaagtgctcaggatagattttgtaaaaactgtacttacgacaaaccttttgtttttgcagccaaatctgctacaagaaattgatacccagaaagtaagttggaatccgcacaagcattgcttggcatttgtatctgggaagaaccaagttacagttcatgactttgaggagccaggtgagatctgctgaactttcttatgttgtattaataagatagatatgatgaactgaagcatgatggctatatgaacatttatccttgtatttaatgaactgaagtatgtttctcaactcagctaaagccaacaactaatcatttgtattctctgaacagataataaagaatcctacattctaacaagtgaccatcaaaaggatgttaaagctgttgaatggaggccaaatagtggaaagatgattgcagttgggtgcaagtatgtcctactgccaccatatactagagcactattaaagatttgttttgatattcttttcatgtcataatacctggtggcacaatctactattaggttaacttattattattattattattattattattattattattattattattattattattttcaggggagggatatgcctctggtcagcatcatatcctcgcaacgttgcatctgtgaaatctggtgtcacctcttcttcctttggtgcctttcctaaaggttctggtggtcaatggatactcgtggacattctccgtggttcttctgctgagctagttagcgcactttgttggaaacctgatggaagatatcctttataagttttcagtgtagcatttaatcattggtatcattgatttccatctctgttatttgaaaaataaagaaatgtaacctaaaccaaataatatgtcttcatttgcaaacacaaaaattaccagtgactctagacaattttccttgacacatatctccacatacttggtgtccgcctcttgtaatagcccatcattcacaatttgggacgtttctcaaggtatataaatgtcatcagaatgcagatacctagttccatcttacacagaactgcatactaatatctgtggattttcttccatttcagggttgggaatgcctataagacgtggattaagtagtatatcattagtgcagtggtcacctagtggagattaccttttaactgctaagctgtatgaacttcaactttagttattttcattactcatagcatttgaggatttatatagtttactttttttaattagtgatggaacttttcacttatgggaaacaaatacatggacgtcagaaccatggtcttcatctaatggatatgtatctgtaagtagtattcattcttaaataagtactgttcaacatttaacattgttatttaccatgtcacaaggaatggattcttaataagtcatgaaatgaaagggcaaatgctttgcatgttatgggcgattgggttgtgttttancgggacgaagcgcanatgcattcaaagccgcg

SEQ ID NO: 4961 - DNA, 2416 bp, Oryza sativa
ataaaggtaacactggtcacataagaaaatattgatttgcatagcctgatacatgtctttttttccacttacaagtaccttcaacttcgttctttgatgtagcaatggactgaaccttgttaggcattcgttcctgctgcactctagatttcctcctcttgtatagtttcatgcgccgaataaattgttcatgtgctttctgcagctccccaacaggctctgcaaggctattgaatacattgataaatggtaagtggtacctttaatttgcaaggtacttcgtattgatattaattttattgtgaggtttcacttgcaaactgcaatccaaggatttgttactccattggtttgcagtaggcggatctaagatacgtccattgacaattgaattgagtacatgaacttttttttatgtgtcattacatatcagatgtttcctttaggacatattagatgtagctgttgaactaaattttaagcaatgataaccgcaaaaatatggtaccagcaacaacaatggtggtaaaaatcttacttctgggttcccaagcggtacatgttctcagcatcctcaaacctcttgtgcttctcataatacagtgcataagccatataaaatgcggatctcttaaggcctattctgttcttttccatcttctttagcaatggctttgcatccttcacatagtccatctacaccattgaaaaaaaaaatggaaatatcacaataggacctttcagtccaagaaaatattcatatcaaaagatctctgttgtgcgtaacaaagcctagataataagctaagaaaatattcttatcaaaagatttatgttgtgagtaacatacaagttatagtatgagcaagcaaacaatagtacgaaatgaagacatcagattgaaatcgctatcgaactattgcagattcaattagcacagggcaaagctcgagccccaaacaaatcgattttggtgtggaactgcaaccaaatgaacctcaggctatctcaacagatccccaatgaaatgaaatccactatatatgacaacatcagtaaaaaggaaaggaagcatatggcggataggtggatgtagaagaaggtggctgaccagctggatccagacgcggaggtagcggggatcgtcgcggtagcgggcgtcgtcctggaactcctgggcgcacttctgcaggaacctgggcagcttcgcccgcagcgtcgccggcggcagcgccgcctccatcttcctcatgcccctagcaaacaacgaatcgatccatcaagcaacttgcatcgagaaggggaagcgatcgattgggagtggtagagagagagagagtaccggagccatgggcggagggggtcggagccggagtaggagcggatgtcgcccaccaccgccgacaggaggtctttctccttgtcgccgccgccgccgccgcagtgctgctcggtggccgccgccatgggaggggtggtggattggagcggcggcccgccggccggggtgagccaacacgagacgagagggggggtttttccgggtttgaaatgaaagggtggctagtttcgaatctccttcactcgtgcggatgacaggtgggcccactaccatccttgacatatgccccacctgtcagccagacaactcttgtcgccgcatctttgccaaaatccagtaatgataaattttaaaaggcagttcaagcatgggcattgcagatcacaaatttacaatcaaggtaagataaatgagcagccccatcgtttcgcttatgttaatacttataagtcaaaatttaaaatttaaaattaattttaaaattgattttgtgatttttttattatagtttattttatagcatttgcttttgaatcgctaagaatatgtgtataaaagttttacttataaattaaattttagttgctaataagccatacagataagcataaccataagcaaaaggatgacactgctcattggttccaacttccaaatttgttcaaaaaccttctgcgtacagtacaaaaatggatatgtctgctcaagatttatttaggtaatactgtgaccaaaagaaccccacaagtcacgactcacaatcaactctgcggttcgacctacaagacatagatttcaagccgttttgtggaagagatcctggagatcaagtatgtcagcaagaactccagctgcagtggtatcattgccagctccagcgccctgaatcaccagaggggcgctctcgtagcatctgctgtatatctccacctgcccaagaacaaagcagcgtcacttttacgtttcacatcactctctaccaacagtaaaaaatcacatatcaaacattctttaatcctctcaaaacagaaaaatggatttcatcagggtaccgagctcgaattcgccctatag

SEQ ID NO: 4962 - DNA, 1822 bp, Oryza sativa
agaaacatactgggtaatttctagcaaaatatattaaattttccaaggacatgaacccccctgctctgcaagcattagatacttcaaaagattagttgtcgaggttcaagcggtgttgataaatgcatgacagcttatatatatatcctaaaatcattactagggattagcgaaacgaacctaaaatcagttgctggatcagaattctgccagcccatctccttccatagatctgatttcagaggaggaagttgtcggctgggataagctaatctccaaagttctttcagagcatcctgtcatagaaaaaatgaaatattttactatcatgaatgttagtatatgaattgttcagtttatcatttcttctgagcaagaaaattggtgtcccattggtgagaacaatagaacaagaataccaaaggcctataggtagttaggtacagaagcggaacctgatgcttgacagaggaactgtcaaatggcacatttaatctctgtctcaagaacctcagtctctcttcctataaagtaaacatggaactgtcaaaaccatagtatcatgtaaaaaagttcctaaatgtaaaaacttgaaacagtcaagaataacataaagatgccatcgatgctcctgtagaacagaagggttggaattaataaaccaagtcaagaattcatttgaatttttaaagcatgcaattcaactactaaatgagtgttgtggaagaaataacaagtttcatggatgttaccatgatattgttcatggatataccaacatttttgtccatgaataatcacaaaagcaaacaagaacttttattattgtaaaaaacgataaaaaataaatgaaagatgaattgagcatcaaagatgtcgagagtatgctcgaaacaactcattcaaatgcttaaactactgaggaagaaaatatattttccttcatacttcagtaaaaggtttgaaatatctcaaaatatttacatgaaattaacatgtcacatctgatactcataagaattcatgcttttgatgggaaacttaacccatcaatcatatggtattttaaatggaaataggagatctgcatgtgccagcactgattatacctgtagtggactgagatcaagtagaactgcctgttcatcatgtgaaccatgggaagcacaagacctactaaagaactttgctagcaatggtccaaactgagagagcgcatttcctggaaaaaaaagaagatttttcagatagtaaatgttctaaaaggtcaagtttaagcattctgctgtgtacattcaagagggcagtaagacactaaaaaatccacttctctggaatcatattcatgatagttacctatctttcttacagattgagcaataaaagtcgatataacatgcatccaaccaaggcgctcttgtccttttccatcccataaatttggctgcatattaggctcatgtctctataaaaaaaaagtacgagaaaaggggtaaggcgcatgaagaactaaaatgcggttaataacctggattcatatgatttggagaaatttcactaacctcggatttgctttcatgagttctgtttcctagaagaggttctcttacagaatctggtatgatcgtctccatctgtttttcgcttctatcaatatcagcagtgtaaggcttccttttaatggcttttgaagccatactattttttcagtcagtgtattgcatgaatcatgcctgttatgtaggaaaaattggaacgccaaagagattattgaaaaatttatattgaaaccaaccaacccatagatagtggcaccaacaaa

SEQ ID NO: 4963 - DNA, 1664 bp, Oryza sativa
taatacttataagtcagaatttaaaatttaaaattaattttaaaattgattttgtgatttttttattatagtttattttatagcatttgcttttgaatcgctaagaatatgtgtataaaagttttacttataaattaaattttagttgctaataagccatacagataagcataaccataagcaaaaggatgacactgctcattggttccaacttccaaatttgttcaaaaaccttctgcgtacagtacaaaaatggatatgtctgctcaagatttatttaggtaatactgtgaccaaaagaaccccacaagtcacgactcacaatcaactctgcggttcgacctacaagacatagatttcaagccgttttgtggaagagatcctggagatcaagtatgtcagcaagaactccagctgcagtggtatcattgccagctccagcgccctgaatcaccagaggggcgctctcgtagcatctgctgtatatctccacctgcccaagaacaaagcagcgtcacttttacgtttcacatcactctctaccaacagtaaaaaatcacatatcaaacattctttaatcctctcaaaacagaaaaatggatttcatcaatctacttctaacgtgttagaggccaatacaaacaatgtttttggtagttttagtgttccaacttccaagctcgtgtgaacaacgcaaagaagaaatggggaatggtgccaatacagaccctgctcacactcgtaggctcttttgttttcacctgaaaataaccagcccttgaggctaccaactgcacagtgccgcttgatgttgaataaaagagaaaaagagagaggaaaataaaaaggattagcataccacattgtcacttcctctcaaccttcccagtgcagagtttttcgggagttcttcaaggcccacttggcacctacaaaatggggatgttactctacactaccattgaaagaacctttacaaaatgcacagaaatgggcctacgtgtctctgacaatagtatgctagtattgaaacactaattagtgattcagagggcatagcacaataaaaggatacataccctgtgctttcaatcttacagacatagcgaagaacatttcctttcaaagatgctgcctttactctttcttcaatgcttttatcaagctgtactaaaccactttcaaggaagtcctttgtggacattgcatcaggtcctaattcactggggtataaactctcaacctgaagataattgcaaaaaattagcacacctgatcttttttctacgaacagggtgcctgctcaattacaagcggtcttctaactggaatgtacgacataacacatgcataaatatagtgtctatgcataattagaaaatttcggaataagtgatttaggggttaaaatctttcaaaatcaaagttctggtatcatagaaaacaactgaactagcagccactcaacaaagctaatggctacataaactaaataacaacttccaagatttggagggtattcatttcattttcagactataagatacataaggtgtataattcatcggaatccccaataatcctgaacacaagtctatggtgatatccagtgacctatattgtagaagagtgtcggtccttatccatagaatccatgtagccaa

SEQ ID NO: 4964 - DNA, 2498 bp, Oryza sativa
gtgtaatctgaattattactgaagataatgcgaattattgcagctggaggaatatgagaaggagaggtcggagatggagggtgtgtcgagggaggagtacctggcctccctccgccgccggagcagcggtttctccaggggtgtctccaagtacagaggcgttgccaggtaggactactgattaattaactctaattaatctctctctctctctctcttgacctgaatgatgagtcagcatagcattgctagctagggtggcattcatcagctggcaacgtcatttgccagccgtgtatgctctgcatgcatgctccatggtccatggcctcttctttcttgtgtcagtttcgtgcaatgtcatgcatgcatctaggaaaagtcagaactgcaaaagttttaagcttctctctttcttgatgaaatctgcttccaatatcagttactgtattgtggtgccagtgctaccaacttgctgtttccattttgttcagagctagcagctgtctgttagtaattcatttctgaactttttttttgtctggttttgttcaggcatcaccacaatgggcggtgggaggcacggatagggcgggtcctggggaacaagtacctctacctgggtactttcggtacgtattctttcatccaatctttcatgctctttgctcttctttcttggagcccacttaccttaatcaaatgttgattactagcattgacaagccgctcttgtttgttggagaatttgcctgctgtaagccggccacctaacttttaccaaaatttatgatggttgatcaacccatctgcgaaattaaatggcgtgtttttcttgtttcccttcgatgtagatttgaccccttgcttttcttgaggattgcttactaggtagtacttcctctgtctcaaaattgagacagttttagatttcaatataattttcgggatgctactttgaacaataatatttataaaaacaagttatcttaaatgaaagagttgcatattatgatactagtttgagtaaatttcataaaactgcagatattttgtacaatctatcacaaaactacagatttaagaacttgttttacaaaaatacagattcagtggcttcgtttatcacaaaactacaggtactttgggcaatatatcacaaaactaaagatttaagtacttgtttcacaaaactacagatttaatatcttcatttatcacaaaactacaagtttaatggcttcatcatcacaaaactacaagttttagcattgttaaaacttgtagttttgtgataatggagacactaaatctgtagttttgtgataaatgaagacactaaatgtatagttttgtgataaacgaatacactaaatctatagttttgtgaaacaagttcttaaatctgtagttttgtgatagattgtacaaactacctgtagttttgtgataaacggagacactaaatctgtagttttgtgagacaagcttttaaatatgtagttttgtaataaattgtgcaaaatacctgtagttttatgaaatttactctataatctggtaacattattcttacgtgattgctctttttaatttttcattattaatagttaaagttaaaaatgttgatttaggactattctaaaaatgcttatattttagaacagagatagtagtatatattattctccttgtatgtttttgaaccacaaactctccattttactataaattaagtgagctggtgatatcactgatatggaagcatagtgttgaaacttccttttcttttacttaaaaaaatcagaaaatattttcctgctgtcaagatcaaagaccatgagaccaagataccatcctgtatgcaatccccagaagactgcccaatttgccctagaaatagcataaaaacaagccccatgtcttgatcaccaccatgtcctaattactagacaaaatcctagtatagatacattatatggtacatgacttggaaatgcatgtgacaagcacgtgagtggtgctgcaatgccagtagtaaaaaccagatggtgcatagggatcttcaattgttcatcactgccggctctttccactagagctagctgagtgagtcagcagccagttgcaagtgctcacttcacgtgcatggagaatgccctactaggctattaccccccctgtgccaaactagatcaagattcaagatccagaaccacacagatggattcatcactactttcatcacaactaaagaaagaaaaaaagggaaagtgaacagtgttcaccgattactagtaaacagaaggttgccagcacagttctagttaccaacaatgtgggaaaagtcatgccagatctcagatggtgtccagcacatgtcaaactagaaagtgaaaaaaaatgtgaatatgggatgcaattcagcatctctcagtattaagatccaatgcattcattttctaaagtcttaaatctatacagcatgacctgatcaa

SEQ ID NO: 4965 - DNA, 21465 bp, Oryza sativa
  unsure (1)..(21465): unsure at all n locations
cttcgggggaaaaaaacatcatccatgccttgtgattaacatttggttcattgatgatggatgatgtgatcgtgaaggatcttgaactcttacaattccattatgaatgtgcaaaagtttcatatcatggatttcctctcgaattttgtgatcttccattatcatccgtataccatctatttagtctctctcgagcaatctctacctaaaaaaccaatagagcacaccattaaaatctaaaaaagtgtgctctttcaatggcccacatgtttttctagatagacccttatattatgtgaaaaagatatttaattaaatacaagataagaaaaaatatgagcaaaaagataataaagccaacctgtttttcccaatcagtcctaagtgtgatgaataaaagcacaagagtctgcactagtgttccaacaagcatgccaatccaaatgccctatagagccaattaataaaagtgagaaacacagcttagacctaagatttcctaatgaaatttacaatggcaaccaggaccttacctttacttcaaatcctagagcatagcctagtattgccccaatagggataccgatcaagtagtacgatgcaacattaacataggcaactatagtttgccaaccagatccaatagcgacacctataaatagttagaaaacgttgtaatttcaaagtgaaagtttaaattattttgatatattcatctgtcaaataaaataacatacctgagagcacaggttgaacactatttaataaaatggagaaagctagaaggggggcaagatcagcaactgcatctactacctcttgactttcagtaaatatgtatgcaaggcttccacgaaagaaaaggaagagcacaaaaaacacaaatcctatcaagaaagaagtggtgaccacattgaaaatggcaaacatagcccttcttgcactcccagctccaagttcatttgccacccgcactctaaaaatgtatatgtattaagtataagtcaaatttataggacataatggaatagtcagatgaaccacttaatgagtaacaagtaagatcatgaagttacccagttgcagccaaaaatccaatagaaatcatcatctcccaaccattgatattaaggctacaaattttgtaagtgaaaacaatagtgctcaataagcaagttcttcaagcactaaaggatagacacaaaacaataaattgatgtacatgatacaacatgcatgctttggctattattttctaaactactatgcaacaatagtatattaacatattaccatatagaaagagcatcaagagcaacctctgcattcttcatataaccagtgaggagcaccaatatggtgttgtaccataattctacactgaaaggcaaaggaacaacaagaacaaatcaatgagctaccaaattagctataggaaagaacttggttaacactagcttgatataacatattgccttttgtttgctatcatcaaaattatccagaatttcatatgtatacataaacataacagttacttaccaaagcatcactccggatgatatcgaaagcttgataatagcaccgagatcagtaaaagcagaggacgagaaccctgtccatgtttgaggacaaccaccaaaaaagacatatgcgagctgaccaaatatagggatccaacaggcaatgaccgtggagcccatcaccccagcaaggccaaggtgaaacttgaccaccatgagccatgataggaagagatggagtccaaagttgagcaaggagaggtaggtaacgatcatgttcttgctttgtgattgtagatacatttggattgttaagccccagacgtaggagaacatgatgggaatgtaccatagtgagatggtgccagccacaacagagatatcgggatcctgaccaagcgcaattaggagcggggtggtgaagaggtagattgggagaaggattactgcacaacagaagagaactatccatgagcgttgtagatatatgcctaacatgtggtattgcttagcaccatatgattgcccacacaaagtttccaatgcgcttgccatgcctatctgcagttacaataatgtatatgtatggttaactatcaattaattgttaatagtgaattgtttatgtatgcattttgtacaagatgatttgtaacaaaaaatgattgttagtaaaagataaacatttttataacttaaagtaaggtatgtttatgttttatttgtatattttgtaccataaagagtttgttattgttgcagtgctggttgtcagaggtagcacgaagaagataggatatggaagatccaagaagaataaagaaagagcacactatatagttattgcatgaagaaaatgccatgattaaggggtggatgactagatgaagagcctgcttcaaatattaattagtgttttgaaagttgaataatttgatgatccccttctcaagaagaaaaaaaaatgtgaggaggcaagtatcccatataattttcttccttcggtacgtttcatgtctttttttttacatcgagcctaactcttatctatagtacaatggtggaaaaaaacactttgaaagtataaaggcaaaccaaacatacatgatttgtacgaattaatcgatgncctacttncctgctngnnnnnnnnncttagtgacgctattagtatcgatagacataattaagttcatgactccaacattattaaagttatgtttttaaaattggcaaaatttctcagagggggaaaaaattttnaaaatttncccccccccaaaaaaaaaaaaggggaaaaagggnccggggnaanttntttntattaagggnatactcccaaaacgtggcttgaccagaggacacctaaaagaacgtgttaatttgctagaaaatatcatatctattattttatcatttttagcatatttgaaaacgaccagaatagcccagccctctcaggtgtgaaaaccagaccgtatccctatctcctagtctctctgctctctcgctgttgaaccctagcaagagtgaagactagagggaataatcgacattttgtatgtcttctcttttcttagctgagtacttcctcggtcaaaaaagaaaaaaaactaatcctgggtaggattaggttatttttgggatggagggagtagatcgatgttttaaggtgtattcgtacaaagccatgttttgatggtgcgtattagtaaataagggttaattactaccataatttgtgaatatcatgtatcaaattttgtctttaaatgttgctagttgcagaaagactaatcatgtgaaaaaaaatcgagttgaactgttacacgtactaacgaaaactaacttgtacctgtaattaaattaagtagtactacgtactaccgtataagcaagaataatcagcgttcatcaggcataccaggatgccgacgctcaagcgcatgaggacggtggagacgagggcatacgcggcgagctcggtggcgccgatgtgcccgatgaaggcctggctgacgacggtggcgccgaaggaggtggcgcgcgcgcagatggacggacccgccaccacccacagcttcttgttctcctccaccaggcgccgccccagcgacccaacctcttcttcctcctcgttgctgcctccgccgccgccgttgatcgccggcttaggctccaggagaggatccgtcagcctctcatcatcctccgtcgtcctctccattgctactctgctagctagctagctctccagtgcacaacaatggagatcgatggagttaacaggagtacgaatactttgagttgcagatattagtagctgtctgaattgaagaaggctgcagggagggaaaagaaagcatccatcgatgatgctcaggtctccccatctaccgtttaatggcggggccagagacgatcgagcgaggaagtacatgattggccctgtggttgctgcagatggtgggtaggtagggagggcagtgtgggaagaaattaataaacaattattcaagtcccgttctttttctccaataaaaaattagataaaattttggatactcgtgacacgcttttttgcgaaaattttatatataaaagttactctaaaatatcaaattaattatttttttaataattaaaactcaattaattatatattaatatcaacttattttacacttgatcatcatcatcttttatctttatcttgtgtgggaatactatcatcgattcaggcaggggttgtgtgtaaacataatgcatgtcagcatgtggcgaggagggcaatcacgtgtactttctcttttaaaagtcatacgtattctgtttccgacggatactgtaggtaatctccaccacgtacctccaccaccatcatgaagcacggccgggcgtacggaggaggaggagcgatcaagtctataataattaaaattaaaacttaattaactatatactactctctccgtattttaatgtatgacgtcgttgactttttaatcaacgtttgaccattcgtcttatttaaaattttatgcaaatataaaaatacttatatcatgcttaaagaacatttgatgataaattaaatcacaataaaataaatcataattatataattttttaataagacgaaagatcaaatatttgtcaaaaagttaacgacgtcatacattaaaatacggagtgagtaataactttttcgttttatatacatcaacgtaacttttatcttcatcagttttaagtccaattagaatttaactttttttttcttggatgaatggagtaatataagtagtactactagcagcgatgtggcctaccggtatcaacgtcatcgataaatggtatgtttgtccggcctcgctgctgtgctgcatcagtgcatcctcatgtatctgcgtcacggtcactggctcactgccaaattaattaaagtggttgctacaaaaaatgattcatcatccaacgatgccaacgaatgcatcccggaaaaaggagatcacgggaagggaaacattacatcattgcatggagacaccatcgacatcgagtcgccgtctcgtgtcggccatcgatgaactttttttcgaacctttttattttttttgaattttaaaaatgaactcttacaaaatttaatttcaaaactactccctccgtcccacaaaatcacaaaccctagaatcccaatgcaactttaggacaagtgacaaaagacaacaatgccctcaatacaagtacatccaatcattagttacaaataaaataataatacaagttgaatatctgcagccaacttgagtagagtagtacaagtagtacaccaatcatgggcaccaaatatctgtacaggccactaatccagcgcgccaactaatttgaatcaaacaacaccattgcttggcggcaagaaatacaaatttgagcacaccccagcacaagataccctataaaagctcaaaatgaaccattctcacaagtttccctcccaacttatcacttcatgagtctgcaaaaacaccaccttcatggctttagatctaaatgaactagcagatgagggagatgagcaagctgtgcctgaccttaatgaaccagtggcagatgagggagatgagcatgatgtgcctgaccttaatgaaccagtggctacagaagttgaaatgcatgttggtcaagaggaggatcaacttggaggtgatgtacagggaggtgccaaccataaccatccaggtgaccttgcaagcaagaatagtaaacgatcgatctttgtacatatgacttgcataaatcactctaaatctttggcatttttttttaaaaaagataccatgtgcattgatggaactgctatgttcttggttttttttctctttgttctttaccagctcgattctgtgaatgagttgggcatattgaagttcattcccttccataatatcacaagttatacatgtatctagctataactaatcaaatagtgctcacatgatgcttatcttctgtctacgatcaatcctcatatgctagattctacatgtataatttcctttacagtaccactgatattgagctagtattagtatatatcaaagttagattgcaccttcaatacagatcacaaaaatccctgaacttcagcaccaaagtttgtacaatgtagaaaagtcattcaagtatggccataatataactagagcagcaaaatacccaatggttctcctgactacagcacaagcaccttttgataaaatcacaatcatgaatagcacaagttagggaaaaagaaacatgagcacttccatgagtttatttacagctgacatggacctctattgaaaaacaaggtgaagagtacaataacaaaataggtagacaacaaaactaaatttgagatggatataaaattggtaccttgattgtggttttcagatatgataatctcctttgctgatgttgtactgcacaaagtaacctatattaatcattggttccattatatatatagcataacagatcagttattcatagaagtatttggctacattggaagagtagtataagcattattacttttagtcacacatatccagttagccaatatgcatggcatgtcaaatagcaagtatcagcactaatgattggttgtaataatgcaatgtgtgagctatctgagtataatggcccataattattttattgtagaatgtaataaaatagctgcaatagtattgtacctaacaaaatattgatattagacttggtactcacatggtaattgttattgtagacggtgccgatgccatggatgaaattctgcaaatttatggaggtcacaaccaacatggctttccttttgatgttaactctgatgcctatgaggaacatctacaaatgcaagcaggtaaagcacttttagctgacatggataacaaacttagtaaaattaataaaatgtggttgtacataaagcaccactgaagaataagattaattaactgaaaccatgtttttaattagaagatactaatatgacatcatgcgaactacctagaataatctaaacataacattggatgcattagttgcaaattatggactgtcaatttgacatttcagcacataaagtaaattgtgtcaatgtttctatgtccttctgaaatctaaaatcagccataagtttacaaccatgttgatccatgataataaaatatccaccatctaaattggtacagacgactcaccttgtaattgttgttgtagacatgcaggagtacggtgtgtatgctggtgatgtggaaattgtttttgaacaagaggagttggatgattcagatgaggaagatgaacatccaaacaaaaatcttaccaacatacaaaggcaagagatatatgatgcattggttaagaaaactatcaatggaagactaagaaaaaaagcaacaactgaagttgctgaaatgttcaatatcaaaaggggtagagtgcaagatatttggcgaagagcaaagcagtgccgtgcacagggaattccagtcaatgtaagttctagaaagaaaactaattctggtcgcaagaagaatgaaattgacttgtcagatgttgctaatgcccccctgcaactaaggggcacattacggtcatttgcatcagctgcgggtataccaaaaagcacgcttcataggatgttgaaagaagggctgataagacgtcactcaaacacattaaagccattgttgaaggaagagaacaaacgatcaaggctgcaatggtgtatttccatgttagattggcatactttgccaaatgaaccgaagtttgttgatatgcgcaacattgtgcacatcgatgaaaaatggttcaataccactaaaaagacaagaactttttacctggtccattgggaggatgatccgtacagacccgtgcaaaacaagaattctattgataaagtgatgttcttggcagcagttgctaggcctagatacaatgaagaaggtatctgcacttttgacggcaagataggcttgtggcctttcaccaaaaaggtattataacctcttaatatatgcatttttacttagtgatgtgatgtgaaacttaattgcttatctaacttacttaatgttatatacataggaaccagcacaaaggacaagtcaaaacaggccaaggggaactctagtcaccaagacaatcaaggttgatcgagacaccgtaaggtcgtttctgattgctaaagtactaccagctattatatcaagttggcctcgagacgatgcacacagcactatatggattcagcaagacaatgctcctgctcatgtgccagtggatgattatcaatttgcctatgcagtatcccaaacagggtttgacatccgccttatgcatcagcctcctaattccccagatatgaatgcattagatcttgggttctttgcatcgctacaatcattaacatatagaaggatatctaggaatatggatgagctaatacataatgttgagcaggaatttcaggcctatgatgacaacaagctaaatagggtgttcctaacactacaatcttgcttgttagaggttatggaagctgatggtggaaatggatacagaatacctcatatgggtaaagagaggctagagcgtctggacattctccctaatacccttagttgtggtcgtgaactgtatgaaaaggtcatatcagcattagccaatcaagtgcagtaaattatgcaaaatgggaaggtctatcgtagtttcagcttttggttaaatgtgatgttgtatatatgataaagtaatatcagtattactcaagtaaatgcaactaatcatgcaatgtggcaagttctatgatggtttcagcttttgtaatatgtaatatgaagttttatgatggtttcagcttttgttggctacatttcagattgtatatatgacaatgcagtatcagcatttgagtatcatgtcatgtggaaagttttatcatggtttgagcttttgcctaaatttcatcctccctccgttcccttttgatcgacgtattgcaatcgtgcagcgagaccaaggtgaagtaaatttctcccattatcatttaaagcccacctcataaaaggcacaattagcacttcagttacttgcatgcaaaacggaagagagagagagaccccgtttttttattaaaactagtgcctagtatgcgaaatgaatggctagcgtctccttgcatgcatgcaaaaattaaatcagcatgcaaatctaagagtcatggccaccgtcctaggctaatgcgttgatcaaattggaacattttagttttacttatgcgctgatcaaaagggaacgagggagttttatatatatgtcacaatgtaaaatcaacattacatgcatcatcataatcccctaatctcatccagtaccacaattacacatgctttcatacaataccaaaagggtgcctactttaacataccttgttaggttgctattcataaccacctaatctaaagtactaccacaattacacataatttcatacaataccaaaagggtgcctactttaacataccttcttaggctgctatcaataaccacctaatctaaagtactaccacaattacacataatttcatacaataccaaaagggtgcctactttaacataccttcttaggctgctatcaataaccacctaatctaaagtactaccacaattacacataatttcatacaataccaaaagggtgcctactttaacataccttcttaggctgctatcaataaccacctaatctaaagtactaccataattacacataatttcatacaataccaaaagggtacctacttcgaggtactttgttaggccaccattcataatcaccaaacaggcacacaatcaacacataattgaagcattcatctaaattttttactatgaaaacactctagaaatttttttaccgatttttccagtgcgtcttggtcttgtaggagttcttctaggccgctatcatcgtatggatcttgcgcatatcccccaatgaccatatcaacatcatcatcgcttgacttgtcctcgtcgatgctaacatctttagcttttcccctcttctccttcatgtcagtttgcgtgacgcttgccttcttctcgaacatggccatgtggtcgctatcatctcccaacatagtcctgtaacggataaaacacagtgacagttaatacaagatgggatgtaaagatgaatctatcatggaatcaaactgaaatgtacttcgattacattatatattcgatacatttttttaaaaagatagtgctgacccatgtaaataagcaatgtctaaattgaagtatagaccaaatggactactgaacgcaatgaaagccaaaagtagagtacatcagtttatatatgcgtggcctagttaaaggatcaaatccagtgaataatagaagtataacaatcgaaaaagatttgcagaaatcaaagtatagcatccacggtaattctcgtagaacaacatcaaggttacctagttaatttaattagctatgaatgacagcctaactatctgtgggtgcagttgtactattggagcaagttgaagcttctcaacgataggtttcagtgttaaaatgaacaagtcaagcaagcaacatacgctggctaggtagctgcagccaacaaagcgagtacgacgagctgcattcaggagtaagtttctttactgatattgaaacaagtcagaacaaaataattaaccatatatacttagtttttttaaacaagatgatcaatcaagcatcatgtcctacacgtcaataatgttttatatttaaaaacagaggtattaatattcatgcattacagtgtcaccacaattttggatttttcatcagcctcttgattgagcaataaagcagtcaaaaaaaactttgagaaataaaattcgcatgttcagtatcaaatttcttacagtttataattgtttcctatactcaataaaaatttctaatttcagaatatacctatgggcaacaaaacagaaaggaatgctttggttaggtttaaaactgcttggatttttgttaacactaatttattttatttgaaacatgtcatcataacccccttctcactccatgccaaattttgcacaaaacaaaatgtaaaacccagctaacccgcattacttcaacattggtaacactgaccgacatataacagctggatgattataaagatacaaaacaccgaataacattaacctaggatattctatgcagtacaatcaaaaaaattttgggatgcaaccgcacccagtgcatctgatctacacacgtcattgaaagcatctctcattgcataaggggaacagattggttgtagggaaaacaaggtgaagatacctttgagtcaatccacgcatactgccgccaaagtccctagctgttgccaccggaatcagaacaggaggtcggtaagcctcctcctccgccgacccctcctgtatcagatccgcgcgcgccgccacctccttgaccatcacatctgccgccttgcaaatctccgatgtcgctgccgcatctgaactggctccacccgccgccgttgcctccgccgccttcttgcaaacctccaaggccgctgccacatctgagccccctcccgccgccgccttttggatcaaaaccgcaagctgatacgcctcctccgccttggctttcgtctcttgaatgaaaaccctaaactgttccgccgctgcctcgaactctgccatcgaggcaaatccttcgaaaggagccgcctccggcatcggatctaaccgctcgcaaccctcccccgctgtatcgaagcgcccgcatcctggtggatggggaactccgcagggagttgcggaagtgagggggagcggcgtggagcggggagagatgtgtggggaggagcacgacggcagtagggagggagtcggaagcttcgaagggtcgctcatctggacgccgccgcttcgacggaatcgatccgggagggggtgagggagcgatggagagaaacgcgagagagagaggcgacggggcgatggaatcgatccaggaggaacgagagagagagagagagacgcgacagaaaaaaaactgggatgcgataaggtttgcgtggtgtgaacgagaggatacgcggtccacctatggcccacacaggatgagatagatgggaagtttctcgttttctgtccagaaatcggtttttttcgggacaaagctctccccccaggattcgtctctttctgggacggagggagtagaccttttaattgtattggctgatctgatgtggtgaaatactattgtcaagtcaaatgaggatgaacatgatagtttagtttcgttatgccaggcgggatggcgtggttaaaagttttaaattttaaaaataagttttaggatgtttatttaaaatttaaacacaaaaaaggttaataataaaaaaaatggccatcctattcatcaattcatgccctgttaccttgttctcgtcaacccatcggcagcacaccaccactacgtaccagctaactcacgatttaattcaacatcgtggaatatagttcaattgcatcaaatcatatcttctgctatctagtagctgtctgaattgaagaagggaaggctgcagcgaaaggaaagcatgatgctcacgttttatatccacacgtcttctaaactgctagtatgtattcataaaaaaagttattttaaaaattatattaatttattttttaaatttaaaataattaatactcaattaattatgtgttagcgacttgttttgttttgcgcatattttcagccttctctaatactcttctctctaacacaacctgctgtgagagattgcccttaaattatatggttctgcagatggcgggtaggtagggatggcagagggggaaattagctgtactatgtaagtaactcctgatcaggattctcggacaacgagggatcaaattaacaggaattaacagttggatcgtgtggcaaggagggcaagcacgtgttcttttctccaacaaaaagttggatgaagattaagatttttgtgacacgtttttcaaactgctaaacggtgcatttcgtgcgaaaactttctatacgaaagttactctaaaatatcatattaatctatttttcaagtttttaataattaaaactcaatcaatcatacgttaataccgcctcgttttacgtaaaaaacttaatcttcatcttcatcttcagaagttttggtcctacgtggcacacacgtggcagtccagtcagcataaaaaataaaaaatggtagggcacttgtcagttctgcttcttttctcggtcaccacatgcgggctctaccttatatatatatattttaatgctgactagactgctacatgtgcgccacgtaggaccaaaaccgctagcattccggagtctgtcaggggataattcgtccgtataaaaagttgagggtgaagaatatctaatttttaaatagagatggataattcgtactgccacaatagttcaagcgtaattcaaactttttcctaaaaaataggcccgaaaatcatgcctctctagcaatagcagtgccctttgcaaaatgttagaaatttgtcatgtcatcttaggtgggctctccttcaattatttgtttctagcgatctgtttcgtttttgtcacgttgcaaacgacctgcgagcgctaggttttgggcgatcgcgcatcactgggccatcgcgtcagcaaggtggacgcgagtgcgcgccagctgtcggggcaaggaagggtatcgtgagggttccattagctgccaggtcaatcagtcacgccagagcattgatagaattgggcgtgtcggaatattagggccatgattgggtatatgttggaggctgtgttttagacataatttccaaagtaatatagctttaggtaacatgatcggttatctcttggagatgctctaaaattgaaacattattacaaaacactatgccagaatggcccgtttgatatagctttttgctggattaaccgatttgcttataggagccgatactcaattagcgcatggtcttttttgagattgaaaatgatcatttttgagttttctataaaacttttatataatattttgttttaaaaaaaaacaaagtgtttaatggtttgaaaagtgtgatcgctatggtctagtagctagaatttgaaaagaacacgaatggccagtttctctctgttttgttttggtgaaatttgactgtttctcatatttgatagttcaatcaataaatttagtcacgatagataataaagcatagtgaatacaatcgacttacatggaagcatacaaatgctctttctaattaatacaaaaattcatgtaaagctcacattgtgcaagggcttggtgaaataataggataaggggtatatatacaataacttttcccggcggaaaagccatcatcccaagccatatgattaaaattgttctttggtggatacgtgaccttgatgaattttttgaaagttcaaaccttgaaaatcttaaatccgagcacaatcccattttgacaggttgattcataaatcatcaaaattctttacaagtgtgcagaagttttagatcatgcatttcctattgaattctgtgatcgcccgttctcatccatataccatctgtttaatctctctcgagtaatctctacctgaaaaaaaattaaacatcaagcacatcattaaatgagaaaaatatgctcttctaatgacccatgaattttctagagagacccttatattatttgaaaaaagatatttaatcagaaaagaggataagaaagaaaatatgagcagaggtaaaaaaaaggcaacctgttttttccaatcggtcctaagtgtgatgaatagaagcacaagagtctggactagtgttccaagaagcatgccgatccaaataccctacataaagaatgaacataagtgagggacacaacttaaatccagattaactagtgaaattctatcatacaaaaattccttacctttacttgaaatcctagcacatagcctagtattgcaccaagagggataccaatcaagtagtacgatgtaacattaacataggcaactatactttgccaacccgatccgatagcgacacctatatataattagaaaattagtaatttcattgttaaattttgaattactttgatatatacttgtccttcaaatggagtaacatacctgagagcactggttgaacactattcaacaaaatggagaaagctagaaggggagcaagatcagcgacttcatctgctaccgccttactttcagtaaatatgtatgcaaggcttccacggaagaaaaggaagagcacaaacaacacaaatcctatcaagaaagaagtggtgaccacattgaaaatggcaaacttagcccttcttgcactcccggctccaagttcatttgccacccgcactctaaaaatgtacatgcattaagtatatgtcaaatttatggttcatgttgcatcagttagatgaaccacgtagtgagtgacagctgagatcgtgaagttaccctattgcagacaaaaatccgatagaaatcatcatctcccaaccgttgatattaaggctacaaattttgcaagtgaaaacaacaatgttcaataagcaaccttttcaattactagaggagacacacaaaacaatacaatgatatacatgatacaatatgatctggttgttgttttctaaactaatatgcaacagattggagtggaatatattaccatatagaaagagcatcaagagcaacctctgcattcttcatataactagtgaggagcaccaatatggtgttgtaccacaattctaaactgaaaaggtaaaagaaaaatgagaataaattaatgagcttctaattatttgtataaaagaacttgattaacaattagcatctaaaatattaactttctatttgctatcatcaattttttttgtcaaaaatttcatatatacatataaacataaccatgttacttaccaaagcatcactccagacgatagcgaaagcttcataatagcaccaagatcagtaaaagcagaggatgagaaccctgtccatgttagagggcaaccaccaaagaagacaaaagcgagctggccaaacacagggatccaaaaggagatgaccatggatcccatgaccccagcaagaccaagttggaacttgactgttaggagtcatgacaagaagaggtgaatcccaagattgaggaaggcaaggtaagtgacaatcatgttcttgctctgcgcttgtaggtacatttggagcgtgaatgcccatatgtaagagaacattacggggatgtaccatagagagatggtgccagcgacagcagagatctcagggtcttgaccaagagcgattaggagtggagttgtgaagatatagaccgggagaaggatgactgcacaacagaagagaactagccatgagcgttgtagatagatgcccaacatgtgatattgcttggcgccatatgattgtccacacaacgtttctaatgcgctcgccatgccaagctgcaatttacaacaatgtgcatatacggttaatttgtagtatatactgtttttatatgcatatcaatagatgacttatagtgcaaattaatatttagtaaaaagaagttttcataggagtgacttgtagtatggtctggttatgttttatttgtatattccgttcaaaaaatctaggtaaagacttttgctattgttgcacagctagtagacagaggtagtacaaactactttaattactgaagaaaaaaaatatatatcagaagatccaacaagaatacacatgaaaaaagacccggcaaaaagaatacatgaggtagatgctatatactccttccgtccctaaatatttaatgccgttgacttttttaaacatgtttgaccattcgtcttgtttaaaaacttttgtgaatattattaagaaatttgagtagtagtagtatatttaacaatgaatcaaatgagaggaaaataattaataattactcattttttaaaataacataaacggtcaaacatatttaaaaaagtcaacggcgtcaagtatttagagacggaggaagtactaattaatgtctggagagaaagccgtgcaagggaaggatggctaggtcaagagtctacttcaaagttttactagtactttgaaaatccaaggaggcaaggtctcacatgattaattttcttcctgcagtatgtactatatccattttttttaaaaaaaaaatcgagcctatagcttcttagctatagtacaacaatgctggacaagatcgaacactctgttttgaacctataaagacagcaactgaacatccattgtttgtctcaattaatcgatgggcaaattaaagcacaacaaaaaacttccagcgcgcgcggcgctgttagtctctgaatcggcacaattaagtcaaaacttaacgtcatcaaagtcagcttttagaaataaaaaacagctagttgccgaaaacacgaaacaggtaaaaagaaagatcaatttgaattgttacaacgtagtaataataatttaaacccaaaactgtgtaatgataactctgtaataataagtaaaaagggaatcagcggcatgacttaccaggatgccattgctgaagcgcatgaggacggtggagacgagggcgtaggcggcgagctcggtggcgccgatgtgtccgatgaacgcctggctgatgacggtgacgccgaaggaggagaagcgggcgcagatggaaggacccgccaccacccacagcttcttgttctcctccaccactcgccgcctcaccgatccaacctcatcctcctctgcatcatcatcttcctgatgcttgtaggtagccggcttaggctccaacagaggaaccgtcagcttctcatcatcacccggcttctccattttgctaattaattagtggcggcttgtagtttgcagcaatggagatggagtggtggtgcttcagattcagtagcaatggcgctgctggaggaaagggaagcatcaaggatgctcaagtatggagctactgatgatatatataaagggagtcgaatggaagtacaggagaagccgtgggttggtaacttggtatggcggagggcagaatcgggaattaacaggacttaattaatcgatgattattaattaatagtgactctagtctagttgatcagatcaatgtatatatccagttgagaatattcaggatcatccatatacatgttgagaattaattagcaatagtaagtggagtaagaaggaagggtgagattcgatctggggttttgtgtacattgtactatgtggcaatgagggcaagaacgtgtactgtatatagctttgctgcctgtagttgtagactgtaaagacgcgaggttatacgtacgcgtacgcggtacgacggcttagggcctgtttggtacagctccagctccaactccatctcttctggagctggagctcagccaaacagtttcagctccactaaaattgagagtggagttgggtggagctctctcacaaaatatattagagttgtggagataggtttaggcaactccataaatccactccagactcaactcctagagttatatttatatttaggagttgtagctgtaacaaacaggcccttatttgcgaatgcggggcgtcggaagaggccacatagagatgctaggtacccgtacctacagggcaccaccagcaggctgcatcgtgaagcacaggaggccacgcacggcggacgtaggcggccggaatagtagctggcccgccgccgtcagcttaattcgtcaataaaatataatggacgtttgtccggcctgcaatcggccactgcatgcgtgatgcatgcgtcgtggtcggtcaatgtccgccgaaattaaacatttattcctttcttcacaaaataagccaacacgtaccaaacgagaatggtttattttataacagaaaaataaaccaacttgtattggatgagggtggtttatcttgtgacagagattgtattttatacaaaggttttttaaacctggcaaaacggtgtgtattttaattttttttaataaagacattgtttaaaaaattatattaatttactttttaaagtcattttaatcatcacttgtgataagggttactctgttttttttatagggacaaagtgttccgaaccgtgtggttcgaacacagcagagcgtcgtggtcggtcactgtctgccaaataagctcccgtctcggtcattcaactcttctcgtcgagccacactagcagtaacaccagtctagcacgcctgcagctaaccatacttatatcctttggtaggttggtcacgtgccgtctatttaggttggtcacgttcttttctcgtgaagctactccctccattctcgagaatatagagattttaacatctccattctcgagagattttaacattttacttgcactgtttgactattcgtcttatttaaaaattttaaaattattatttattttatttgtgacttactttattatccaaagtactttaagcacaactttttgttttttatatttgtacaaattttttaataagacgagcggtcaaacagtgtaggtaaaatgtcaaaattccttatattaggggatggagggagtaacaaatactagtactaagcagtacttggatatacactaaacagcaaattcatgattttttaatatttatataaggatatggatgaatgaattaattataaagttaaaataaatttaaaacaatattaccataaaaaattaaaacaatatcagaagaatttttatatagaaagttttaaaagccgcacaatttaaaagcttgacaacgtgccaccgttaatccgttcatcaattactcgaaaatactggagcagtattatttatttgtttacaatgtaaaattttaatcacaacaatcgtatgtattttgctactcaaattccctatgccattgtgttcagtggtttggatgcgtggcacattttactcttgcttcgttgtgtattacgagaaaaaatactttgtcgtgcattataagagagaaaatatcaaaattggtggtctttatcgacaaactcgggctacttgggcttgggccatgaagaccagccatatatcgcacctaattccatatttacatatatatactatacagtatataaagagaggagaagcttggcttagcttacattaaaaagaacattaaacgagaaaaagatcatgaactctgtttcatggaaatatttttgcttgggacttgaaatatttgaaagcggaatggttttatttttgataataagctcccttctttgttatcctgaaggcagctccttaagcatgtgtttggtttagggatgggttaggatgggatggttttatccctgatttttggaatgggatggttctgtttttgtttggttgaagggatagaaccacccctattttttgtttggtttgagggatacgataggttggaatgatcctatattttgtttggatggagggatgaacatgggatgcttggatacaattacctccacacattagttggtgaggttacctctctcatagtctacaaactacaaaataatatttctacatgatgaccacactatatcaaaaaaatgaaataccatccatatcactatatttgaaaataagctccagcaacttcatttcagcatactggacaagctaccaaataatgaacaatactagcagttccataatcaacccctcaaaaaacaatcacacataattagctcacatctgatcccatttcaatccatacatagagtccaagccaaacataataagaagtttcaagtcgtgcacataatagcaaattaaggtcttacacataatagcaaatttaagtcttgcacctaagagttcactgcctacaacatattggcagtacaagtcatacatgaccatgggcccaccggcaacacataataccaaaagaactacccaactcatctaacaacgctacattgatccaggaaacttctcattaatgaacaaatggacccaatgtatcttgttttcgaaaggaagtccatcaaaagctctaacaatgtgagggttagcaaccaaatgagcatagtaaacagatacgtggatctcctcaaacccaggaaggcttttcaaggtttcaaataaaccatctggcagtttattgtctggctcagcgacctttagtatagcagaagctaacttgtcaccaacactggtgaatgcaccaatcagccc

SEQ ID NO: 4966 - DNA, 4594 bp, Oryza sativa
agacctactaatcatggccatcatcgacaacaataaatttgtatcagcaatacaaactaaaagcttggtcctcttgtccatctacaatacaacaaaaaaaacacatggacaacatctactgtcaagcaattgataaaggaatttcacacattcttcaacaaaaacagatatgcacagatctgaaaacgaaatcctcatccaaggtttagggtatttttaccgtggatattgggaaccccgatatgcagttggtggctacgaacacttcgaatcgaaggtgatgaggtccaacgccgccgtgtcctgctcgcgcaccggctcgagctcccgagagtgccgccgtgcccctgctcgcgcgagcgccgctgcagccgcgcgcgcctccacagcccatgcccgcggtgccgctgcagccgcgcgccgcgctgcttcaccgcagcccgagccgcgccgcgccgcgccgcctcaccgcagcccctgctcgcgcgccggctcgagctcccgctagtgccgctgcagccgcgcgcgcctccgcaacccacacccgcgccgccgcagccgcgacccgccgccgccttgcccctgcgcgccggctcacccaggccaagcacgcaccgccgccacccttgcaaaccctaggaaggaatagacagagaagagataagaaggaagaggaaaaaaagaggtgaagcgcttctgctcttaccgcgcgtgagttgcgagtcacgggtgcgaggtgggatcatttcgtccgccccttttttccggatggggttgtcccgaatattgaaggaatattctcttttggaaccatcttatccctcatagtgcctcaaccaaacagccataaaaatgggatgatctcatcccatcccgggatatcctcccaaccaaacacatgctaaaagtgatcttctacttttattgtttagattaaatgagagagacaaatctgtagtcatgggttagattcctttgttgtaattttctttggactccttttttctttaattctttaataaagtctttttaacagcggggcttccatgttgtgttcttaaaaaaaagttaaataaaaataccatgtctcctcatatcttgtgtttcttttctcttttagttatgtgtaatacgttatcagcataacgttctaatggagattaaggtagaagaaggtaaggaaaaaaaattgacaaactgatttgtattttatatattgaaccacaaaaatgaaacacttgcaactttctcgtctcatttctgtgactctcataccaccaacaccttcttttgagtcaatggcgcaagccgattggggtagtccaggcaccaacctccataaccaacaaccctcactacatgcgcacgtgccagccacatcccgtatgacatacgccgctgtaatgcaccggatcgactgagatcgccatgccgcgcatagcggctgagctggccactgcaccggtcggccatgtgctgcagcgccaaccacactaagcaggtgcgcttaaccagccacgcccccgcatagtgccacgccacccaacggtcgtacccagcagacgccatgccagagcaggtccgacgaccatacctactcgacagcgcatcgtcatgtgcaaaccctaacagcgtgttgattgtgccatgaccgtcttacggtgtaagtagtaccgcttattttgacatgtaagtagattcgcgggttagccacttacacccttagagtcgcccatgtcacgagcaaacagcgccgccgtgctacagagtgctggaccatgccagcatgtcgatcgggtcaccgaattgccttatagataagtggtcgcatcgccgtgtactggccatgccattgtgagcgtcggccaaggaatgaggaaagaaggaaaggaagaagaaacatacaaaaggaatgaaaatggaaaaaaggaaaggaatcctgtggtttttgcagaatgggcctgagctttctggaacatatcagcacagctccctgtattgagatctttggtgcacacgtaaaaccttaaatttaggaaaacaccatttctaaccctctaccgcatagaatcttctaaagtggcccttgtatttttcaaaattcattgaaaatttgtattttagcgtcaaaattaatgattatgtattttggatttgaatttcgttttgcatttgaggtattttactactgttatttaagattttgaacttctcttatgttcataatatgataaacacaagattgtaaactccaaaattttgccaaaaacttgaaatctaatatttcagaaattttgtccaaattttggaggtttttgtcccaaggtatttttgtcatttggataaattgtacagtgctaacggaggttaactgaacgacaatagtaaatcataaaacttaagcaaaagtcgacggcatattgtagaacgtgataaattcagtggtaaatatggtttacgattccgagatagccttccgtttcgggctctgacggaatgacggttttcacgaaatacggtggaaagccgatagattccaaacaaatttcataaaccaatatttgaatacaaattctctgaatttgccgataagctcgcgaaaatcggtcggctttggcgaaattccgagtgaaatatcgaaatttcaatcggtaactagaaaaagattcctttttttattcgttattcttttctttcctactgtaaatttcagtaaatacacggaatacattaattttttcgtaaatttatatcccaacaggttctatgaatatcatactatttataagattttatttgatttttttcttttttatcaattcaaatttgactttgaatgaaactcaccaaaatctcagacggcttctgctttcgagtctcgtcgaaaactcgaaatttcgcagaattcaaccggttttcatcggaactgggaatcttagtggtaaatcgtagacctatgataaacttattggtatataatggattccctcccaagtcaatggctgtgtgtcagcaagtttggcactgtacactagctctagttggtggtgctcgctgctcaggaagcggccacgaacaacgtccatccaccgtccaaccaaccatacatgcacgctactcatggacgttgccaggttgctgtagcgctttcatatcagactagatttactatttttgatttgactccgaattattctatcaagctagcaactgcttttgactagcccgcaaaaaattgcacgggaaaatttctttgttgggacctgtttagattctaactttttctttaaattttaacttttccgtcagatcaaactttcctacacgtaaacttctaacttttccgttacatcgttctaattttttcaaactttcaattttagcgtggaactaaacacatcccaaaatcgtctccattttctgtcggaattaattcacgcccaggaaacgcattcaagtggatgctttcacctgccattgctttgtttattcacttccctccagcttaattacgagtagagtacagtacagtcatcgctgttactctgaattatactactgtagagcatcatatgacagtgaggttcagtcacaggagaggctctgatttactctgtttaattcgcttgagatgaaagcatggatgcattcatgcatacgcgcttaatttggctcgccacggatggcttctagcgtgaacgacaacgttgcaactacgctactccatccactgacgattaaacaacataaatcaggtgctaatcaatacccaaacgcagcagggaaagaaaaggacaacagctaactgcaaccgaaacgtccctgttcccggtttagcgtcgggaaatcatgagctaataagcagcaacctgttacacgtatatatctaacttgttttatatttttatcatgcatcacatgcctagcttttttatttgtcactataaaaaaaacgcacatcaaaataaacttgcacgaaataaataaacttgcacgatatattaaggttctttttggcacagctctaaatctgagatttcttgaagatgaatatttctaactccacaaattgatctagatctacggtcacatagataacatttgaataaatcaatttattcctattttaaatgaaatataaaattcactataactcaacgtataaacatcaaatctaccgtggatcagagatccatagctctaccaaacatggcttaagtttttaactatattgcaaaactcgttagccttacttttatatattcatttataagttcaccaatatattttttcactttttccttacgaatcactgaattatttgtagtctaaatttttcaccctaagaccaaaatgtaaatatgtgaattattggatgtcaatttggtgattcaaaggttatatttatatataagagaaagattgagcaccagtatttaaatcctggtgtacatagatattagcacacataggtgcactttaaatagaaatttaatgaggcaacaatttgatgtggttaagtggtttccatctcttttggcacatattaaaggacgcattcacatgtgtatgagtgtggtgtttgtgcatatat

SEQ ID NO: 4967 - DNA, 14961 bp, Oryza sativa
caacattttgaaacggagagagtagtaattaaaacttaattaatcatacgttattaccacctcgttttgcgtcaaacacttaatttgtcagggttatagataccacatacctaatagtagttgactaaatctcggcaggacccaccacataccatgtcttatacggaaaataaccttcggatataggaggagttccacataaggaaggataagtagagttctacatggaaacgacaaggactactcggattgtatccatattggtttccctagttctacttggacaaggggacacctatgggtataaatacaaggcccctaggagaagaggggacacggaacaatagatcaagacataagatcaacatacaagcaaacatacgctaagacaagacgccggatatcgacttcaaagataagcatggctagtcccctacagtatctacggatactgataggagagacatagcgttgtctttgatctcgccggatgcggattcgagtaggaaggctaccctattgtcgactacgagtcagtacttcagaccgccaagtcgacaacagttagataggctaccccaaatattgtactggtgtgattatggtgaataagagcaacgaccggcttcggccaacagaagtagggttattacctgacaattcaggggcccgaacttgtataaaaatcctcgtccccatctcttttattacaatctcgcatatatcttagtaccaacgatccccatactatgcaaataccggaatcgcgacatcaaacgtcgacataatcttcatcttcatctttgcgtaaaacacttaatcttcatcttcaggagattcaaacaccaccaaagtctctaaaactatctctttggtagtattattcagaatgcaaatatgcaagagaattttatttttaaagcttgctaaccatctgtctatatttggtgatctatgctgaaagatatgagaattacacttctttcaaagataccagcaagcaatcattactatctccaggaaaccttttgtccgaaaacataatctggcaaaaactatcatctagtaaaaaaataaagaggtgttccaccactctttagtgtggacaattttcccttatttgatactagtttagtcaataaatttagtcaaatgtagatacaaagccaaagggtacaatcaattcacatgcaagcatatgcatgctcttccaacaaatgcaaaaaaaatatgtaaaactcataatggtcaagcatttgctacaatagtttcgataacccggtaaaaatggataatttacgaccatatatatataaggttccttcaataacatcacggtttttccatggtgtgacacatggggaaaaacatcattccaagccatttataggttcattgaaggatgatgtcaccttgaaggatcttaaactctgagggcaatcccattagaacaagctgattcatagatcaccataattcattacaagtgtgcagaagttttagatcatggattttcacccggattctgttgtctcccattctcatccatagaccagcggtttaatctctgtcgagcaatctctacctagaaaaaagaacatgaaacacatcattaaatgagaaaaaaaatctagagagacccacatgctatgtgggttaagagatttaataaaaaaaaagataaggaaaattgtgagcaattaacatacctgtttttcccaatcagttctaagagtgataaatagaagcacaatagtctggactagcgtaccaagaagcataccaatccaaatgccctatagaaacaacaaatggaattgagaaacacaatttaagtcccaaattgactaatgaaattttatcaattggctcctcacctttacttgaaatcctagcacatagcctagtattacaccaatagggataccgaacaagtaatatgatgtaacattaacataggcaactacactttgccaacctgatccaacagcgacacctacagatgattataaaatattataattccaatgtgcaatttcaaattatattgatatatatactattcttttaaatggaataccatacctgagagcactggttgaatactattcaacaaaatggagaaggctagcaagggagaaagctccgcaactgcatctgctactaccttactttcagtaaatatgtatgcaagccttccacgaaagataaggaagagcacaaacaacataaatcctatcgagaaagaagtggtgaccacattgaaaatggcaaacttagcccttcttgcgcttccagctccaagttcatttgccacccgcactctagaaatgtacatgtataggtatgtcaaatgaaatttatctgacatgattgattgatcaaatgaaccacttagcatgtaacaagtaagatcactaagttaccctgttgcagataaaaaccctatagaaatcatcatctcccaaccattgatattaaggctacatatggaaaaacaataatgctcaataagcaagtttttcaactgctaaaggaacaacaaagaacaatacaatgatgtacccacaaacatgatctaccttttatggggcaattgcaaatttaccactactttgaatcgttattgcaaaactgccactagaaaattgcaaaaatgccattagaactgtcatttgagtggcatccttgcaatattgaaaaaaccagtggcaaatttgcaaataccccaccttttattgtctaaaccattatgcaacaattgaaagaggaatatattaccatattgaaagagcatcaagagcaatctctgcattcttcatataaccagtgaggagaaccaaaattgtgttgtaccataattccacactgaaaggcaaatgagaaagaaaaaagaataaaccacatgagcaattaattagctctaaacaatatgttggtcgacatttagcatctaacatattgcatatctgaaatttcatatgtatgcataaacacaattgttacttaccaaagcatcactccagaagacagtgaaagcttgacaatagcaccgagttcagtaaaagcagcagatgagaatcctgtccatgttagagggcaaccaccaaagaagacaaaagcaagctgaccaaatactggaatccagtaggcaatgaccatggagcccatgaccccagcaaggccaaggtggaactggaccgttaaaagccatgataggaaaaggtgaagcccaagattgagcatggcaagataagtgacaatcatgttcttgctctgtgcttgtaggtacatttggagcgtgaagttcccaacattggatatcataacagggatataccacaatgaaatagtgccggccatagcagcgatcttaggatcctggccaagaaaaattaggagtggagtggtgaagaggtatatcgggaggaggaggactgcacaacacaagagaactatccatgaacgttgtagatagatgcccaacatgtggtattgcttggcgccatatgattgcccacacaatgtttccaatgcacttgccatgcctagctgcagtttacaacaatgtgcatttaaggtgagcaatttataatgtgtttttatgcatatatagaagataagattacatctagaaattaattgttagtaaaagtctaaaatataaagaggtcatcattacttgtagtaaggtatcttttgataccaaagtctgtgattgagagcattgatagggagaaagcactgcttatggaaatagtcagatatgatcaactccaaaaacaattcctggctgcttggcataaggtttgcagactaagttaaaggagaagaggaggccattaacttgacaatccaaaataggcaccgctcatgaaacacttgaacaaattttataacaataaggacttgccttaggtaaaactgatttagaataagtattatgtctacctagtgcctaatttaactatcccaaaagagtccttctggtggaatgatgtttgtaaaacaagcatccactttagaggaattcctagatgtatcttacataagggaactgcctgcaccttctaggaagatatgtggtctcactagccacctccatgcaatgtatatctaaggctatattcctttgcttctaataaggaggcctctgtcaaagtgtttgtatctactgatctggatgataattttaatctgccatcatctcggaaaacatatgatgaggtttctcgatagtcaaacaaactcctaaacttggaattggatcacactgctgatcagtggaagtatatatggggaaacatgaactatgcctttcagaaattcttctatctgatctttaattacatccgtctagcctccacattttatttggttatggaagagtaagtgcacttcaaaagttaaagtttttggattgctacttcttatgaatagattgaacacacgatatatgcgagatcataaaaaattgctccaccaaagtatgacctagtatgtgtgttatgtaatcaaggggtcattgaaacaatgcaacatttgtttcacacgtccattttcatcttcatgttgagcttcaattggatttagttggaataccgtgatgggaacttaaattatgatggctaaggctaaaaaccaatatgtgggttacagcttcatcgataaattcttaacttctgtctagtgtatttggaagataagaaataacttcatcttgagcagaaacctcccaccttttcttccgggagatatctgtttaagactgagctcctccttttaatatttggactaaatgaggagataaagatcaataaaatatattactgtagggcctccctccctgctgtgcttccttaaaaaatatctagatatataaaaacttggcagtctgctattgttccagagctagctaacacagatatcttacgagcttatttgtacttgaagtcatgaagagcacacaagtatataactaatgcataaagacaatgcaatgattaagagggggtggctgaactaagagtccgcttcaaacattaagggatgctttgaattagtcggatggcccctttctaaacaaaaaatacataggtctcacataatttagttcttacagtacgaattgtgtcttttttaaaaaagaaaatttttttatgtgcctctgaatattttggatcccttccgtgacattaaatgttgcctcatctctctgacatgtctgatatttttttccccatcaatacactttccattactttgaccgttagatttttttttctaacatgactatatgcccacactatccatttctcatagactcgcacttatgtacactttaaaatataaatctcaacttgaaaaaaatacagtaaaaatcaaatcgagcaaagtttgagagttatttgatggaaaatttggaaaacaaagtttaaattagtttaaacacaaaatgtaattaaatagtattaagtgtagtgggtagagaggatagttacgaggatgccgccgctgaagcgcatgaggacggtggagacgagagcgtatccggcgagctcggtggcgccgatgtggccgatgaaggcttggctgatgacggtgacgccgaaggtggagaagcgcgcgcagatggaaggacccgccaccacccacagcttcttgctctccaccaacacccgcggccccaacgacccaacctcctcttcatcttcttcttgcttgtcgttgttgctgccttcgccatgagcgtgcttaggctccagcagaggagccgtcctgcagtcatcatgttcatcacccggcctctccatttctcctagcacagcttggcttagctagctgctgctaactttaattgtgcaggaatggagcgaattaattaatgggaataattgcacttgaggggaagaggagctatcagaattgatgaagggaagcaggttaggaaggctctcagctaccgttttaaaggagattgatcaggtagctgggttgatggctggacttggaccagagagttgagtgagcaagtacctgattgtccctgtggctgctacataaggtgggtaggtagtgagggcaaggtgggaaagtagtagtaacactgactcgttaatcatcgatttaggaatcagcattccagacaaaaggaaggaccaataatatagcgagtatgaaattaattaacagtgactgtcgtcatatatactacagaactatcatccatccaggaatctggggttgtgtgtagtgttaaatggctcaatgcaagtggattgtgttatgtacgtatacacaccagggttcgacttaccgccggtaaccgcgcggttaccgtggttaccgggcttaccgcgggggtacggtaatataaataccgcggtaacctccttaaatttaaataaatttaaaaaataatttgaatttttgataaattttgcacggttttgtacggtttttcacggttaccgcggttaccgcgcggtaaccgtgcttactgccggggcgcggtaactctggccccggcgatttgggaaaccccattacacacaaacggcggagcttgcaagcggcgtacagagccagtaattaacttacactataaagccttaagaagttaaagctattttttacttgtaatatatatatatatatatatatatatatatatatatatatatatatatatatatatatatattaagcacatatacccatatagtgacacaaattaaacatttatagtatgatagataataaataaagcaatttgtaggttgcaatataataatttattctctataaataataaacgataatataattacaactaaaaaggccatagtagaaataaagtggtataaataccttataaataattgaaactataattcaacaatgaattgaaatcgatagaggcacttctgtgagactgtgacctacgtaccttcaggatccaggaaacacagccgcacaggcagggctgcaggcaccggcagcttggctgatggcgtctcgctccgtcgctcggcgcgtaaggaactagggcattcgcgacttggggttcggcgacgagacgagtagacgacgaagcgacgcgcgctcggcgctccccggcctgggcgctgcgctatgatgtgggctgccgcctgggcccccttccggcctgggcccaggcggttgcacaaccggcctaggcccagggcaggcagcggctacgtacgtcatgtcgccggcccggtctgttcacggcagctatagttgccggacgtacgtgtcacgtgtggctgaccggcatccccgcttggcgcttgcatcctcaactcgtcgtggccaccaaaaccaaatgtaggacttcgttcatttgatgtcaaaaaaaaaaacttactaaaatttaagcaacttgtcaaaattttggcaggatttcttatatgctctagttaccaaaatttagcagtaaactaaatgtagctattttttttttgataactttaccaaaatttagtaaagttgaaaataacatcaaagtgaacaaactgtagagttcctcgtaaatccaacgataccacccaatatgcatctaagaactgggaaatgcatcttgacaaaaaggagatctcgctgcaaggacggcgttacatcattacatgtatgatcaggttaggttgtttatgccctgcagttcaggtaatacccacacaagaattgggtttgaaagtaacactagaaaagaaaagaacaaaataaggggaaggccggccgggggatcaaataacaattgattctttttttctttttttcctttttacatgcgcggtggtgcgtgcgcgtcacaccgccctttgaattttggttatcaaatctgcattctttttgttgtaggacttggtgatttaattaaatcttgaatatgcatgcatggagctgtaatgtataggtctcaccataatctctagagaaaatcccttatatacccctacaattttagctaatcccttctatatctctgaattttgtttacctccttgtatgcatccaaaatttgattttgatcccttctatacctctcccgtcagttgaccgtctaatttctataaaatgacaattttacccttttgatgaacatagaaatttataaattacattattgaaaatgtaaaagcttgctgtatgagactattatagttgtgtgtttattgtgcgatacattatctatgacaaaatttatttttagataatgaaataaaaaatatgtatttattttatttttaaaaaagtcataaaaaattaggagcatccatataaagataggactaccaatgctcacgatatatttttatgaatactccgataaaaaaaatccattgtcctattgaaatttcaaataaaaaattctatttattaaatttgttttattttcaaattttatgtcaaaatttcttgcactaattattttgtctcattagtttcgtaaaatgcacatattgtgcactcaaacaaaattttcaattgcttttcaagcatatattcaaacctaaatcctcaagggcataaaagacatttgcaaccaaacttaatagtgaaataaaggaaaatataacgggaagggcatggaagggatcaaattgaaatttcaggggtagagaagggatcaaataaatttcaaggatatgaaagggtttgagtgagtttttaaggctatacagggaatttactctaatctctgtggagtgcgacacgccatcttctttcgtcaagcaaccaatcgtcctaccgaattggctcatcatctatcacgccttccattcctcgtcaaatcctattaaattaatgcttagattttttttaagaaaatcctattaaatcatcattatcatcaattaattaattaattaatcaatgtgccattaactaagaacgtttaattgttaatatgtctgtccgggacgggagatgatctcacttgattttttacattttaactctttttaaaaacttattttataaatagacacttaaacaaaagacaacttcgacattgggcaaccgcgggcgcaactatgacgtccaaatctgtattagtcccactctatactctgagtaggccttccatgcccttcacatagcactctatttatacctttgttctcgtttctaaaagcattaacctggaggtactatatatgcttgaaatgaactgggtatataagttgacccaaatctatctacactctccatgtggagctcttccaccaaacgaacacttgggtctaaaccggaacaagaagagtcacggaccgaaacagactaaatgggctggattttacactctcactccctcatgggttgatgccctagcaactcaccgctacccaacagccaaatttccaggatatcccctcggtgctacggcattgtgcctatgcgtcgtgtccccctccacgggctaacacacacgcacacttgtgtaacacgggttgaagttctaatattacatgtaacactcgagagacaaaatcaacaatagtccactctacccgctaaatggacccacattcacattacacccaacttacacttttcatcatcacttttatgtaaaaatgttaaccaggaggtactatggttatatacacttccaatagatgttgattaaatgtgctagtatcaatttatgatttaggtgtatatatatcatgtgtctgagctataatatgcatgtttaattgcaaggtagttattgtcgacgtttgatgtcgcgattccggtatttgcatagtatggggatcgttggtactaggatatacgcgagactgaggtaaaagagatggggacgaggatttttatacaggtttggacccctgaattgtcaggtaataaccctatatcctgttggtcgaagccggttgttgctcttattcatcataatcacaccagtacaatatttggggtagcctatctaactgttgtcgacatggcggtctgaaggtctgactcgtagtcgacaacagggtagctttcctcctcgagttcgcatccggcgagatcagagacaacgctatatctctcctgatggtatctgtaggcaccataggggactagccatgcctatctctaaagtcgatatccggcgtcttgtcttggcgtatgttggcttgtatgttgtggtttctgttgttttgtgtatgttgattcttccctctcctcctaggggccttgtatttatacccataggtgtccccttgtccaagtagaactagggaaaccaatatggatacaatccgagtagtccttatcgtttctatgtagaactctggtcatccttccttatgcggaactcctcctatatctgaaggttgtttccgtataagacatggtatgtggtgggtcctgccgagatttagtcaactactattaggtatgtggtatccataaccctgacagttatatgcatttgttttttaaaaaaaaaatcttgcatatgctaattatgtttgtttgattaatgatgtaggagtatacatttttattacttgcttaaagtgcttgttttggttgaagggtagctatatttttaatttgttcctttttgtgaatcttggagatgtcaattgtgtttggttcactattcagtagtatttaatttttgatatgtgtttaagcactaaagtgactatttccttgtagcatagacatatccatttgtttgtttgtgtgaattccataattgttgattgtgctcaattcacaacttagtaggatttattttggtgatgcgtttcagccccaacatggatgtttgattccatactgaaatcttgttatggattgttgaacaattctaatgaaatcgattctcttttgtttttgtatatgttggaataaatataccaacttgatccaatatctcttgatattgaataatttctacccaacctaaaaaatgtggtgtattaattaattacacaaaaaagtgggatatacatttcaaaaatagatgtgtgagattatgttgtggtttatgcatattcttgagtgtgagtgcctcgcttagatttgttggtagccttatacactacgattgttctcaagagtaaggaattgaggttcttcgttttgatatgtagctcatgatttgcaccgcatcgtctgaatttcatgatcaacaaaaacatcttgattttaccttgtttagtgattaggtatgttctaatagcatttcttaaacaacatggcccaccttcgaagggtttgactattagttttattaatcatgaaagggatgaatttcattaatcagaggaaggtttttcacctttgttggtttctacatatctagtgtttttagtcatgtatcatataagatctatattttgcatcattgaggctatgatgccaggactactttattggttttagataagttttatactttggcacaatgtagaaaattccatcatcattcaaccagttactttagagtcaacctactagaatggtttccctggctaatcaaattagtaatacatggattgtggagctgacactttggaatttcgagggattacttttttttttgcattggtggaaataattcgttacagataactccattcagtgtggtcaatttttagtcttcacttatgataaacgatcacaattcttagtgacagtgttcgagccatcaggcattgacaagatgtcaacccactctactcacccttcaaaaaagatgatcattagaactaaaagtgatgaaagggaatgcaactatcacatcagaaaaaatggctcccgccattaaggagaataatggaaccgtaggaaagagaactagaaatgtagattgtcttgtgccttgtggaatatagggttccataaagaagttgtttgaggctaatgttttgaaaagtgataagagaaaatgtgcaggtccttctgttggtaagtctaaggcaacgtcaacaagccatagcaataccaaagatataatattcctctatttctgaaaatgttatatacactaatgtatttattttggcatagcttctcacatttgtttcattcatatagcatgtttaattgcattcttcatttgttccatgcatcaccataagttaggaggccatatgcagtgtcaaagcagtttttaatgtttgacgtggacttttggatatatatttgaccattcacgttattaaaaaacaatgcatagttatcatttattttatgtgatttgcttttatcattataaatacttgaagcatgacttacatttttgcatatgtgcacaaattgttttgaataaaacgaatggtcaatcatatgtccaaaagtcagtggggcgtcaagcattaaaaaccgaattgagtaattgcaaagagacctatatctagtctcttggcttgaggttaagttagtttatttctttcccttatgactgattacgaaagtcatttttgtacgtagttcatacatgttaagagtcctaagtattcacatgatcccccatcaagcttacttttgcacattatagattcctcaagctacatgtcagatgaagatatttgttttagcaagttgacaaagacaccagtactgatttgctttatgtctactaaggtgactccacgtggtaaattttaagttatcccctaaacgcagggttaataaatcacttttgtcgataatttaatgtggttacacttttcagacatttctaaggttctaagacatctatgagtaataccacaaaggcatgtaactgaagtagaaaaccatgctcttcaaagggcaaaagaatttaaaacctaataatcctttttaccgtgtaaataatgatatgttggatttttcatggtaatgttactttcatgtgttcattctcatcccgtattgaactttttttctatgtgcatgaggtattatctaaaaaaatgtggatgacaggattgatcttaacttgcataacggtactgcaactatagtttgagagttttggatgagatctaatttgaatatcccatcttgatgtttgatttttatgtatgtttattgtgaatgtgactgtaccaattgaaaaatcctacaactatataaatcaccaatttgtgatagcacattgtttttatgtcagaaacacaattttgtgtgatagcaaataacttgcaagattttcttggtgatgctagaagaattaacttccagcttctgcattatgaggcacatgtagccttacataactaagtttggtatatctaagtggccgtttggtcttatcgaccaatgattcattgaaattatatattagcgaaaatttaaacagatttttttaataatactatggccctaaagttaaacttctcaaactctttttaatctgctacagattgatatctaaatttaggacttactaggagatattggagacatatggccggtcaacatctccaaggtgatgggacgacagatggtggtgttggaatgagatggcgctgaccacgaccagtttgcgaggagggaggtgactacctcggtggggctatacaggtcccaccacacgtgtcgctgcggggtggggcacaccatctccttcgtcaagcaccccaccgtacccccgaacgggcccagcccacagcacgccttcctcgtctcatcaaatcctatcattatcattaatcaccatcattcattcattaattactgattaattaattatcattaatgactgcttagtaataacgagtcattgatttctgtatcaacgtttaagagtacaacaagagaagccagctataaacacatacttccttcctccgtactcgtaaaagaagtcgtttaggacaatgtttaagtcaaaccttgggaatataaatcataaataactctcaagttgttgagttcgaaaatgtaaaaaatatatgaatagatttgtcttgaaaaatactttcatagaagtatacgtatatcacttttcaataaatatttttatagaaacaagaagtcaaagttatgttttggaaaccgtgtcgttgtccaaaacgacttcctttacgagtatggagggagtattgagaagataaaagagtagagactagagagtagaagcagcaggctacagatttatagccagctatagcacagacttcaagacacaatgtatgtatcacatgtgggaccatgtattaatacggtagtatatgtttatagttaactattttatgaattagctattatagatgatttggagttaggccctgtttagtttccaaaaactttttcccaaaaacatcacatcgaatctttggacatatatatggagcattaaatatagataaaaagaaaaactatttgcacagtttgcatgtaaatcgcgagacgaatcttttgagcctaattagaccatgattaaccataagtgctacagtaacccacatgtactaataacggattaattaggctcaaaagatttgtctcgcggtttccatgcgagttatgaaattagttttttcattcgtgtccgaaaactcctcccaatatccggtcaaacgtccgatgtgacacctaaaaaatttttgtttctccaactaaacaggctcttagtagttggctatactattattaaacttgctccaatcttgtttaccgaatctggcaggatgggtgatgatgtccatgatccccttgtagatgtcgcagaagacgatgtcggcgccgggcagccgcggccgcagcgccgccagccgcgccgccaccctcgcgctgtacccctggacgagctcgttcgcctcctccacgcagctccggccatccacgacgtgcagcccctcccacatcacccgcggcgcgcaccccagcggcgccacccccatcaccgccgtcctcctcgccccggcctcgtacagctcctcgacggcgcgggcgacgcggtcggcgaggaggcgggcgaggccggggcgg

SEQ ID NO: 4968 - DNA, 10849 bp, Oryza sativa
gttgtgaactaaacttctgggcaatagcattaatgcaagacctgttcctaagttactctccattgacaaagcttttactgtcgtagtacttcttctcactggcttctttcttctcgttccgtttctgcaaaagcaacgccacagactaaaaatgaacaaaaccacagcacatcaatggaccagaataaataaatgcaaactacaccaagtccccacaccaaacaacatgttgctgagcgtagttatagcatgaaaaaattggtcccagagaaacagataaatatttaaagcgcatatgcaaagggcttcaagaaaacactaacacattatcacaaacatcggtttataataaatcatgtacacacatcattaatatgaagtagacaacaggcaaatcgcatttatttgactgggattatgtactttactacatgctgcatgcaccaaacagaaaaaccagactccaccagccaatttgacgtagcaccaatataccatgttacatacctggtaggcttcatggttagcaactatcctccttatgatagtactagtagtgatgtctaaagggctctccagcctacggtagatgcccatagcccttggaacagcatatggatttaaatcatcctgataggtgcacaagtaacagttgttaatgatcaatgctatacatctttatattctaagaaaatgtattgtgtaagtaaccttcataaagtccatattctcagcaattgtcccatgaacaaccaacgaaatattaaatgtggtaatctgcatagaaaaaggaaattagctacctccagccacactgcaaagacacataccctgataatcataagtaacagttaagggtatgaatttcagatagtcaatttcaatgataatattgcatacaaatacataatctggttcttaacatatctaacggaaacttagactacatcaaattaaacttttggaaccaagccagctcctaaacttttagtttatttgactgacaaaattaacgctacgtgcaaatcgtgcatctgcaaaaaatcatggataagcacaaatcagaccatatctgttaatctgtatctaaaatcaataatagctgtgagcaaggcttttgctggcgtagcataaatatcatgttcaatctttgaactgtgcatgcatagctgtgccatgttcaatgaactattactagcagttgcatcaagcaattcctactacagtaagagagcatcatgataaagtagaacagaaaactaaccatatctttcgaaacatcccatggagcaccaatgatcacttcatcaacataacggcaagccaaaacactcaaacttctctcatggaggttcatgattgggcgatgtggtcctcttgttgaactggcaaatacagtaaacaccaagtgcccccaaaaacagaatgttatgacgacggaattgagtagagatgctatgcttcaatacaaatacaacctgactataaactaagatgcaaaactgaaaaacagtacaagcattgtaacttggaaaaattgagacagtgaaaaaaaaaaccatcattattaccttatagtctggtctgtgtgaatacccacaagcaggaaatctccaagctctcgagcgaggcgcaatatctaagtagaagaaactataaatacacaggaagtccaaatcactatgtcttagaaagatcatttcagtttgcacccttgcaataagaaaaagaaaaggaaaaggaaaaccacaggtaaaaccatacaaccaacaaatgcatagccaagttgctctacatgctgagacagacatttgacattgcgtttacctcaacatgtccagcatggaatagatcaaatgcaccatctatgtacactatccgagaatctggacctggaccctgcataggtaaagctgacagtcaacagaaagaataagtggccgtactcagcaagtagttttatctagtgaatagtatcaaatgtaaacagcttgaaataaatgataaacgactaatgcaatgattaattaatagttgagcttagcagcatgttagttcttgttggaagttcaaggatataacttatattctttattaatataacctcagaacaaatctaagttgtgaaataatccatttgtcgtcaggtcattcaactcaatgtttactagataaagaatgcaaccaaacaacaaatgtctttcaaatggcaaaagtaatagtaaaatggtaacaggatcctgaaagccaaataactcgtgctctactgtttaaaggcaaaaaaaaaaaaccatctatgaggcatttttatgctgtcaatgtttaattcatgccttcaaaaaatatgatatctcaaaaaaaaatgacattcaaagttttacatgagcagttcagaaaatgatcctccgtgaaagaatgtaaagagctgtaccctgctatttgagaactgaactattctccgagatgtaggaagaaaatgagatatcctagttccacttccagatccactatcatcaattttctggccatgcccgtgactgaactgcctttgtagtgaagagtggttgtgactatcagaagctgatctctctctaacacaaagaagcattcttcctgtagtttatttactagaaagatgagctgggcagttagcatgaaaataaaacctattcatgaccataagcaatttattgatacagaagggaattatgtagttaattgtctggagagcttaatagcttatcagttcatcatatgataataaagcaatagtttgaatgttttcctaaagtaccacttcaggacaaatcaggtgggcattgatcttgtctacaaacaattatttggttgacctataaataattgtaatgttggaaattgctatggtattgagccaaagaaataacttgtaaagttgtagtacataacaaaaaccatatattcccttgcgatggaagttttaggttaaatttcactatgagtaaaaactttaatgattaaaacagaaaagaacagaatcaataccaacaatgtctgtcgttgacactccttcggttcttttaatctgcttatatcgaccaacctttttggcaagagcatatgcatcagtaccatctgggagcagacaaggatcatcgccatgaatgatataatctatattatactcattgaataatttattcataaaatcttcagttatggcgtaaggtgcatctggaatgacatcgtgcacccattttacagcacggaccattatcaacctgtatatcagaaaaagaaacataaaaaaatcattccaaataaaatggtttttttaagtagaaaatatgagtatatgataatacataatacattcaaagaaacaaaactgcaagtctaaaaggacaaaaatgcccaaaattccatacggcctggggtcacacgtaagattggtaacacaactaaaaatagaaagaaaaaaaaaccaatatgtgcagtaactcctaaactggaaaaccagacacaatgaaagtcagtaaacaacaaaagaaaaccagcaaaaataacaaatttatagtgttgctaaactaccatgatgatgattaaatgaggaaaaaaaggttgcagcgcctaacatctaaaatgccacacataccatgtcatatgtgagcagcttgtgattatcaacaagacaaaggaaagcaaggaatcacttagcaggtacttaaggcaaactaagcagaaccaaacctgcaagtctagtatggtttatcgttaggagttaataagttttttggatttgtatgaatgtacagaccaaaaagtcactgtttagtacttttcagcggagcaaaccttttttttttctgtgtttctccttcaggcacccaaaagaaatagagctaatctttttggttactgcacagatattgaatccatactctcaaatgaattagagaaacatatgcagctcatccaccaccaaagttatcagaaacttggtccgacgactaactacaacccacatgtcacaacatttcccttagcaatttcaaagtttccagatagaattactggactagtgctcaaattaagaccgacggacacatatatgatgtgtggggggaaaacgttgcatcttcaaaaactaatctgaggatatccctataaaagcgctccactagtaacttgtattgtgcaacagtacattgaacgcaactaaagagtcgaaactgaaacaaatcagcgtgtgatacaaattaagttatgaaatagtaaaagcagtaacatattccccatgattaggacagaatcagtgtgcagctgaaattgaaacagaagataggaagtttgatgcaacagcttctcagctaacccattaaaccagcaaaagatcgaacaacccacaacagttacccccaagaacttgaaatgtccacagaaaactgcagaactagtgcacaaattgaaactgacgggtacatatgtagaggagaattcactacctataaggctaatttgccattttgcctgaatcattattaaagtgcacaaccagtatcaggcaacagtttggtaggattacatcgtgcatcattcaagattttttttaaaaaaaaatgacgaagggtatggagtgaacctctcgtggagcggcgtgacgggcgggcccttgttggcggtgatctcgtcgtcgctgacaacgccgacgatgagctcgtccccgagggcgtgcgcctggcgcagcgcgttgcagtggccgtagtgcatcatgtcgaagcagccatccatgtagacgcgcacgggacgtcggcgtccgcggcggaacctgcggcggagcgcgtcgacgggcggcagggcgggaatggcgacgggcccggcgaggtggagcgcgaccacggacgcccccagcacgatcccgccgatgacgcatgccgccaccagcttggcgctgctgctccccgcccccgcctccataatgaattgggagattgagcagtgcgagaaggagagagacaggaaggaagagggagattggtcgtgcgcgagagagcgtgggaggagggatctagggttagggattggggcgcgagggtggaggaggtatcgccattcgaggggagggcgcgacgcgaggagatcagggagatgcgggaggggagaagccgcctctggttctctctcttgtctctccgagctccgcgagagagatgagagatgaggggattcgctgccacgtgggaccgacgagtcaattagcggggcccacatggcggtgtgacgtggcatagcagaagaagttgccaggtttggcccacgcgtcggggagggagctgtttttatgtactctgtactaatccacgtaaggcgtcgaaaataaatacgacattagcatgaggatgagggtttatggattggttcagctaaccgtgttaaagaatgaacgtcaagaaattcaaccgatggacaacgatatgtgtagctaaatatacttgattgattatgacgttggatatgctcaatatatgctgcttcagttgcagccaggagccagcattagggcatagggcatgtacaacggtttttattagtggtctctttctattactatgcaagtaaatttgatgacatggaagaaagagaaaggaggagagaaaaatataattgttatgcatgacaacggttgagagtcgactcttagcatttattagagtaaattttgttgcatggtggttaaaaaaagaaaacaagagtaagaaaaaaaatattttgatacattaatggtagagaccatattgtctctaactgttgtataacgttagattctatatagtgtagagctcatatagtctctatctttgtacatgcccttagatgcgatgtgagcccccattccgtatgcaaagatatctcaagtggaggatctcaaaacctgaaaatgacactttttgtacgtctttggttctgttttctacctcaaacatgctacttaaagaatactactatttctttgcaaaaggaaaattgaacttgataaccaaagaatacaagtataattcagctcagtggctaaaaagttctctccctgagacaagtatgagtgagattaattccaacccaatggtcagagaccacatcaccatacggcaaactaactacgaaatcaatatctttggaagccggtccaatctgggaattttgtgtggttgttactaaaacccagcttcttcttcttcctccctcattcacaggcatagcgttttgttttctactcatttatggcgtcgcgcttgtatgccatgctacaaacacgaaacaccagcaaaatatcatgcgtgctggcaacagggtaacagcgaagaagaaacacagtgattagcataaaaggaagggctttttctacagcaaactgaatttacaacatgttaaaaaacgagtacactacacaaacaggatgtcagcaaaatacagacaattccgtccaaactgcggtcaaagcgccatctctgcttgaagtttggtcagttcagccaaatcattggctggttgagtagtcgtaactctcgctgaaggttccatacttgtcctctgaggtggttcaggcagatcattctcgagctcttcctcctctagatcttccagctctgcttctagctcatccttcatcagaataaataaataaacaaaaaccaagtcaagcatcttatgaaaattgacaccgtgcctgtttaaatgcatacatgtatttacatctccgtggaatggctattttgaattacataacttgatcttgcaccacttgttaactgacaccaaaggggaaaaggaaatatgagcagtacctcgtcaaaatcagcagaagcgccaattggtgttgcaagggcctcctgtatctgcctcatattctctgtgtgttcatttgcctcttcaatggcattttcaatgtcatcgatactcctgtggaacaatcgtcgttacttaccagtttatctaagtacatgttattttaaattaagtttcaacacattggctacatctaagctagaaagatatattatgtattcataaatggacattgttgctgaatttaactatgcatgctgtaagtttgaaaccatatttaagttcacattgtgcacacaagctcaagaagacactgctaggctagtaccttttcgcgtcatattactcaatttcagaaaccatgattggaaagaagagagcaaacacagacttacactgactggtgaatagctttgacagcagatgatccagagcgcaaagcatcaacagtatctgtggttgcctttgcactctcaagcattattatctagcataccaaaacagactacttcctgtcaattcatttcaaccttcgagaatatccaaatgcttcaaaattcaagattaatatgcgcacatatctttcatcacctgatcatgaacccgtaattggaagtttgctagctgctcaatctgtgtttcatacaacttctttttctttagacattgaattgcagctgcaacaaacaggaagttgtttgtcatttaactaagagaaaagtacattttattattttaagtccctgaactctatcaaagcctaaaattcgtccctaaacttcaaaactggacattattcatccctcaactctttaaaccttaattaacaaagtcatcacaagcttgagaaacatttttttcaacattaaggaaccataagttcataaccatatattcagggaatggtatatccacatatgcaagcatactaacccacaatttttctcccatcttatacgtgaggtatggattatgtgcaagacatgaacatgggagattggtatttgaccaaaacacaatggtcacatattgcacaaccaaacatatttgagaaaagttgtgaaattcttcaagtgttaatgcataatccaaaaaaaaaaaaacaaccttaggtacagcaaaattatcacaaaattgtaagacatgcgcagtatgtttcttgacaaacaaataagtttcttcgacgaaatgcctaccgcttttgttcttagcttttgtatagtccttagctctttcgacttctgcagaagcctttttctgaaggaaacactctttcttctccagcatttctagagtctacacatttatatcgtattaaaaataaacaactgcaaatggtaaaaataagatagcaaaataaacatcttcggcaatattcataactcagagcaacttaaatttatccagttaattacctagtatcagttcgtcaacatataagagaaatgtcaactttatttcagttaagtttattatgagaaatgacaactttcttcaacaatacagaacgtttattatgagaaatgttgctttctgacattaagtatgagacagaatacagtaatataagtcgcagaggctgcagctcagacaatacatcgacctaatttgaagtttatttttccttttcgatatatgattaccactccggtcatttttttgtgtgccaaaacatactttatatcaatgccatcagaagtgtcaggatcaaatactttcttttattatgtccttaaaacataaggttctgtcaaaaaattgactaggcaattcggctgaccaaacctcaaattcaactaagtaaaatcttctagaccaatggtaggaaatggtcaagataaacagatatctagttttgtccatgtcaaaaaataacttaacagtatttttatttcatactttcttctagaagcccattgggaacacgaaacattcacatttctgcattcaatataagatgaacaaggttgcttcataagattgtttccatatttacttgggtgatgcatagtaatgaggatctgcattacttccaagtggttaattcctaattctagagtctacacctttttattaacaaaaactaattagagatatctccaaattgtgcttcctatcttgttgacagttgcttaacacgatacccctatagcagatagatttcttctgaggaaacttaagtaaagaaagcagcaatgaaaactagcaataataagcaaaaggaaaagggataaacaacctcatgaagcctatccaaagtggggagggcagaggaggcagcctccttcttcttcttgctcttgggctttgatagcagtttcttcagcatcttcttgtaacactcacttgatcttcaatctcgggtgacgatagcctgtgtgggaataaagaggtgaatgatgaatgtatatagcctctccagtaggattgaagattaagagaggggaaggggaagcaaagggaaaggtggttggaagcagattccttgagaaaagtaggaaggaaaaggcagagatggccaaggaagatagagaagggcatgtctggttgtctacttatgaaaaagaaaggatgacaatatggtgaggtcactattttgagatacatgcttgactttttgtttatgacaacttatttttagaaataaatatatcttcagagacaaaaaaaatgaagttttgttcgtacaagcgtaaaacaacataattatagtgctcaacactgtaaaacctcgaatttacaactagtggagattttatgcatagtaaaagatgaactgaataaagttcatgtcaagaccttcagcaaggcccttcccaaaaaaaaaaaagatttgcttcctccggttcatattataagtagtttgactttttcgtagtacaatttctttaggtttgaccaactttataggaaaaattagcaacatttatagcaccaaactagtttcattaaatttagcattgaatatattttgataatatatttgttttgtattgaaaatgttagtatatttttctataaatatagtcaaacttaaagaaatttgactaagaaaaaagtcaacgacgtataatatgaaatagaggaagtaatagtaaaaggactgagacaattctgctgtaagtagtaaagtacaacggttttatttagaagacaaccaacactttgagcttatcagaaagtgtgtattaggtatgttggattaggtttgccttgcagcctagatattttggcatgatgttgcgttcacgattcaagtggttagttgttcgtactttacataggtaatcttgacaacagttgtgattttctgtggtctgcatcctacacaatactttataagtggttgacctgctgtttttccattgcatgcagtgatgattaaaacttgttaattgaactttttgccattttactaatgtgggtgaactgcagcttcctaaatttgccataaaactaaaagcaacataaagctgtattattaatccatttttttaaaaaaaactgaaggatctaacttctgcaagcaagtttttttttacaacttctagatgccccagctactccccctgttcatctgtttggctgcaaaattagctgagggacggctctcccaactcccaggtcccaccataagaagagaacagcaaacactgacgaatgtaaaaaaaaaaaaaaaccaaaaccaaaagggaggtagctcaagaataggcatgcaagatggaaatgcaaatctgaaacatccacatggtattcccagacctaggcagtatattaacgcgaggaatagaggggggaaaagaagcataccaaccttgaccttggctactggctggctaagtggctagcaccgcattgagtgacggagccgtacagccgcacaagcctgaggcctccgctgcgccgcccgcggaagaagaacaagtccggtccggatgcgctgttaacaacctcggcgagtcgccctagaccctagtgcactggctggctgcggctccgactcctcttgtctctgcggtggcctgag

SEQ ID NO: 4969 - DNA, 1765 bp, Oryza sativa
  unsure (1)..(1765): unsure at all n locations
aggtcaggggaataaatatcaaacaaataggctcttttcacatgattcctgtaagtaacgcaaaccattagtgtctgcgttttcatgtgtggacgcaaaatagttgcctacatggagcgccacgtcgtcggtcagccctggtcgaacaaggtttggacctgctgtgtttcatggacctaaacgcgcaattttcaagtttacagacctaagtgacaccactgctcaagtttaaggaccgaccatgcatttcactctaatcggaaacctgtaccctgactttttatatttacaaagttggatatgaagagatgatcatcctttgacactataatgctttcatcctttcacttcgattcttggatcaaaataatctatgcacaccttactccttttctatttcataggtattcagcaaggatcatcgttgatttctgaccttcaagggcaggaaacagtccttaagcagtgcattgagcaacttgaaagtgtcaacatggctagaataaccctaatcaataaactaagagaagccctcagcgaacaggtcttgagcactttttatatttttttccccaaatgttctaccttgaaggcatactattacattcataaagctttatgttttttctttttatataacaggaagcaaagtcagagcttcttcgcaatcagttgcatgtaaggattattcttttatgcattctcacttgttagtatccttgttattacttcatctttcactgcagaatcacatgttagatctttctatttcttatgccatgtctgtaactcaattgcaatggaacgttaaggtcaaaattatgctgatcattttcatggatccataagcttttgtttgcctagcggcctagcctaagatgccccatgagtccatggcatgtgagcacaaccagagttttgctttgtcaaggacattcattcatgaatttatatcacacatgttcaggatgagtagagctaggaaagacaaaagcaaacatgagaacacataagatgcacattgtatgctctgacacgaagagaagcctctaaactggatagttgctgaatctgctgtacgattcagctctatgatggaagtagtagactagccatggtctgcttgggcagcacagatgatctgtctcatctagtatcctgcttgaagcacaaacctgcctcttagttaccatggcaaccctgaggccttctctggataacaaggcgacatgttatttcctacttattagactgcttctcaattccaacttatgtttgcaactttgcatatatgacattcctctctttatctgtttcaagagaaataggtccagcacattgggaggtctgactatctctatagcataagctatacagttaaggtggcccttgcatgagctaatagaaagatgtgcctgcagtgatgtacccatgcatatgcgttgttattagttgtaacctaggttctatgtagctaacctgctaactccacggtacaaacatgtgtcattgcatcttagttggaaatttccaatcacatatttctgctcccgtatgtagcatccgtctccgctggcttttgttaacattgctatataccatctcagttaaaaccgcagcatctttcctgccactgaaggggtgttttagcagctactcaagaaattatttagattgatttttggctaaccctgatttaattgacagggggatcctctagagtcgacctgcaggcaggctaatatcagctatcaaatnggacacg

SEQ ID NO: 4970 - DNA, 5220 bp, Oryza sativa
tttcctgcgatggattgaagatgttcaacaaccacttcctgactatcatcatcattccccaaactatagctagcaaaccccttttttgcaacttcaaggttgcattgcactgcactgcacaagccaaagggggtagagaggtcagtgtctttccaagctgacctcgtgccagtagctccccacactagcacaagagaacaagagacaacaggtccctctgctggtagaaaaggactagtccttctccttgggggcaatggcaatgctgggccctggggacaagaaaagattgggccctttgcttgctcgcttggacccttgaagccttggaggagagagaacatgagaaagagggaagcttttgtagtagtagcagtagaagaaagaagccaatgccatgcatcaccccatcatggcaagcaggcaaaggtggtctaaaggcattgttgggaaacaaatttaaaagcctgccttctctccccactctgcctgaccccaatcccaacccctctctcactccacaacaccataatgagtgtaaagtagtgtaagtataaagaagcaagtgattcatttgagggtaattgcatcatcaggtggatctattttccaacccttgaatgaaagtgatgttcaagattgccacattggcacataaccaactttggaaatgtgactaggaagctaaatcagttactactacttttaatagtgaaatatggcattggttggttggaaatgcaggtgcccagtgccaaaaactgccactctttagcaaagtaaacaaagtatcaatgtgtagtaatctggcagtgaataaacaacaatcattcagacatactactattttgcataaagctggtaggccaataagatgcagacaaatggtagacaacgccagcattagaaggaagggaaaaaaaacatgtgaaactaggaatgttaccaactcaaggcaaatcccaaccaaaacattcgtgatgatattgtaatgaagaatatgcaagacaacgacatccaggtaaacaatgcccaagaagcctgtttggcttaggttagctaggaacaaaaaataaatagcaaaactagtggagtgggatttcttgatggggatagtcaaataagaaaatcaccagaatctcaatcgtgtaacgtaacctttgtgataaagaaacatggaaccaagctgatcatacaaaaaggttatactggccgaagtgtccaggaagcaagacttttaacaagctaaataaccatcacggacggaaaggtgaaaatgatgttaaaaagtaaaaccatgtatatccagtagatgccggatacaggaataagtgaattccataataagattattgtaatgcaaaaatgttagaaaagtgatacaccaatgtctaaatgagcagtgtaggtcagtggtttcaaatatttcagaagaaaagaattagcaggatttagatggcatgaactaaaaccactaacatcctgactttctagtacacaactactgtgctacccatcattagttcattgctgatgatttggcattcagaaggagcacccatcaatgatcaccgaataataagaactcctgtgccacccaacaatctaattgaactcactaaccaccagatatgatcattttgtgatcatatgaatttcatgtcagtaaggatccttttgcgtgttcccccaaaacaatgtcagcaaggattaagcactacaaaattgcaaaataaactaaattggacagaatggttaactggagcatgaacagaataaaagctaaagctaagttgcacattagtaactaccactgtgtggagatctgaaaattagtgatcagaatttttttttatttttcttttctcagaattgaccaaattgagcagctaaaagaagcaaaaggactaggtaattgcacctaagtaagatcaagtgatacttcagctctataaattccccctcaatactaacgtcccgaagcctgaattgggcgccaagcagaggcagtgagaaggcacagatccttccatccgagcttcagagcgccattctcctcaataagcgtgtatccatcggaagggaacatcccaagcagcagtgcagcctgagcagcagcgcttccagcaagcgacgacacacggaagcccgactgcgcaagcttttcgcgccagctcccaaacttaacatcgccggtgcgtgctggaccgcccacggctagcacattgcggatctcccgcgacaagagttgttgctccacgacatgccgattcgggctatcctcgctgtaactcgcatcaagcgagtcgaacagtgccgaatagtagtggatggcctccacaaaacgtgccaggaaggagcctgagtggctcagatcctgctccaccattgttacaacctttggcgccaacctgatttgtgtggtccacagagtcaagatcagtacacaaattaattatgattctgttcgacaagaatgactcaactagcaacatttagaactataaatgataacaataagttctcaaggacacctaaattggttgccttgccttcatggtttttgcaagtacagtgggacatatctattgcagtccactactatgtgatctctagtatgaactgtgtatagattgcagccatttcaatttaataatcaacattggtggcacttagaactagaaagctgagaccttttggcatgaaaagttggtcatgatgataagaacttttagctcgttcatagtgatccacaaaccaaatggaggagaaatctttcccacttctcggatcaccaaagaccatggagaagcttgataccacagaaccactagaaagttgcaacctttctaagcctaaaaagttggccataatgacatacttttaggccagtcacaatggctagtgtcattgcacggctacccaaaatattataccatcttctctcaaatgaaatcttttatgaaacaatccccacagtggaggggtttcactttgacgtttccaagactaagcaaagcatttaattgatacaagttgctgggatcatttgtacccaaaatccggcgcggcgcgggagaatgcggaggtcgcacggcggaggcggacgcaagagatccggtgaatgaaacgaatcggcctcaacgggggtttcactctgttaccgaggacttggaaacgacgctgacgagtttcaccaggatgaaactctttccttctctctcatccccatttcatgcaaataatcattttttattcagtcttacccctattaaatgtgcatgacacaccagtgaaacccccattgtgactggccttagggctccaaaacgcaaatctttttttactcctccttaatcatcctatggtgatctagggctagtactactaaccactgatatgatgatgcatagatagagtatactactaggtcacaatgtcaatgagaagtatagggtgtaaagtagccatgattccggggggtcccgagttgacaagggaagagagaagaaaagtgtagtacctctggatgagccagagcgtgttggagtcggagccggtgacatcgtagagggagtggcgcagccagtggacggcgacggcctcgcggcgcgtgacgcccagcttctccgggtccagattcccggccttgtcagccaccgggcagaactcgaacggcaatcccagcgtgtccgcgaagtccgacagcctcttccccgtcgcctccagcgcctccatggacgcccccagcccggtcagcctcaccctcggcggcccccccggccgcgacgccaggatgtggaacagccccggccattggagcccctgcatgatgtccaggtcgatgatgtgcaccctctcctccctctcgaacgcctcctggatcgcctggttcgccgtgaagtgcgagaacttcacgaacgggctgatcccgttgaacacctggaacgccgccgccacgcgcccgtggacccgcgcgcccgccggggacgggctcgggagcggcgcgtacagccccaggcacgagctcaccagccgcgccgacatggcctccgcgaagtaggccgccacgcgctgcgtcgaggtgccgaacggcgtggcgagctccgcgatctccagcagcgcgcggtgcgcctcgtccaggttgtccgcgttcaccgactccgcgcactggagcagcagcgtcagcaagtggaggccctcctcgtcgcgctgcttccgccgctgctcctccttacgctccttggcggccgcggcagccgccgctgcggcggccgcggcggcggcggcggtttcctccgcggtggggggcttcggcgactgcggctggttgggctcctgctcctgacactgaggctcgcgacgccgcttgtcgggctgcgctggcggagggggagggagcgcggcgaccgacgtgggtggtggcggtggcgccgtggcgtcgggagggaggagagcaggatgcgacggcggcggcggcggcggcgcggggtcggagttgaggagagagcggaggcggagctcgaggatggacgcgaggtcggggttacatggccggatgatctcacgcacgttgtggatgagctgcgcgacggagaccgcggcgccgctgctggcgatgatgtcacggatgatgccatccacccaagccgtgctgggcggcccaccctcacccgccgccacctgttgcggcgccggcggcgcgggcgcggcgaggtccatgtccgtgtggtggaacgccgggagctgcgtgggcagcgcggggagctgcgcgctggcagacaacgtcggcgcgcccgccgcggcggccgtgacatcggacaggtcgccggtgacatggcggcgcggcggtggcaggtccatgtcggaggcggggcgcttgcggaccatggcggcggcgaggtggtgttgttcttggtggtctaggtagaggaggagatggtggtcggaggggagaggaggcagcaaggaggtgatggcatgagaggaggaggagggagaataagaggagtgggtggcggaggaggaagaggaggggaagaggaggagggaggaggagcccatctacaaacgccaaggggaagaggccgtgggcatggcgagcggacgggcgtgcgcgggaggcctaacgcttgtgttgggtggaatttttatggaatttggcgcggcgcaagcgaggcgatggcgcgaagggggagtaaagaggaagaggccgagagg

SEQ ID NO: 4971 - DNA, 10072 bp, Oryza sativa
ttttgtggaccaaggaaaagagtttttttttcaatggaatattcccaaggaaatccatgagaataaaatagaatggtgtttgcttgcgcaagcatgcttaattaatttgttcagtaaattcgaatggcaagaaaaaaagattgcagtcctggaaaagatagtggaagtaccaaatgagcatttttctcaaacagcaaatttgtgccctgagattctcacttgtaagataactaaaacaaaagagtgtgtaccttatccatctttccttgcatgtcaagattcaaaacttgagagtgatcatctccaaagctggttcatgaacacatatgctctgctccacgactccaccagcagggggttctggaacaattatagaaaaaagatgggttgggaaattagtaacaagtattgaggatacaaaagagacgtgcaataataaggcatagtcgcacagagccacagaagtagtatgtcaccaccttgccatgctcgtttatttgttgttagtgcccagcatgctccctaatctcgtatctccacaacaggaatatgggagatgatgtgccagtccttcccgaccctatttttgtaatgcctactcaaggtagggttgtaactaatcaccaaatgctgaagagaagtaaggtgttgtatggagctgggcaaggatcgaaggccagtgcagctttgcatataaagcgatcggagcgcggagagttgtctgagtgactctggcagcacggtgagcatagggcagctcatcaagttgatgtgccggagtgaggtgagcccctgcatggactccaagaagggtcgtaaggacaggcaagatattgatcataaggtcctctagagaacctaacatccccagtccttctggcagcttgtggagggcaagacagtcctgtatacttaggtcttcaaggttggtaagatgctgaattccctcaggcaactggctcagatttctgcaactagaaatatccaattccttgagggaggtgagatgatttaccacctcaggcaactccccttagattgtcgcattcaacaatagccaacttctccagggatgtaaggagcatgatcgacttggggaggctagccaatagtgggatttctttcagaactagagtttgcagagagcggaatccccccagccactctggcagcatggcaagaactgggcaacccgagatacaaagatactggagggaggtgaggctccggatgatctcccctaattgccttaggtcactggaataaattgacaaggattcgagcccggtgaggttctgcagcacttcccaacctgacgatgatccagccattcctcctagttctaatttcttgaggtgaggggaatccacactaaagcagatggatgaggattccttgtcaagaggatggagcggatgagagaagctaacttgagacagcagctgctcgttgcttcgttccagtgtcaagctatccaaatatggtgggaaacatgggcattacttcagcttaggacaatcactcatgactagagtggataggaaagggaagcagtgctcaacttgttcgtgatcaatacaacagggctttccttcctccccacttactaatgcaggtgagcttgtccacaactccaccaaattaggcattcctttcaatacaaaagtattcaatgaaggcaaccgtgcaagtccttgcagattctccaagtttggaaattgttccaatacaagtttagtcagttgagtgaaatgaggtggatcaatttgctctaacaagctatctgaacaagaggattctctttgcttcatcatccaacgtgagaaatgcttacctttgtaattatagatattcagcttcttaatttgtgatggtggatcaagaccattgagcacacgcagctccttttccatatctaataatggctcttcttccagactatccgagcacccttctgcaccatttgaagaccaatccaatgtcaaattgagtataccactcttttccttcagggaggctttttctgcatcatctggatcctctacatatttaataatttttatttccagatcattgtcggttaacaagttgaggtttcgaagccctgatattgttgcatgctcgctactgccacctataacaaacaaatgcagcctttgaagatgagttagctgtccaatccctactggcaggccacccaaattcgagcatccttttaggttcaaaacttcaagcctctctaggttccctatgccctccgataactctagcagcccccagcagttttgaaggtctatgtattccagggtgctcaccaatgtgaggcattgcggtagtctggtaatttcggttccactaagtgtcaaagtgcgtagtttatgacaagcaaatgaactgaacaagttgtggataccctcaatctgtgctaagttgatggactgtaagttgcaaagcgtcccaaagaattctgaccattgttgcctcaaagagcgacaatgcataatgttaagcactcttagttttttaattttacatatggagtttggtatctccctgataccactgccacgcaggagaaagctttgaagattatgacagtcaccaatggactgaggcaaactttcaagatccaaaagacatgacaactctagggttctcagcttcttaagcttaccaatagactcaggtaatgtggtaagtgccctgcaatatgtaacatgaagggcctgcaagttccagcaatgtgagatttcttctggaaaggctcgacagctagcgtgtgagatacgaaaatagctaagatattcgaactttggtatcaatggaagcaacaaattagtagcgcccatactctccaaaataatagaacgaacatggcaccttttcttgattggcttgttgagtgcgaagttgtcaccagaaatatagatagcatggaccttgctaaataacttcacttcaatattctcattgcacgaagccaaagataaatatctgcatttttgggaattaccaatagttgcattctgagaatgagacaccatttcaccctgtaaaatttgccgagtaaggtcaagaaccaggtcatgcatcttgcatatttccatttcatcatactcatctacctctagatcttggagaaagtgcactttcagaagagaatcaaagcagtcatttgcaacatcctctacttgttcaatctcattcattggattgatgaagccatttgctatccactctccgatcaactggtgtttgtagatcttgtagcctttaggaaatatagagcaatatacaaaacattgcttcagatgatcaggcagatgaaaatagctcagccttaatgacgcaaacactctatcttctatatcatcaacattccacatgttactatcacgtaaggcacaccatgcatctactgttttcttgttacggaggacacctgcaagaattttaattgccagtggcaccccaccacattttttaataatctctcttccaatttctacaaattcagagggcagaccttttgcagctaaccttaaactttgttgaaataaattccagctgtcctcatctgacaagaaagccaacttatatgtacatgtagattccactgcctccgcaactccctgatcacgagttgtgagcaaaatccggcttccaggtgatccactcttaagatatagcatgaatcgttcccagtcatattgattcttgtgccaagcatcatccaagacaagtagaaacttattcccattcaactcgtttgaaattgcttcaaccatctgttggtcggtacgaagatatgatgttttctttaaaatggcttcatacagcttgccgacgagtttgttattatcaaattcttgtgacacgtgaacccaaaatattgagccttcaaaatgctcttttattttgttgtcatgacagatgtgtgtggccatagtagttttaccggttccaccaagtccaacaattgaaactattgagattttctgttggtcatctattaacttacatatgatcttgtgcttctcctcatctcacatgtatttttgagtcatcaacattgcccaataaggatggctcactgataatcttgtttttatgaacattatgatcgattggtatagcattcaatatagtattgacatcgcctctttgctcgacaattgcagcaaatctgtttttgattgtctttatcttgttggccattttgagttgaaacatggctagttttggttttgtgcgcatgtatttgagcacagcatacttgtcacgatcattatctgtgtcatgtttctcagactgaagatgaaattcatgtaccaaatcttcaagatcgtaagcaaaatctttcaatttttttagccaattagatggtggtttattaccaattgcattatcacctgctacctgtagcccgcttttgatctcctcaactaaatcttgaagctcctggagatctttcgtaacacccataagagaactatactctcttattacaagtggtgctaacttgtctcccacaatcttaaataatccatacagcagcttccatgcccatatgtttgaaacttggaagcttctctttggcccaaatcctacatattaaatttcagaatgagatgctacatactgaatttcaaatgattcaggtgcaatattcgtaattattttttatgcaatgaaaactaacgctagtatatgtttgtatgcctgattgttattttctttctaagttcaaccatgttttacacgtgcagagcaagatagacatataaaagcgtaacagatgacgcccggttaatggtacctgatatggaaaaataggtgttaagcctttgccttctcttcgttgaagttgtgcttcttcgatctctttgaagatgcacttgttttgttcaattgttcataacatcatgatgaaccaagaggtacatgtatgtgatatattgaggacaggttctgatgtatatacaagaaagcaaactagtaaataacggaagatagatgcccatgaaagcttctagcacacaagaaccatcagtaagttgtgtttctattgaattgtaaatatccgtacttagtagtactgtagtagagtactagctccctgagaagaggcagaacaatcccctgagaaaagctgaacaaaagacaaaccatttgcaaaagagattagtggtggagtagattttggagaacacattatcttaacataaaaacgcgagaaatttagttttgaaggatacaaaagctgaggtaattaaacacctgatctcaggtcgtctgacttgatcctgcagtatcccctcactgtcccaagcaacacaaataacacctgtttcttgggatttagttgcagagtggtggtggttctggcagctccattcattagagctcccttgtcaccttaaaatgtgattagtatccaccaatttgggttggtgtagtgctgggtgagttggaaacacatgcccacaacatataatataaatcgaatatccaccaattgcagtttaaatacagaaagctggtgtggaaatgtcactttcgaaaccactctatggcaagccagtcaaagaaggacgatcctcacaaaaatcatagtaataatctagttttgcttagctgttggtagtcagatgggggctgtatgaggacagcgatttctagtttggggctgtagttgcaagttgcagatcgaagtatcgaacaagttgagctcccccctaatagatctagtctgggcgggccagggagagagagagagaaaggtaggcgtgggggatcagggatgcgatacctaacctcgtcgtggagatggaagacgacgaccgcgcggctgcatcgttgggccatgcgtccgcggcagtatgcggatgggataggagccggaggcgaagggaggggagcaagccgtgagtcctggcggcggcaaccggcagcaacggtcgcgcaagcggtggccgaacgattaacattggaatctgggttattttacattctactagcatagttttagagaacttactttgtaaattaaccctatataaaattatttcagaattagaccattatctcgatgttagtgaccctcgccaacgtacaatgtctcaacaccaacgatattagtattgacacccttatcccccccaccccccaacagtcaagatgtagaggatcagtgccactaaagagattatcatcgaggacctatttataaaataaattttttaaaagaggttaaaatgtaaatattctttcttcaaatcggtttttaacataaataggcttgcaccaatagactatttatcaatggagcgggcttgccatgtttggtgattgtagtgcaactttcctgacctctttttattgctatagtgcagccttcatgcgcagaccatagggtcaatcaaactcatgcaaggcccaaaatgacgcaacttgtatacaatggatacagatcatctgcagtatagtattacacactgacatgtgggccttacagaccctcaagcccatatgtcaatgagtggtactgcgggaaatctcaattggtatacaattaagtgtttttattgtagtacaaattttaagtcacatatgcgcttatatttttttaacagaggaagtaactaacttcaaaatcaggtgagtgacaatctcgtccacttatcatgtatcagcggtcaaaataatgagtagcagcaaattagctgcttcattgatttcaccggtcaccatatgcatgtgtgctctgttccaccaggagggtggaaaatgagatgaagtttgggcctgacatacatgcaatgaaagatgacattagtgataacaatgtaataaaataacatacatgtatggacaccttaatacgaccacgatcagcggaatgttgtgacctcattgtcttatctctaatatatatcctaatttccaattacctaatatctacatctgacaaatgtgggagaggatgtgctagtccttcccctgaccttgtaacacctactcaaagcaaggatgtaactaatcagcaaatcatataaagaagtaaggcattgtatggagttgggagaggagtcaaggactaaaggccaaggtatctttggctagaaagcggttgtgtagagagtttgcccaagtgattctagtagcatgatgagcacacgggtaggaaacaaaagttggaggtgttggagcgaggtgagcccatgatggagcacgatgtattttagagagcatctcgagggcacggctttcttgtatccacgggttttggagggggggcttttaactatttgccactcttatgagtggtgcttaacgatttgccactaggttcacatgtcatagacacatgagggcccacatgttatagacatggtgtggcaaatcgttaattgccatgtcacaagagtgacaaatagttaaatttccctttggagggaggtgaggtgttcaatgccttcaactccctccctcatattactacaacgagaaatgcacaatttaaccaggaaatggagatgtaccgtcatctcacgtgccactccacatactttcggtagattcctcatatgcaattcaactaggttaggaaatggagatgtaccgtcatccaacgtgccactcctttgtctcatcatccacgtgatgggcaggaacctccataactaacaatttctaacacatgaaatcgatcaacgtgatgggtacgaacctcaataactaacaatttctaacgcatgaaatcgatcgtgttttttatggtcatgaactataattagcaacttgtttttttttgaaacaaaagataagcacactagcctctcaaatgaaataatagaaaaaacttgtgctgagtgttggtagaaaattattattagcccttcttagaaagagttgtaagcagacaagaactaatctaatgtatagagcagtggcatttgccctcatcaatttttctctttagtcataccttaggttctatgtcatgtggggcctcaaggcctcggtatagagtggtaggtcgccggctcccactattttcagaaatggttatagaacggaaatctagatgacacaagaaaaacctattttcaaaaatgattagaatggaaatcagatgacacatgaaaacaaaaaagcatatagcaagtgcaagaaacaaaatgaatatgcgttaggattacattaatactggctagaatagcttagctttcttttgctctagatgaggcttgcacctacacaacagtgcaaattagagtacaagagcatgttaggttggtgcctgaagagcatgcctgacagaaatgcatcattgctgctcatcgatggaccattggatagttttgctagtggcctcgtatcactgatatccaaactagcttgtgctcataaccgtttctttggtaaacagctcgtatttctggaaaggcaagctagccgtccaaactacgctcgtaatcgtttcttagaagccgcacgacaaacacaacacacccaccaaacctcaattcgaagtactattagcacttcacaacgattttcctgacttaacagtaatagcaacgatttttcttttcatgctaaggccccctttgatttgtaggataagtgtaggaaatttgaaggatttcaatcctatgaaaaaatttcctacgaaaccctttaaaacgaaggattgaatcctatactatcctttaaaattcctatgagatgggtaatcctatagagattttggaggaaagttagcaagaggtccttggaaaaattctttttgagtctatctctctcatccgattcctgtggtccaatcaaacggtcattcctgtgtttttcttgtattttccaatcctctgttttacattcctgtcagaatcctgcgttttttcgtattcctctatttttccattcctgcgattcaaaggggcccttaaatgaatgaagacaaacaatggaccatagatttctcaatatacaggaagtgagaccatgaatagctgctgcaaaaccatattagatatacaaacgtcatatatgacagaaaagaacaatatttgaacaccatgaaaattgctgcagtgctcaaaaacttgccagaacaaaattgtggtggcattactagatgagatcaagcaacacaggaggaaaaaaatagtccatgcaagcctaacaattgtgccatatgtatatcaatataaatttctgcatcaataccatattaccatgatagaacaccaactagcattttcatagaacaaggacaagttagcaaacaactacaaccagcggaacaaaccttacagtaggctatagccctatagcctacctaaacagaggttttttttcccaatccttaagagacacacaactcccactacttgagtggtaaaaaagtttattattacaaaacaagtttatgattatgaatggcacggccattctggtagttgcgaggtatattgttagtccagagttatccacggtgcaagtatatgcctctaattgagacaaatatacatacctctaagaatgcaataaatgccacagaaatttataatgaaaatttccaattctatttcaacctataaggttagttttggtacttccttttatggggaggtatacaaggatggttgaaaacctcaaacagtaaatgtgatcgaaaaaagcattttaaaagagagctgacataggctacaatgaaaatagcacacaaactcttcgcaaatcatctgtacaagattatcacatcaatatgtgtacaactaccagaccaaataagtaaaaatatcaaaaagtagcaggccatttgtttaaatcaaattaagcatcataatctaagctcctaatctaagcaaaccataaagattaacttcaggaatgggcactgaattcagaattaagtgttcatacgcatataccagatagaattgcaacttgcatgattgttattagataagactaattaaatttatagaagtgcaactgttgatcaacagaccacatatgtgcaagtgttgatgacatattccgcataattattactcgatat

SEQ ID NO: 4972 - DNA, 8229 bp, Oryza sativa
ccctctttttggaaaaaatttagaagcttgctcgggcagctggaggaggaagaaaacatatatatatatatataagggtgggactttagtcccggttggtgttgccaaccggggctaaagatcccggggatctttagccccggttggtaacaccaaccgggactaaagtcccacccttatatatatatatatatgttttcttcctcctccagctgcccgagcaagcttctaaattttttcaaaaaagaggggaggtcatgccaaaatttctagtgaatttattttggtgattacatacaaatcggaggtgcctaaaaggtttgcaacttcatcctccatcctccaaggatcaatttcaagggtatctacgaactataccagctggacaccctcgacgtctctattatgagttgctggattttgtaagtatcgttcagttagatttcttattacgtttcctttaattaattaggtccttgtatataagtagactatatataatatatactcccttttattgttgtagaatggagattcaaagggcccgacggcagggggttttcgatactggattcatcgaccctcggaaagtaaacgtcgcaatgctcgaccagtatccgcaagccacagaggacaatctcgtccatctcctgaaggcgcagcattacaagacgttcatactgttgccgtacaacacagagttagtttaattttactgtcttcctataccaaatttcattcccgtacgaacatgctaagtgtttcatatgtaatgcatcccacgcacattgcagattccactgggtgcttttactcttcgacctggagacctgcaccgtcaacgtatatgactcaatggataaaaaagagtctacgtttgacaaggttttcgaacttatagacaggtactgtcataagttcctatgttaattaagaatcttgttatagttaattgctactacgaatcatagctttaaactccatgtagggcttggtatcggttccgtcatttggtccgcagcaaatggagaaaaagacttaggcggaagttcaattttcttgtgagtacacatgctctacatttatatttctccgattcaaatacatacaagtgtatattaattagatctctcgtcgtttgtcatttatttatagtgcgcaaagcaaaagcagggaactaacttgtgcggctactacgtgtgcgagtattgccactgccttgcagaccaaatcatcaccacaagagagctcaatgtacgtacaaataaattcaaaatttcattacgtatcgatttgttgtttaattactaattaatttcatatattcatatagtttattcgcatgagggataacctgatcacacacaaggaatttatcgcggcggttcaagaacaactcatgggattcatcaacgaacaaatccttgatcccaagggtgaattctactacgacggaaatacaattcataggtccttagcttctaagatatcaactactactacgtcgaaatcgtagctagctaggacatataaaggattgtaattaatacatgtctatgtttctatatgcatgtgtacacatttctataatgtaaatatatattttggtcatatatatatatacatatgcatttgcataacatatatatgtataaatacatatatattatgcatgtacatatgtattgaaacatatataaatataatatatatatatatatatatatatatatatatatatatatatatatatatatatatatagtaaatttgtttggtgctccatggtgcccgggcaccattgttgaaattgagtacatacccaattcaaatgagtatgaaactttttcaattcaaatgagtatatatatatatatatatatatatatatatatcgtcatataaatacttctttttgacgaaaaaagataaagccagtctacgaaaaatacatggattggttgggccaaaattttcaaaagccataaaagatatacaatgaaagagagaaaagtgagtttgtgtatcttgtggatcatagttaaccttgaaaactctatggagcaatcaaataacatattggtaaagaatcattcgaagaacttacgaagcactctacaatatgcatcgacacaccgtgcagtatagctaaatccaatgtataaattgaactctaagaagctagcattcatagagaattatctgtaaggagtttatacaaactatgatgatgttctctaaatccactgagatgagaaaccgaatgtatggacatgaatgaatttgtgtcaagaaaaagagaagtccactatgctcaccagattcatcaatgcatacacaatcataattaggaaactatgtacaaacataccttatttccttttgctagctctaaatcctcaaatttatagcagcataaactgatctgtaaacccgtgcaccctagaaacttgataaattctcagtcaagcacctgtagcaagcctcatttgccctgataaccactcaatttatattagcccactgctcactgaagcactgaatgtacgtacattgtttcatctttctaccagaaattagtgccgatcaaaataattagttactctctccgtttctaaatatttgacaccgttaactttttagcacatgtttgaccgttcgtcttattgaaaaacttttgtgaaatatgtaaaactatatgtatacatataagtatatttaacaatgaatcaaatgataggaaaagaattaataattacttaaattttttgaataagacgaacggtcaaacatatttaaaaaagtcaacggcatcaaatatttagaaacagagggagtatattgttaacgaccaaatttcataaattctatcattattggcatcggagatgaagatcagatcgaagtggaatccaagatgaagatcgttgcggaaacagagtaagaatcggctgcagtccaaatcggctaaggtcaggtcgacagagttcgagtcggacggggctagccgatacagccgattagccgatatagccgattccgataatatgactcggtgtacgtcatcgggttcaagttgatgtgtttcaagataattgccacgcatggatagagtcctgggaaggcaattgtatctattaattagggtattctatgtaatttctttagagatatgtttgggcaaaagtctgccgtaaagacttatggtatcttagagtttgttagagataatagtcgtgtctattatggacgtatcttgtaattctcgggtataaatagacccgagccctatgtaaaaaagaacaacacatccaatacaatctcggcgcatcgccaccctttatgctttacttttatttcgacgagttcgtgctctcgggttgagctgcatcggtttctgtcggtgacatgggatcaggagtatcatgactagaggtttgaggcagacacaatcgcccacgtcgcgcctgcttccggcggaagtggaggtaggtatgggccgtcctatcagaaggtcattcggacggcaaccatacaagtctccatctgtttatgaaaaggtggggtaagtccccacaaaaaaagagagaaatggtgcatgtggtatccccttaagatataaaaggaggaccttgcccactgagaggggggactagacttttccagattagaaacccagaacaagggagaggctggctgatactttgtagctccttcatacacagatctcccaaaacataggagtagggtattacgcttctcagtggcccgaacctgtatacatcgcctgtgtcttgtgtgtttcctgtctcgcgagccttccacatacagagagcttagaatctctccctgagtccccggccgaaccggcaaaggggggcctgcgcggtctcccggtgtggagccccacgcttcgtcatctggcgcgccaggtagggggctctgcgagggattttctgagctctcgcactctttcgtgtgcgccaagcttttcctgttcagcccaatggccgagccagcaaaggcgcacgacctctccccgagtatgagcggtgacgacagggagccaaacccacgccgtcgagctcgtactccaccgccccctccacgccaaagtcctaggcgggagaaggcgctcgagagggccgaaggatccgcgacttcgacacccacaggaggtggagaagggcggcgagatggggagcgtcgcctcctcgtctacggcgacggcagcacgccccagggcgcgctccaagctgcgggcgcgctcctacatcacccgcccgtcgcccatgacccggagtctccagcccaacgttagctggacgatgtggccaaattggtcatgactgcacggcagcgcctagatgctggtgggcggtcctccgccaccaaggcctctggtgctgctaccaccggctccgcatcgtcaagacggagggcgcggcgagcggcagccgctgttcgccattcggccgccactccttcgtcaacgcctccgacccgggaagatctgcgtggggaaccggatgctcgcatcagtatcgagcgccggcgtaatggccgacgtgctccccacgcaacgtagggcgcctcctcgtccggagtgtcacctcaccacggacgcggggatcagccctccgtgcccccggttggtggtgtcggtagtagagcctttgtggcgagccttcggaatgtccgttggcccccaaggttccggcccaccatcgccgaaaaatatgacgggagcgtcaaccccgccgagtttctccaggtctacacgaccgggatcgaggccgccgggggtgacgacagggtcatggcgaatttctttcccatggccctgaaaggacaagcgcggggttggctaatgaacttgccacccgcgtctgtccactcttgggaggatttgtgctaacagttcaccatgaacttccaaggcacatatccgcgcccaggtgaggaagcggacttgcacgcagtacagcgaagggatgatgagtcacttcgctcgtacattcagcggttctgtcaagtccgcaacaccataccatgcatccctgcgcacgcggtgatttacgcgttcagggggggtgtgcggcacaaccgcatgcttgaaaagatcgcctccaaggagccccagactaccgcggagctttttcagctcgcggaccgagtggctagtaaggaggaggcatggacctggaacccctccggttccggtgtggcagcttcggccgcccccggatccgccgctcagatagggcggcgtgacaggaggaggaagaagaggtcagcccataccgacgacgagggtcatgtcctcgccgtcgagggcgcttcgcgggccacccgaaaggggaggcctgcgggaggcaaaaagaacgaggccggcgctcccaacagggagcgcccaaccggcaagtggtgcaccgtccacaacacttcccttcacgacctcgcggaccgccgtgcagtcaaaagtttggctgagcggacgaggaagtgggaggaggagaggaggcaggagcgccgagagggcaaatccccggcggttccttccggtaatcggcgaagtgaggccaagcagaaggcccccgccgaggacatcgatgacggcgatgatgacctaggtttccaagagcttggggccaccattgccaccgtcgatgggggagcgtgtgctcacgtttctcgccggagcttcaaggccatgaagcgagagcttctagccgcgacccctactcatgaggcgacgtgtcgggcgcggtggtcggaggttgccctcaccttcgaccagaccgaccacccaccgtgcgttgcccggggagggcagattgcgatggtggtttctcccaccgtttgcaacgtaaagttggggcgtgtcctcattgatgggggagcggccctcaacatcctttcccctgcggcctttgacgccatcaaggccccggggatggtgctccggccgtcccagccaattatcggtgtgacgccggggcacacgtggccgttaggtcacatcgacctaccggtcaccttcggtggatccgccaacttccgcacggagcgggtgaacttcgatgtggcggacctcagtctgccctacaacgcggtcctggggaggcccgcgttggtgaagttcatggcggcggtccactacgcctacctacagatgaagatgcctggccccggtggccccatctctgtccatggcgacctcaaagtcgcgctcgcttgtctggagcagcgcgcggaccacctcgccgctgcatccaagcccgagggtggcgacgagaggcttggcgcttccgcccccgccaccccgaggcaacggatgatcacaggcgacgaggtcccggtcaaggaggttgccctgggcgacggcccgtccaagaccacacggatcggtggtcttctggacggcaaataggaagacgcgctcgtctccttcctgcgggcaaacgctgacgtcttcgcatggagaccggcggatatgcccggggtccccagggaggtgattgagcaccgtctcgccgtgcggccgggcgtaaggccggtccggcagaaagtgcggcggcaggccccggaacgtcaagccttcatccgcgaggaggtggcgcgacttctggaagccggattcatccgtgaggtcatccatccggagtggctggcgaacccggtggttgttcccaaggcgaacggcaagcttcggatgtgcatcgactacaccgaccttaacaaggcatgtcctaaggatccttaccccctgcctcgcatagatcagattgtcgactccactgcggggtgcgaccttttgtgttttctagatgcatactctggttaccatcagattcgcatggctagggaggatgaggaaaaaactgcgttcattacccccataggaacctattgttatacgacaatgcccttcgggttaaagaatgcaggtcctacttttcaacgtactactcgaatttctttgggtaaccaattaggacgtaatgttgaggcttatgtcgatgacttggttgtaaagacgcgcaaccaggaaatgttactctcagatctagcggaaacttttgagagtctccactccgcccgcataaaactaaaccccgataagtgtgtgttcggtgtacctgcgggcaagcttctagggttcttggtctctgcccgaggcattgaggccaaccctgagaagatacgggctatagagcggatgcgcccccccagcaaacttagggatgtgcaatgcgtcaccggttgcatggccgccctaagtcggttcatatcgaggctgggagagtaggcgttactcttatttaagcttctcaaacgctccggaccgtttacctggacggaggaagccgaaaatgccctcacccagttgaaggcatatctaagctctcccccagttctggtcgccccggagctagacgagcccttgttactctacttagcggcgaccccgcaagtagttagtgtggcattggttgtggagcgcgatgagaacaattctcatttcacgcttctccaccctgtgccgacttggcccgggagagagcagggaggagaggctcccgagccgaacggtggcccaaggcccccgacgaccggagttggccctctgcccgcttgtcagacggtgctaggagcccccgacccccaggaaggccctgaggccactgtgggaaggccgcacctatcgcccttcgaccccgaggctaaccctgtgctgacccgacccaggaaagagtagggagaagaggcccccgagccgaacggaggcctaaagcccctgacgatcggagttggccctttgcccgcttttctgatgacgccaggagcccccgacccccaggacggccccgaagccactgtgggaaggccgcccctgttatcctccgaccccgaggtcatcagcacagaagataagtgcgccccgcgaggctgcttggacgaagagtgccccagggatgcggcccctagcgaagaggatcggccccaccgaaaggtgcagcggcccgtctactttgttagtgaggccctccgggacgccaaaacccgataccctcaggcccagaagatgctttacgctattctgatggcctcgaggaaactgcgccattatttccaggcgcatcgggtcacagtagttacgtcttaccccctcggtcaaatcttgcataatcgagagggtacaggacgggtggtgaaatgggcaat

SEQ ID NO: 4973 - DNA, 9175 bp, Oryza sativa
ttgtagatcgcgtcgagggctacaagtttgttatttagtttgtcttcattagagttcatatgaacaagttatgaattatttttaaatataaagtctttagactgtcctatttgacccagatgatattcaaatccaagtttagggaccgggtgacacaactgaacaagttggaggacctaaacgagtgatctgcaagtttaggaaccgggatgacacagtcgaacaagtttgagaacctgaacggtcgatttacgagtttagggaccaggatgacacagcagtacaagtttagggaccggtgatggactttactctattgtatatataccccttatcctattatttcaccaagcccttgcacaatgtgagttttacatgattttttgtattaattagaaagcgcttccatgtaagtcgattgtattcactaagctttattatctatcgtgactaaatttattgattgaactatcaaatatgagaaacagtcaaatttcacaaaagaaaaacagagagaaactggccattcctgttctttcaaattctagctactagaccatagcgatcacacttttcaaaccattaaacactaaaaacaaaatattatataaaagttttatagaaaactaaaaaaatgatcattttcaatatcaaaaaagaccatgcgctaattgagtatctgctcctataagcaaatcggttaatccagcaaaaagctatatcaaacggaccattctggcatagtgttttgtgataatgtttcaattttagagcatctccaagagataaccgatcatgttacctaaagctatactactttgggaattatgtctaaaacacagcctccaatatatatccaatcatggccccaatattccgacatgcccaatcctatcattgccctggcgtggctgattgacctggcagctaatggaacctcacgatgccctttctcgtcccgacggctggcgtgcactcgtgtccaccttgctgacgcgctggcccagtgatgcgcgatcgcccaagccctagtgcttgcaggtcgtttgcaacgtgacaacagctaatggaaccctcacaatgccctttcttgccccgacggctggcgtgcactcgcgtccaccttgctgacggcccagtgatgcgcgatcgcccaagccctagcactcgcaggtcgtttgcaacgtgacaaaaacgaaacagatcgctagaaacaataattgaaggagagcccacctaagatgacatgacaaatttctaacattttgcaaagggcactgctattgctagagatgcatgatttcgggcctattttttaagaaaaagttcgaattacgcttgaactatcgtggtagtacgaattatccacctctatttaaaaactagatattcttcatcctcaactttttatacggacgaattatcccctgacagactccagaatgctagcagttttggtcctacgtggtatacatgtagcagtctagtcagcattaatatatatatatatatatatatatatatatatatatatatatatatatatatataaggtagggcccacatgtggcgacctagaaaagatgcagaactgacaagtgccctaccattttttatttttttatgctgactagattaccacgtgtgtgccacgttggaccaaaactgctccggagtcgggtggccggggtgggggtgggggaggggatgcagcacagcatgcagcaaggccgggcaaacatcccattaatggactacgtatagaaagctttagtaggataagaaaacattggcagcacattaggtggtgttcttttcttgtgaagatgaagataaaggttatgtttttttacataaaatgaggtgatattaacgcataattgattgagttttaattattaaaaacttgaaaaatagattaatatgatattttagagcaactttcatatagaaagttttcatacgaaacgcaccgtttagcagtttgaaaagcgtgccataaaaatcttaatctttatctaacttttgttggagcaaagaacacgtgcttgccctccttgccacacgatccaactgttaattcctgttaatttgatcactcgttgtccgagaatcctaatcaggggtcactgttacttacaaggtagtacaactaatttccccctctgtcatccctacctacccgccatctgcagaaccatatataatttaggggcaatctcacagcaggttgtgttagagagaagagtattagagaggactgaaaatatgcgcaaaacaaaacaagtcacaaacacataattaattaattattaattattttaaatttaaaaaataaattaatataatttttaaaataacttttttttaagaatacatactagcagtttagaaaacgtgcggatataaaacgcgagcatcatgctttcctttccttgcagccttcccttcttcaattcacacagctactagatagcagaagatatgatttgatgcaattgaactatattccacgatgttgaattaaatcgtgagttagctggtggtggtgtgctgccgatgggttgacgagaacaaggtcacagggcatgaattgatgaataggatggccattttttttattattaaccttttttgtgtttaaattttaaataaacatcccaaaacttatttttaaaatttaaaacttttaaccacgccaccccggctggcataacgaaactaaactatcataaactatcatgttcatcctcatttgacttgacaatattatttcgccacatcagaccagccagtaccattaaaaggtctagttttaaaattaaattttgtaagagttcatttttaaattttaaaaaataaaaaggttcgaaaaaaaagttcatcgatggccgacacgagacggcgactcgatgtcgatggtgtctcccatgcaatgatgtaacgttttccttcccgtgatctcctttttccgggacgcattggttggcatcgttggatgaggaatcattttttgtagcaaccactttaattaatttggcagtgagccagtgaccgtgacgcagatacatgaggatgcactgatgcagcacagcagcgaggccggacaaacataccatttatcgatgacgttgataccggtaggccacatcgctgctactacttatattactccattcatccaagaaaaaaaagttaaattctaattgtacttaaaactgatgaagataaaagttacgttgatgtatataaaacgagaaagttattagtatatagctaattaagttttaattttaattattatagacttaacaaaataaatatattaatattttaaagtaacttatgtatgaaattttttgtcgcggaagcgtctagtataaactggtcccatgagcgcgagtagagtggccagcgacgtgatcgctcctctgccgtacgcccggccgtgcttcatgatggtggtggaggtacgtggtggagattacctacagtatccgtcggaaacagaatacgtatgacttttaaaagagaaagtacacgtgattgccctcctcgccacatgctgacatgcattatgtttacacacaacccctgcctgaatcgatgatagtattcccacacacaagataaggataaagaagataattaagtattttaggtaaataagatggtattaatgtatgattaattaagttttaattattaaaaaaaataattaatttgatattttagagtaacttttgtatagaaagttttcgtacgaaaagcgtgtcactagtatccaaaattttatccaattttttttaaagaaaagaacagggcttgtgtaattgtttattaatttcttcccacactgccctccctacctacccaccatctgcagcaaccacagggccaatcatgtacttcctcgctcgatcgtctctggcccagccattaaacggtagatggggagacctgagcatcatcgatggatgattaattttggtctttttcaaatatgctaaaaatgataaaataataatatgatattttctagcaaattaacacgttcttttaggtgtccttaggtcaagccacgttttaggagtatccctaacaaaatcactcttatagtaaattttgccaattttaaaaactaactttaataatgttggagtcatgacttaattctatccatcgagactaatagcgtcactaacttttttttctttaatttaatttgcacatcgattaattcgtacaaatcatgtatgtttgatttgcctttataagagttaggctcgatataaaaaagacataaaacgtatcgaataaaacgtatcgaaggaagaaaattatacgagatctttgcctcctcacattttttccttcttgagaaggggatcatcaaattattcaactttcaatacactaattaatatttgaagcaggctcttcatctaatcatccaccccttaatcatggcattttcttcatgcaataattatatagtgtgctctttctttattcttcttggatcttccgtatgctatcttcttcgtgctacctctgttagctagcactgcaacaataacaaactcttaatggtacaaaatatacaaataaaatgtaaacataccttactttaagttatattacaaatcatcttgtacaaaatgcatacataaacaattaactatttacaattaattgatagttaaccatacatatacattgttgtaactgcagataggcatggcaagcgcattggaaacattgtgtgggcaatcatatggtgccaagcaataccacatgttaggcatctatctacaacgctcatggatagttctcttctgttgtgcagtaatccttctcccaatctacctcttcaccactccgctcctaattgcccttggtcaggatcccgatatctctgttgtggctggcaccatctcactatggtacattcccatcatgttctcctatgtctggggattaacaatccaaatgtatctacaatcacagagcaagaacatgatcgttacctacctctccttgctcaactttggactcaatctcttcctatcatggctcatggtggtcaagtttcaccttggccttgctggggtgatgggctccatggtcattgcctgttggatccctatatttggtcagctcgcatatgtcttctttggcggttgtcctcaaacatggacagggttctcgtcctctgcctttactgatcttggtgctattatcaagctttcgatatcatccggagtgatgctttggtaagtaacagttctgtttatgtacacatatgaaattttgtataattttgatgataccaaacaaaaggcaatatgttatatctaacctagtgttaaccaagttctttcctacagctaatttggtagctcattgattcattcttgttgttcctttgcctttcagtgtagaattatggtacaacaccatattggtgctcctcactggttatatgaagaatgcagaggttgctcttgatgctctttctatatggtaatatgttaatatatatatatactattgttgcatactagtttagaaaataatagccaaatcatgttgtatcatgtacataaatttattgttttgtgttgatcctttagtacttggagaaattgcttgttgagcactgttgttttcacttacaaaatttgtagccttaatatcaatggttgggagatgatgattgctattggatttttggctgcaactgggtaacttcatgatcttacttgttactcattaagtggttcatctgactattccattatgtcctataaatttgacttatacttaatacatatacatttttagagtgcgggtggcaaatgaacttggagctaggagtgcaagaagggctaagtttgccattttcaatgtggtcaccacttctttcttgataggatttgtgttttttgtgctcttccttttctttcgtggaagccttgcatacatatttactgaaagtcaggaggtagtagatgcagtcgctgatcttgctccccttctagctttctccattttattgaatagtgttcaaccggtgctctcaggtatgattattttatttgacggacgattatatcaaaataatttaaactttcactttgaaattacaacgttttctaactatctataggtgtcgctattggctctggttggcaaagtgtagttgcctatgttaatgttgcatcgtactacttgatcggtatccctattggggcaatactaggctatgctctaggatttgaagtaaaggtaaggtcctggttgctattgtaaatttcattaggaaatcttgggtctaagttgcgtttctcacttttattaattggttctatagggcatttggattggaatgcttgttggaacactagtgcagactcttgtgcttttattcatcacacttaggactaattgggaaaaacaggttggctttgttatcttttttgctcatattttttgttatcttgtatttaattatatctttttcacataatataagggtctatctagaaaaacatgtgggacattgaaagagcacattttttttatatttgaatggtatgctccattgttttttaggtagagattgctctcgagagactaaatagatggtacacggatgataatggaagatcacaaaattcgagaggaaatccatgatctgaaactttcgcacattcataatggaattgaaagagttcgagatccttcgaggtcacatcatccatcatccatgaaccaaacgttaatcacaaggcatggatgatgttttttttttcctgaagtgtcagatcaaggaagaaccacgatgttagtgtagtaaccttgaatataagccccttatccttttatttttagcacgacgcagcatatgcttgacctttatgtgttttacatatttttttgtatttgttgacaagagcatgtatggctatgtgcttgcatgtgaattgattgtacccattggattttgttttctacctttgagtaaatttatggattcactatcaaatgagagaaaatatccacactaaaagttgtgggtcgtttgtccctttctggaataaattgctttgtaaaatgattccagttttaaatagcagaaaatatgatttgatgcatttgaactatattccacaattattctcctctcctgcaaccaagattttttttagccatttgacgcgctttatcgatatcaaaacacagttataacgttcactacaacgtttagcaagaagctaatgggttcaacccaattacaagaattcttcaaaatgaaagcatgatctagataatttatgtgctacacaatttgcctctttattacaatgttaaatatggagatattctctaaatcaaatctaagcatagggacattggcctactctgacatcatcttaaaaaaaatgaagaaaaaaaatgctgcgtgggctgggccgaatagacgattgaacaacaggccgaagaaaccaaaaatggtgtagcctgaaggtgaagctgtcaagcacccaaatggcggcgccggtgaggtcggtcctccccgtcgtcctcctcggctgcggcggcgtcggccgccaccttctccgccacatcgtctcctgccgcccgctccacgccaaccaggtacctcgtctcgtctgacccgtccccttcctctccgattcggtgctctcatcgcccatacttgtatagggcgtcgccatccgggtgctcggcgtcgccgacagctcctctctgctcgtcgccgacgacctccactccaacggcttcgacgacgcgctcctcgctgatctctgcgccgccaagtccgccggctcgcccctatcttccctgctcgctcgaggtatccccattctatttcgttattccttttttctttttttagaatattccatagcttccttgggtaatgaatactttgtcatgaatttgcatttgtacacgtgatatttaaagtaatggatggttggattgtgcaattttcagggcaatgtcagctattcaacaacactgaggctaggaggaaagtcattgacactgccagcgttctagggaaaacaactggtctgtgatccttctccctatgcagaatacattgcgcgctaagtttttgaattctctggaatagaaaccagtggggaaaaaaaaggaatctttgatatgctgtatgattgttgattagttcctttttttaaaaaaaaggagtgtaatatcttctttggttcttatcttatgatcctttttgcaggtcttgtactagttgattgttctgcaacttatgatactgttggcatgctaaaggatgccgtggattgtggatgttgtgttgtattggcaaacaagaaaccgcttacttgtgcttatgtaatgtcctccttaagtcttccatccagtattttttgtcattttgacacataagttcatgcttaccaaatgtgttcctttttcatgcaggaggatttcgaaaagttggtctccaacttccgtcgcataagatttgaatctactgtatgcatacgccactagtaattccttcatttcactattaaatgttattatacttttcccccaatcttaatgaaatttggtcggcgtttctttcgccgacccagcaaaaaatgttattatatttatttttcatggaaatccattcatttatttgatctggggttgtatgatatgactgtggccatatgattaagcacagcctttttttttggcaatttcttttattattacaaatgagttgagggtctctgctgatatttactattcctactcttaggttggagccagtctgcctgtaatagcttctgtgactcgtattattgcctctggagatccagtttctcgtattgttggcagtctgagtggtacacagttattattttatttgtttgtaaaaggtgtctgttttccaaatagcagagcaatgtacacttccattcctatgattctgcaggtacacttggttatgtgatgagtgagctggaggatggaaagaaatttagtgaagttgtgaaaactgccaagtctcttggctatacagaaccaggtctaaaaatttattcattcattggacattataacatcaatgtgtactcagtattcaattccttatctgtaattacag

SEQ ID NO: 4974 - DNA, 7352 bp, Oryza sativa
attcctgcagccctgcaagggagactgtcgatcgtaacatatgcacttcatgtcggcctttgggagcactgataagctagttcttcttgagctgtcttgatgcatcaagcagcacatggaggtcgctaattaattggtctgttgggctgcagctgatacttgagccgtctcagctgcttcctgctcagctccactggcgtcactgggcacatccacgaccatcttggaaacacggaacatggccaggtggatgtcgcctgcaataaaatgcaaaagaggaacaagcacagactgatcacaacgaagaagagcaggcaagagatgctgcgagttgtatgcagtctgaagagagtgaggtgagctaatttgtagcagtaataactaataagtagtagtaccaaaaatgaggaggctaccggggtcgatgggagtggggaaacccgggctgaggcgcctctcgttgatgtaggtgccattcgtgctctccaggtctgttaccaacaggctcccctctttcttctccagccgtgcgtgcgtcccagaaactgctttttttcatgccattccattccatttcatttcatttgcagcaacttagtaagctacatatgtctgatggattatggagagagcaatgcaagtgaatgaatgtgctgcatatatatatgctactacctgttgcgacagacaggacgatgtcagcctgttcaggaacacgacccaccgtcaccgccgcctcctgcacacacaagacaacacattcattcatccaagagaacacccggctgcagctgagctagcacggttacagcatggatatccagagaatttctgggaaggtagaaacaaagagagacatacggatgctatctggaagccgccgggtcgtgcgacgcggtacccgatatgacgccaatcgccgtctcctgcaattcaacaacagcaggttctgtttgttcaggtggacagcaataaactcacgaatattgctgctgtgttctgttttgcaattttttcttcagaccagctagttaaagttggtaagatgacgatactatgattaagccggtaggcaggcacaagcatgagccagttcacaagggatatcgacattgcattacaagtatcattttcacaagtattgaaagcagactaacctgcaggctcaagaacccatctttctgaagtggcggaagaagacgcgctgtcagtgccactggaagagcacctcagcgacaaaatggaaatgcttcttctgccactcccgttgctgtttctgctggttagctgactgacgaactgcagccgcggctgctgcagcttcgccccattggaggcgtagctgctgctgcaaggaggcggcagtgacaagcaggaggaaggcctcctgggtgttgggctagagaagagcaaggaaggagtagccactgctgcttccatttgtgtctgtgatttgtgctcactgctcagcagtggcagggaaatgcagtgccttgctttttttgttcgcttcttgatttctttgtggatcagtggagatagaattgaggttgtttgtcctgtgttcaatgctatctctggactcatggccaatcagttgctcttcaccttcatctgttggtggtcgaggttcactgcttggtcattgtcggattctcccgttgccctacggtcccactctgcttgtctgcttctgctgtactgtacacaaataaattttttttctcaaacacatttttaagagtaattttagatgaaacaataacactcctccaaatttcacagaaaaaaaaaagagtactccaggattaacattgcagtaatcttttagcagtgcataaataggaaaaatgcataatgaataatttagcttgtttgagtctcaagagaagaaaaaaaaaacacacgatgaatattgtatctggttgagtctctagagaaatttagctcccttagttattctccgaagagggtttgtttggatgactcacctgcatagagaaaaacttgagaataaaggttagttaatcagtgagagaaagcgaaggtgtattcgaactcttcaagcaaaatttacacccattggctttggtgtgatgtaatgtaagcttcatccatagtatcagtatattcttttagcggttttacacatttttcttacaatatttgtttgtttctctagacgtgcaatgcaacacagtatacaacatagaagcgttagtatatttccatattattactccagcaggaaaatattcaatacaagcgacatctgattaagcagttcagcaacctacaaatttcaaaaacaaaattaaacatcctcgattctttcaataaataaataaatttcaaaaagaaaaattaaacaccctacatcaggccaggtcagctaaaagcccaacacgcttggggcctaatgctgtctgtgcttgggccggcccactcaggtccacttccggacccacacgccagactctctcgaggaaaaaaaaaaagaagtaatcgtggttagcaacctgccccttgttccacaacgacgaacaacatctcgccacgaggaggagggcgagagcttacacgagtccgaaatccccaatccgggatcccctgcttctcttcgcgccaaggtaagatctctcacggatctctgtgcttggcagcgcggatcgaatttttgtcattacttgtcctaatttttgttccggggtgtctaatttgggtccgatccgatcagatggcggctgcctgggcggcggcggtggccgtgatgctcctccttgcgcaggtgtcagcggcggctccggtgatggggcctgccttcctctgggcgcccaataactacgggtaacttgttgccacagcgtttctctttttcatcgtttcaagcctgagatcccttttgctagatatgtatgaatgtattaataatgttaacgatttttagtgaactctgctgcttcacttagaaaaggttgcaatttggtatagcgagtattgacataacacataactcttcatgaggtgcatgcgatttactgctcttcttttcttgaacgaatagtgcatatgcagttcgttcctcatgaaacaggaggcttcatgatcggataattagtttcctttgtatctaaggccacacccttgactctagccctgtgtgccatagatgatagaatcttcttgggcattcccaggagtgatcctcgcgttgtctcatggggtccagatcaaccacattcctttgaaactgcatcctcaagaaacgcccaggggtcttccagctagctccacaaggtggtgggctagatgacctgggttcgaagcctcaccccttctaattatttgatattaggtccttccctaatattcgcgtctttttttttcgaaactgcatcctcatccatcattcagtacagacaatcaatatggaggttttaaatctagaacaaccatagattccatagttggaggatttcggagttctcaacttatactgatcaagcagttaccttgcacagttgcccatttcctgctactacttcacatcagcgctccattttgctgcggagagtaaatgtataatttctttcgtcaaattccaatttatatggtggagggtggagtagggtggttgagagaaatctcagttggaagtgggatactggaaggttgatgagaggaaaggatgaaacccatacccatttagcaccctttcatttttggtcatatgatctggtatatacatatcaaaaccttctagttagaacgaagaacagagattgtcttgctgcttaggttttgtgttacagatttgttcagcttttctaacatgctcactcctatttgtgttgatattaggaaagtaaagtagggtatcagttaagacaggcctccattttgtatttgattttgcacagtgcacactggaatatcatggcttgcttcaaaaaacattaccttcttagatttttttagctcagctagggagcatttttatgtttttttttccatggggtttgtagtaatgctgcacacttatgtcttaagcatgctttccttagtagacaggtgcatccgtgcatgtggccgttagatatgctgtctttcttgcatggaaacttgcaatccaattgaaatcctgctaaaaattagtaatagagctccatggggctggctctaaaaaaatgattttgtgtttgcttcagctcttattttatatggacaatctttggcctctaattgaaaaagatcttgaaactatgagttccattaaataggctatggcgagttcctgagcaatatgttatccttatctgagataataagaacattaaagcaatggagtaatgcaacttcatcactgattcttgcctagagcatatgttgcacctggtctgtactgtagatggcaatgtcatgcatatgagggtcacccatttttgttggtgcctcacattttcagttacttgctggctagattgaaattaccagttcatatagaaaatatttgctgaccttcttgtggttattttaatcaaagtttagttgtataaattacattttatttaccttgctcgccagattctcttctgatgagactaaagaaatggtctactatcagacagtatccccaaagagcttagtgaaatctgttcttgaggaaggtggttggtcaaacttggtggtgagttgagttccccccacgtcaattcacaaacaactgaccaatttcaattgcagtatctgctcttattgtgcacaaactcaaacaattcataacattgtgattttattttagtgttcaagggaggatcatgcaaagagtgttgatgttgcagttctttttcttggctcgaaggtacttattgactcccattcatttggtactgtgaactagtgtttaggtcttcactggttgcaatgtttacataattattgattcagtccacattgatcaaaaaattggaatacattttcttcatagtgtttctgatagacgataataatcaatactaagaggccataacatttccaaattctcttgtttgaatctgtatgtcaaaattattgctagatcaagtaatttatattatgatgctgtttcaatttttcaatgcttcagttgaaactgactgataacttattgttcctgtagctacaatcatcagacatttctaaagaaaagcaagctgattcaactttagtagacatgctgaaggtattcataatcactcttcttttgtccatcccccttatttgtatttcccctagttgttatataactgaaaaattaaagatttttaaatgcttataatatctatgctctttactagaactcctttgcaagctccgagttttccatggcattcccctatgttgccatgtcagatgatgacaaattggagaagtcattgctatctggatttgctgagaattgcaacaatggtcttggaaataatcatatcacctacacagacacctgttctgtaagtgaagatctgaagaaacatcacgacatggattccattcatgtaagtttttatagttcttttggtacttcttgcaatttctcttttccatttattgaccacatgtacattccagggattggtggcatcacaaactaaaaagaacccaagtggacagactgatctggttgtcttctgtgatggtggtttcaaggataacacaaaatcagaaggttaggtcaaagatgctaggttggtcctttcacctcaaatatacaactgtaccttaatgttatgctaattttttctgtaggggagttactttctgagctggttactctgctgaagaagtctggagctaaatatacaattctttatgcttctcagccctatggtttgctagagagcccttcaaacctgccgttaggcaggtacctcgcagagaagactaatactactaaacccggccgtggaaaatgtgatggggagtgcttagtaaaatcaactctgctagaaggaagctttgttgtaagttgtcccatggactgttttttttattggttactttcattctgtcatgtagacttaagcctataatgttttccaacaaaaacagtataattttagaggtagttgacttctcttattgactttactgcaaaattttatttctatatcactatttgttatcctagaattattttctcacaatagttcgtttatgatatgcagggaatagtgctgctaatcatcttgatatcaggactcaaatgtatgatgggaattgataccccatcaaagttcgatgctcccccggaatcgtaagcccatttttaagcagatctgaatggaaactcaaggcaaacacgaggggaaaattgaatagctgatgtagcaggtctgtactgtgaatatagttagtttgctacttattgccttatgtattttaatgagccaactgcaatttgcagtcaatttttggtggaatattacatttcaaaacgtacacgtgcaaggcctgatttgtaccatataacactgcctctagtgtttgctgtgtgaataagctggaattaaaacctgttttggaataagatgtcacagttcatcgaataaaaccttgcgatatatttcattattttcatatataccgtgttattgcaattgaacaagtccctcaggaatatcttttctggaattgcattgcatttgattctctgtaggttaaatacagagtcttgtactcttttgccaggtgaagatgtttggttattaacggtcgtcgcttattctgtaggttattactattcgagactttgtggtgctagcctagcaccctatcatttatcattgcttgttcatcaatcaaccccgtaatatttcaatcatatttcacgatccattactagcctgattgggacactgattaaggtactttacgccggagggcttttcttcctttagctggtgatgttactgtcagggaaaccttattgctcaagtgatcacattactgagatagatagcgattgctatattaggacaaaacaaaaaaaaaaggactacacgactatgcactccctttctccctctggggtctttgtatatatcttggcttagcactgaagtatacctggaaatttatggcacctacataatttgcaggaaagtgatcacgaaattgcatggcgatgtcttcttcatgttatcctggccagtatagaaggaaaagagtgaatcgcaagataaatattatccctattgttttacttatacttatttgtatcacatagcaaataaaaaataatttaaggataaagcttttaatatgtgtgttctaactatgataaaaagggtaccgagctcgaattcgccctatag

SEQ ID NO: 4975 - DNA, 2963 bp, Oryza sativa
cacgacaaccatatacatacccattatcttctaactccatcggggggatcatgcttctatttattagctcgttgaagtacccttccccaagctcaaataatcctatccccgttgcatgttcattctggataaaaccttcagctatccacttccatatcaaaagatttttctcgatcccatattcttcccgaaatagactcagatacagcatgcaagcctttagatgtgaaggaaggtcatagtaactaaaagacagtattcttcgagtattctctacaatgtcattgcctctttcaccaaaaccaatagaattgtacacattagaccagtcctcccctgatttacttgccaacaaactagctattgtgatgatagctaatggcacaccaccacattttttcaaaattttatcacatgcctcagttgaaagactgtctaggaatctgtcttcaccatcatttattctagaatataataatatttcagagtcatcacgagaaagggtttgcattttgtaaatatcaccgatatgcgtggcgacttcaaaaatacgagtagttaccactactctacctccacaattactatgttgcagagcacatctgatcaattcccatgatttcttatcccatatgtcatcaataacaaacaaaaacctatgcatccacatcacagtacaataacataagttagtaaccatgcctagtgggaagaatgtaaaaaacaagaataacaccaaggtggcaccgtggcaaccatttgaaagaacacacgaaaatgccactataaatcaacaatttgtagaaagtcgatctagtgtgaataaatcaaatattataaagttacaagttgtatacaactttttttaaacaatgttgatggaagaaactctttataatagccatactgtatatcagcttagaaagcatatgccgcatatcatccacgatctatcagataaaacgaactagaccttaatctataactataatagatatcaatcatattctcaatgttcttgtccaatcaacttgactgtgcctcagttacctttggatgcattttgctttatagcctaatatgtcatacccaaatgattttctcaaacaattgttcatgaccatgcgcattgacaacataaataatatgctataatgcaccagcccattaatattcttatttcagctcatctgctcatgtgtacattcaagtttaggctgtgcgtgacccaattattctattgtagtggtagtcctgcctcggtaaatttagatatgtttgtgctaccttacaatgctttatgatataattgtagcactttgggttaactttttctacacgaatcttggtcaaaagcaagcataagcatttgtgctttctgtatacaaacatgcccctacaaaaagggcgatgcaacattgaaggtgaggtcttatatgttcaggtactaaaacaaaattcacatgctgaactgctgatgaatacgtagatgttcatacctcttgttctggatgagtttccgtagttcgttgatgagctgcctttcatccaatatcatcacatttggattcatgtagtcaaaatcaataagaatatccctcaagactttcttcatgtcaggatcccgaccaaccggaacaaaagccccacagtcaaatgccagtttatgtttgtcatatactgctttggaaagagtggttttgccgagtcctccaaatccaacaatagagacaatcttcattttctcgtcggaggcatgaacatcatccccaagggataatatctttacgagcttttcactctgcttttcaatgccaacaagctctgtcgtctttttgtatagcgcctgaaggcgaggatcgatggtaacaggacctgtaaccttggcgataatgttgtccaccatgtacctgtcacgccttgcagccacctcctcgactttcttgttcacgtcttggatagctccagcgatcttatggtgatgcttgcacttgttgaagaaattagccatcttcttccggaagcgcctgagcatgtgtgtgtcaagaggctcaggaccatcgatgtgcaccaagaaagcgtcgacgacgtcctccatgtcgtaggacagctccctgacatcccctgcccagagcttgaccagctcgtcgagctggtctggaggcacctcaccgaccttgaggaggacagcattcatgctctccagctcctgtgagagatgcttgatcttcttcctcacgcctttgtgcaagtcgtactcctccttgagtacctcaaccagcttggggagaaggctccctatcgccccgtccccaactccatgctcgctggctcagtcagttggtggtcttgtttgtgcgcacagattgggcagctagtaggttgatggtatatcgactaaacataggagagcatgcaaaagtttaaaatgcacttcatcttcgatgacgaacactgaacaccaagcatcccaatgccgtgaagatacaaagtagcagtactaatcaagcgtcaaactttgcggccgtgcaacctgatcacatgtttacacgcactcttgacccccctgtcaggctgtcacgcgtgctgcacgcgagtttaccatattttgtccacgacgccctgcaagcaaaaattaccagtgaaataagggagaaaacttaatcaatctgtcctgttaacgaacaatttgcagatgaacacagatatgaaatatgcagtcattgctgaagtctgggatgatgagcttcccagtgagcaaacatatatcaggcaaaacgtgatgtcagcatcgggagcaagcaaaaggccgcggcgggggcgttgtccagtgcaggctggagcggcggaggcgcggagcacagggggctggatctcgacgacgaggggggcccgcctgccggcgccagcggcagcggcagcacctgcagccacaatgccgcatcacctcatcctacacatat

SEQ ID NO: 4976 - DNA, 14956 bp, Oryza sativa
atactggattcatcgaccctcggaaagtaaacgtcgcaatgctcgaccagtatccgcaagccacagaggacaatctcgtccatctcctgaaggcgcagcattacaagacgttcatactgttgccgtacaacacagagttagtttaattttactgtcttcctataccaaatttcattcccgtacgaacatgctaagtgtttcatatgtaatgcatcccacgcacattgcagattccactgggtgcttttactcttcgacctggagacctgcaccgtcaacgtatatgactcaatggataaaaaagagtctacgtttgacaaggttttcgaacttatagacaggtactgtcataagttcctatgttaattaagaatcttgttatagttaattgctactacgaatcatagctttaaactccatgtagggcttggtatcggttccgtcatttggtccgcagcaaatggagaaaaagacttaggcggaagttcaattttcttgtgagtacacatgctctacatttatatttctccgattcaaatacatacaagtgtatattaattagatctctcgtcgtttgtcatttatttatagtgcgcaaagcaaaagcagggaactaacttgtgcggctactacgtgtgcgagtattgccactgccttgcagaccaaatcatcaccacaagagagctcaatgtacgtacaaataaattcaaaatttcattacgtatcgatttgttgtttaattactaattaatttcatatattcatatagtttattcgcatgagggataacctgatcacacacaaggaatttatcgcggcggttcaagaacaactcatgggattcatcaacgaacaaatccttgatcccaagggtgaattctactacgacggaaatacaattcataggtccttagcttctaagatatcaactactactacgtcgaaatcgtagctagctaggacatataaaggattgtaattaatacatgtctatgtttctatatgcatgtgtacacatttctataatgtaaatatatattttggtcatatatatatatacatatgcatttgcataacatatatatgtataaatacatatatattatgcatgtacatatgtattgaaacatatataaatataatatatatatatatatatatatatatatatatatatatatatatatatatatatatataagaaatttgtttggggctccatggggcccgggcaccattgttgaaattgagtacatacccaattcagatgagtatgaaactttttcaattcaaatgagggtatatatatatatatatatatatatatatatatatatatatatatatagagatagagagagataaagaggtatgtgtgtgtatatgcacatacacatatatgtgtgtgtgtgtgtgtatatagagagaaaaatacatatatatatatatacacacacacacacacacacacacacacacacacacgcatatgagtgtgtgtagaaaacaaaaacatagagagagagagcgcgctctctatgtgtgtgtgtgtgtgagagtgagagagagagagagagagacacagtctatagatatagagagcggggtgggtgtgtgtgtgtgagagtgagtgggaatctctatatatatatatatatctatatatagagagagagagagagagagagagagagggcgagtatgaacataaacacacacacacacacacgtgtgtctctctgtgtctgtgtgtaagggcgcgcgcgagcgggcgcgcacacaccccctgtctctgacagagacagacacaaacacaatatatatatatatatatatatatatatatatatatatatatatatatatatatatataggaaatttgtttggtgctccatggtgcccgggcaccattgttgaaattgagtacatacccaattcaaatgagtatgaaactttttcaattcaaatgagtatatatatatatatatatatatatatatatcggcatataaatacttctttttgacgaaaaaagataaagccagtctacgaaaaatacatggattggttgggccaaaattttcaaaagccataaaagatatacaatgaaagagagaaaagtgagtttgtgtatcttgtggatcatagttaaccttgaaaactctatggagcaatcaaataacatattggtaaagaatcattcgaagaacttacgaagcactctacaatatgcatcgacacaccgtgcagtatagctaaatccaatgtataaattgaactctaagaagctagcattcatagagaattatctgtaaggagtttatacaaactatgatgatgttctctaaatccactgagatgagaaaccgaatgtatggacatgaatgaatttgtgtcaagaaaaagagaagtccactatgctcaccagattcatcaatgcatacacaatcataattaggaaactatgtacaaacataccttatttccttttgctagctctaaatcctcaaatttatagcagcataaactgatctgtaaacccgtgcaccctagaaacttgataaattctcagtcaagcacctgtagcaagcctcatttgccctgataaccactcaatttatattagcccactgctcactgaagcactgaatgtacgtacattgtttcatctttctaccagaaattagtgccgatcaaaataattagttactctctccgtttctaaatatttgacaccgttaactttttagcacatgtttgaccgttcgtcttattgaaaaacttttgtgaaatatgtaaaactatatgtatacatataagtatatttaacaatgaatcaaatgataggaaaagaattaataattacttaaattttttgaataagacgaacggtcaaacatatttaaaaaagtcaacggcatcaaatatttagaaacagagggagtatattgttaacgaccaaatttcataaattctatcattattggcatcggagatgaagatcagatcgaagtggaatccaagatgaagatcgttgcggaaacagagtaagaatcggctgcagtccaaatcggctaaggtcaggtcgacagagttcgagtcggacggggctagccgatacagccgattagccgatatagccgattccgataatatgactcggtgtacgtcatcgggttcaagttgatgtgtttcaagataattgccacgcatggatagagtcctgggaaggcaattgtatctattaattagggtattctatgtaatttctttagagatatgtttgggcaaaagtctgccgtaaagacttatggtatcttagagtttgttagagataatagtcgtgtctattatggacgtatcttgtaattctcgggtataaatagacccgagccctatgtaaaaaagaacaacacatccaatacaatctcggcgcatcgccaccctttatgctttacttttatttcgacgagttcgtgctctcgggttgagctgcatcggtttctgtcggtgacatgggatcaggagtatcatgactagaggtttgaggcagacacaatcgcccacgtcgcgcctgcttccggcggaagtggaggtaggtatgggccgtcctatcagaaggtcattcggacggcaaccatacaagtctccatctgtttatgaaaaggtggggtaagtccccacaaaaaaagagagaaatggtgcatgtggtatccccttaagatataaaaggaggaccttgcccactgagaggggggactagacttttccagattagaaacccagaacaagggagaggctggctgatactttgtagctccttcatacacagatctcccaaaacataggagtagggtattacgcttctcagtggcccgaacctgtatacatcgcctgtgtcttgtgtgtttcctgtctcgcgagccttccacatacagagagcttagaatctctccctgagtccccggccgaaccggcaaaggggggcctgcgcggtctcccggtgtggagccccacgcttcgtcatctggcgcgccaggtagggggctctgcgagggattttctgagctctcgcactctttcgtgtgcgccaagcttttcctgttcagcccaatggccgagccagcaaaggcgcacgacctctccccgagtatgagcggtgacgacagggagccaaacccacgccgtcgagctcgtactccaccgccccctccacgccaaagtcctaggcgggagaaggcgctcgagagggccgaaggatccgcgacttcgacacccacaggaggtggagaagggcggcgagatggggagcgtcgcctcctcgtctacggcgacggcagcacgccccagggcgcgctccaagctgcgggcgcgctcctacatcacccgcccgtcgcccatgacccggagtctccagcccaacgttagctggacgatgtggccaaattggtcatgactgcacggcagcgcctagatgctggtgggcggtcctccgccaccaaggcctctggtgctgctaccaccggctccgcatcgtcaagacggagggcgcggcgagcggcagccgctgttcgccattcggccgccactccttcgtcaacgcctccgacccgggaagatctgcgtggggaaccggatgctcgcatcagtatcgagcgccggcgtaatggccgacgtgctccccacgcaacgtagggcgcctcctcgtccggagtgtcacctcaccacggacgcggggatcagccctccgtgcccccggttggtggtgtcggtagtagagcctttgtggcgagccttcggaatgtccgttggcccccaaggttccggcccaccatcgccgaaaaatatgacgggagcgtcaaccccgccgagtttctccaggtctacacgaccgggatcgaggccgccgggggtgacgacagggtcatggcgaatttctttcccatggccctgaaaggacaagcgcggggttggctaatgaacttgccacccgcgtctgtccactcttgggaggatttgtgctaacagttcaccatgaacttccaaggcacatatccgcgcccaggtgaggaagcggacttgcacgcagtacagcgaagggatgatgagtcacttcgctcgtacattcagcggttctgtcaagtccgcaacaccataccatgcatccctgcgcacgcggtgatttacgcgttcagggggggtgtgcggcacaaccgcatgcttgaaaagatcgcctccaaggagccccagactaccgcggagctttttcagctcgcggaccgagtggctagtaaggaggaggcatggacctggaacccctccggttccggtgtggcagcttcggccgcccccggatccgccgctcagatagggcggcgtgacaggaggaggaagaagaggtcagcccataccgacgacgagggtcatgtcctcgccgtcgagggcgcttcgcgggccacccgaaaggggaggcctgcgggaggcaaaaagaacgaggccggcgctcccaacagggagcgcccaaccggcaagtggtgcaccgtccacaacacttcccttcacgacctcgcggaccgccgtgcagtcaaaagtttggctgagcggacgaggaagtgggaggaggagaggaggcaggagcgccgagagggcaaatccccggcggttccttccggtaatcggcgaagtgaggccaagcagaaggcccccgccgaggacatcgatgacggcgatgatgacctaggtttccaagagcttggggccaccattgccaccgtcgatgggggagcgtgtgctcacgtttctcgccggagcttcaaggccatgaagcgagagcttctagccgcgacccctactcatgaggcgacgtgtcgggcgcggtggtcggaggttgccctcaccttcgaccagaccgaccacccaccgtgcgttgcccggggagggcagattgcgatggtggtttctcccaccgtttgcaacgtaaagttggggcgtgtcctcattgatgggggagcggccctcaacatcctttcccctgcggcctttgacgccatcaaggccccggggatggtgctccggccgtcccagccaattatcggtgtgacgccggggcacacgtggccgttaggtcacatcgacctaccggtcaccttcggtggatccgccaacttccgcacggagcgggtgaacttcgatgtggcggacctcagtctgccctacaacgcggtcctggggaggcccgcgttggtgaagttcatggcggcggtccactacgcctacctacagatgaagatgcctggccccggtggccccatctctgtccatggcgacctcaaagtcgcgctcgcttgtctggagcagcgcgcggaccacctcgccgctgcatccaagcccgagggtggcgacgagaggcttggcgcttccgcccccgccaccccgaggcaacggatgatcacaggcgacgaggtcccggtcaaggaggttgccctgggcgacggcccgtccaagaccacacggatcggtggtcttctggacggcaaataggaagacgcgctcgtctccttcctgcgggcaaacgctgacgtcttcgcatggagaccggcggatatgcccggggtccccagggaggtgattgagcaccgtctcgccgtgcggccgggcgtaaggccggtccggcagaaagtgcggcggcaggccccggaacgtcaagccttcatccgcgaggaggtggcgcgacttctggaagccggattcatccgtgaggtcatccatccggagtggctggcgaacccggtggttgttcccaaggcgaacggcaagcttcggatgtgcatcgactacaccgaccttaacaaggcatgtcctaaggatccttaccccctgcctcgcatagatcagattgtcgactccactgcggggtgcgaccttttgtgttttctagatgcatactctggttaccatcagattcgcatggctagggaggatgaggaaaaaactgcgttcattacccccataggaacctattgttatacgacaatgcccttcgggttaaagaatgcaggtcctacttttcaacgtactactcgaatttctttgggtaaccaattaggacgtaatgttgaggcttatgtcgatgacttggttgtaaagacgcgcaaccaggaaatgttactctcagatctagcggaaacttttgagagtctccactccgcccgcataaaactaaaccccgataagtgtgtgttcggtgtacctgcgggcaagcttctagggttcttggtctctgcccgaggcattgaggccaaccctgagaagatacgggctatagagcggatgcgcccccccagcaaacttagggatgtgcaatgcgtcaccggttgcatggccgccctaagtcggttcatatcgaggctgggagagtaggcgttactcttatttaagcttctcaaacgctccggaccgtttacctggacggaggaagccgaaaatgccctcacccagttgaaggcatatctaagctctcccccagttctggtcgccccggagctagacgagcccttgttactctacttagcggcgaccccgcaagtagttagtgtggcattggttgtggagcgcgatgagaacaattctcatttcacgcttctccaccctgtgccgacttggcccgggagagagcagggaggagaggctcccgagccgaacggtggcccaaggcccccgacgaccggagttggccctctgcccgcttgtcagacggtgctaggagcccccgacccccaggaaggccctgaggccactgtgggaaggccgcacctatcgcccttcgaccccgaggctaaccctgtgctgacccgacccaggaaagagtagggagaagaggcccccgagccgaacggaggcctaaagcccctgacgatcggagttggccctttgcccgcttttctgatgacgccaggagcccccgacccccaggacggccccgaagccactgtgggaaggccgcccctgttatcctccgaccccgaggtcatcagcacagaagataagtgcgccccgcgaggctgcttggacgaagagtgccccagggatgcggcccctagcgaagaggatcggccccaccgaaaggtgcagcggcccgtctactttgttagtgaggccctccgggacgccaaaacccgataccctcaggcccagaagatgctttacgctattctgatggcctcgaggaaactgcgccattatttccaggcgcatcgggtcacagtagttacgtcttaccccctcggtcaaatcttgcataatcgagagggtacaggacgggtggtgaaatgggcaatcgaactttctgagttcgatttgcactttgaaccacgccacgctatcaagagccaggccctcgccgattttgtggcagagtggaccccggctcccgagcccgtctcgatccccgaggccagcacggacccctcgcagctgcctcacaccgcccactgggtgatgcagttcgacggctccctgtctcttcagggcgccggtgcgggggtcacgttgacctctccgagcggagacgtcctcagatacttggtccgcctcgactttcgagcgaccaataatatggcagaatacgagggactccttgccggactaagagtggcagctggactggggatccgctgcctcctggtgttaggcgactcccagctggtcgttaaccaagtctgtaaggagtaccggtgctctgacccgcagatggacgcctacgtgcgccaagtacggcgtatggagcgccattttgacgggattgagcttcggcatgtgcccagacgggataacatgattgccgacgaactctcacggctcgcgtcctcgcgagcccagaccccaccgggcgcctttgaagaaaggcttgcccagccgtcggcgcgacccgaccccttaggggagacggatgcgcctgaccggcccccgaggcctgtcggagtccaggcctcgggacccgaggggagtgctcccaactcccttagattgattgcttggatcgccgagatccaagcatacctcacagataagactctacccgaggaccgcgaagggagtgaacgcgtccatcgcatctccaaacgctacgtgctggtagaagggaccctctatcggcgcgcagctaatggaatcctcctgaagtgcattcctcgggaacaaggcgttgtgcttcttgccgatatccatgaaggcgaatgcggagcccactccgcctcgcgcaccttggttggtaaagcttttcgccagggtttctattggccgacagctcttaatgatgcggtcgacctggtccggcgatgtagagcgtgtcgattccacgccaagcaaatccatcagccggcccaggccctgcagaccataccactttcgtggccatttgctgtctggggactcgatatcctgggaccgtttaggcgggccccgggcgggtttgagtatctgtatgtcgcgatcgacaggttcactaagtggcccgaggcttatccggtcgtcaagatcgataagcactccgcacttaaattcattaagggcatcaaggcccggtttggagtgcctaaccgtattattacggataatggcacccaattcactagtgaactcttcggcgactactgcgaagacatgggcatcaagctctgcttcgcctcacctgcccaccccagaagcaatggccaagtggagcgcgccaatgcggaaatcctcaaaggccttaaaaccaagaccttcaacatactcaagaaacacggcgattcatggatcgaggagttgccagcggtgctctgggcaaaccgaactacaccaagccgagcaaccggggaaacgcctttcttcctcgtctacggcgcggaagcggttctcccatccgagctcaccctgaggtctcctcgggctaccatgtattgcgaggctgatcaaaatcagcttcgcagagatgacctcgactacttggaagagcgaaggcggcgcgcggccctccgagccgcgcgctaccagcagagcctgcggcgctaccatcagcgccacgtccgggcccgatcactctgcgtcgacgacctcgtcctacgccgcgtccaaacgcgttctggattgagcaagctttcaccaatgtgggagggtccgtatcgagtggtcggcgtcccccagccgggctccatacggctggccacgggcgacggcactgagctgcctaacccgtggaacatcgaacaccttcgtcgcttctacccctgaggggggggggggtcgggtgtcaggtttcgggctcgggccaacccccctcgggcgtgcagggttggccgggggctacaacatatgcatattcttatttctcttatatctgaatttctataaaagcagtttcaatttcctaaaggctgtatctgtgctgttttttccttttgaagaatcttgacttgaaataggtcactcgtgctcaatcctgccctcgggggctcgggtcggctaaaatcgccaaacggggcccagaaccgagccgtgccccgaggcgtggtgaactccggggggggggggggggaatcggcaaaaacccacaatcgggtcacccataaccctcggtcaccacgttcccggcctggccagtctcgacatgtggatctccccaggcactagcccgacccgcgccttttgaggaccagaacctgggcacaagcccttattcaagctaagacacaaaaggaccacggcacagatcatcctcatctcatactcacagcaagatgaaattaacacaaaaatttcttcatttttgattacagattaagttgatctatacaaaaaagaggcccgaaggccttagaagaaagaaaagaagaaaaaactgaagaatggcgggggtctgggggctcaatccgatgcgcccggatcgccggcctcgacgtcactgtcgtctgcaccaccggcattgccctcctcgtcggagttgggggcgaacgcaagccgaggggccgagccctcgaagctgtcgacgatatggtcggcggcatcccggacctgcgcgcgcgcgcggtcctcggtcccaggagggaactcatccagcgccatccatggagagaaattggggtccctggcctggtaactcgccaggacgagctccaccgctccttgggcgaggtccctcgaggatgacttaattgtcttctcgagctcctcggggagccgttggagagccccggccatcttcgagaggcgctgggcgaggcctccctggttggcggcgtactttacggtccgccctctccagaggcccacttgccgaccggcgcaatctaggcgggagacggcgtcccaaagcatgccgggccctacctcgcctgccaagcggagggcttcgacctccccgacggacgagtccagcgcgccctgcagatcggcgatggtgcgttcggcagctgcgaggcgggcggctaagtcgctttcgcccgtggccgtcccgccgctgcgcgccctcgcgtccagctccttcgcccgcgcctcgagctcagcggcccgttggttcagtacggccctctcggcgcgggcaccttccagattgcggcgcgcctgctcctcctgcgctgcctcgcggagggacaggttgaccgccagctgttgcgccgcggcctcggccccctcgagagctcgctcccgttcggtgagcgcgtcctcgcggaggcggagcgtgaactcttcttcggcgcaggcagcctcgtgcgccgccagcgttgcttcccggatggtgacggcggcctcgcggtccgccagatccctctccacgacgctggcgcgctcttccagcgccatggcgcgagcctcaagggcctcttcgcgccgctgggacgccgcttcggtctccgccgcccgctgttctcgggcagcggtagcgtcaagcaccccctgggcggcgtcgagcttcttccctagctccgcctcccagctcccgtattgaaggcggagggtgttctgcgcctcgttcatcacggtggtggcaatgagggcagccccccgttcctcctccacttccttggcgatctccgccagcaccttcttacgagtttcaagctccgagacgtgccggcggtgagccttacggcccacctccaccatggcctccaccgagcgtcgcccctcttcgacacgcgcccacgcggcgtcgagctccgcccgctctgcctgcaggacctccacctgggcacttaacccatccaacaccgtggtgtttgcggcggccaaggcctgcagaaggggctctgcgttcagtagggcgatagaaggcgtggggaagagtcgccttggagaggatgccacgcggctcgggccgccgatggaagtgccggactcggggatgtcccccggacccggttggtcctgagcgtcgcccgagggagtgtgcccaagcgacgcgcccgcagcctcgtcgccagctgccccagaagttgtcgcctgagcgtcgcccgagggagtgggcccaagcgacgcgcccgcggcctcgtcgcgagctgcctcggaagtcgccatcgcctcgtcctggcgaaatccgacttcctcccgagcggcttccccggcctggcgggcccgggcggcctcctcccgagcggtttcctcggcctggcgagcccgggcggcctcctgggcggcctcctcggcttcccgtaggcgatccgcggcctctcgccggtcagattcccgcctgagggcctctgcggccgccggatcctcggcctcagactggccggacttgggatggcgggagggacgcgacgggatctcgctgaaacaaaagaaaaaaccagaagacgaacaagatgggtgagtgaaaactcgcgttgagaaaatgaatacagccacgatgggtgagagacaaacctgcgagggggtcggttaaacgaccactttggaggggaaatgaggtttccccgagatggttctgtctccccaatcttacggggccgcttcttcttgcgctccccctcgggctgcgatgttggcgcggccccctccgggcgcctgttactggcacgcgccgccccgccccctcggggacgagatgggggaggtgttcctccctgcttcctcttcccccgggcgtcggcagggcggctgctccccgggcccctgtcgcgggacccagaagcacgaccccctctcggggtagattgttcccccctgcggctcccgcctgcgccgtcgtggccctttggagctcgctcctctgaggccccgaccgccatcataatggtcaggatggaggcgcggtctggatcgctgcagagggggaggattccttggggaatgagggccgcctctacggagttgagattcagcacccgttggaccaatatcttgaagtcctcaggagcccagtcccatctcactccctggtgggtcctcgtgaagtcttcgaacccggtgtactcccaggcgccccgagcgcgtcgctggagcggcgcaatccgacgacggaggtagtcgccgtacaccatggcccctgtgagcccctgggatcgcaggcccgccaggcggtcgaggacggcgtcatagccatcccccagatctaccggcgcccgccagctggaggcctgcaccgggggctggctcggaagtcggaggcgcgcttcgtcggcgaggggagtgtagaaccagtcgctcttccagtcgtcccacttcttgcggagggcgcaggggatgtagcggttcagcaccggcccccgtggctggaagtagcagccaccgactaccgatggcggcgacaccgactgcacggtgaagaaccaccggaacagccgaagagatgggcgcaccccaatgaacatctcgcacagatgcgcgaagatggccaatgtcatcaccgcgttgggggtgaggtgcgccatctggagatcgtagaactccagaacatccatgaagaaagaagaaaatggtggaaccagccctgccattgcaaaggggagaaagaagatggaccgccccgggtagtctggcgccgggcgtccctcgcccagcgtgactatctcccggccggtggcagattccggcatgaagcggcgcgacagcccagcctgcctctcgctcacgatccgggaaggcggcagcacgctaccatcgagcagagcggaaccccgtgccatggcgccggaggaagagaagattaagagcgagcgcgtgtggcgaaggtagggcacaggaaagaaggagttagggcgcaagcagcgaaggcaaggggaataatggcgaaaggaaggaaacagatcccttcctcagtgcctttatactcttgccaacgctgtgcccggctcctcgcttctcgcgcccactatttcgccccctcgtttctcgcgcccacgcttccactaatcccattcgcccgcttgcggcgcatgaggtggatatgcggttgtggcagtcgagatagatcatatcgtgcgcgcgttaattacgctcgccgaccgaagcgacgttaccatatctccagacgaaacgaatcgccatgtccagattcgtgtgctactcaagtaatgtggcagtcttgaagagaccgctcattgttgacagccgagttaccattgccgatgtgcgtggtttgtgaccgttgggtttctgcccaattgtggagaccggtcccacctgtcaccaggtcttaggagtggcgtcacgcccgaccgtttcccttaaagagggcgatcgccctggcataacgccgggggctactgtcggtgacatgggatcaggagtatcatgactagaggtttgaggcagacacaatcgcacacgtggcctggtacccccgagggacgtcgggcccgagggtgatgcgttcgccctcctcttagtccccccgagggggtcgggccgcacccccctcggccccgagggccgagcgccccgacccctcgtgggtttttgctccgcgtgtatgggtt

SEQ ID NO: 4977 - DNA, 12781 bp, Oryza sativa
acagatgatctgtctcatctagtatcctgcttgaagcacaaacctgccttttagttaccatggcaaccctgaggccttctttggataacaaggcgacatgttatttcctacttattagactgcttctcaattccaacttatgtttgcaactttgcatatatgacattcctctctttatctgtttcaagagaaataggtccagcacattgggaggtctgactatctctatagcataagctatacagttaaggtggcccttgcatgagctaatagaaagatgtgcctgcagtgatgtacccatgcatatgcgttgttattagttgtaacctaggttctatgtagctaacctgctaactccacggtacaaacatgtgtcattgcatcttagttggaaatttccaatcacatatttctgctcccgtatgtagcatccgtctccgctggcttttgttaacattgctatataccatctcagttaaaaccgcagcatctttcctgccactgaaggggtgttttagcagctactcaagaaattatttagattgatttttggctaaccctgatttaattgacaggtagctcgagcaaaggctgaacatgccatgcaactaaaacaacgacttggtagtgccttgaacaatggtgcaggatctagttctagtccactgatggttacacttccaccaggacaaacagctgccatgatgcagaattcagctgcaatgccaatatttccccactatcaaccactgcatccagcaacctcacttcctgccacatctagtgctgttggtgatgagcccaaaaaaactgcagcagctatggcagataagcttgcatctttgtcagctcctgagaaggtgctctcctccattttctcgtcccttgctgctgaacaagcaaggaatagtggttcgacttctggagatctctctgcaggacctccaggctttgagagcaataagaagcctaggcttgacaaccctattcatgtgagtgacatgggtgctcccccattctttgggcaagtaccacaggtgcaaccacagattggagcaacagctgctcttggaggcacacagccaccaacacaagcaaaccaagcaaccggttcatttccaccacctccacctccattaccacttatgccacaatttgttcaaaatactggaggaatgtttggaatgggaccttttgggatggtgagtggctctgcgccgcctccacccctattgcccaacattatgtcagcaggttttccaagactaagcgcgcctccacctctgcctctgcctacacaacctcagaaccagagtcagccccagcagcagcagtctccgcaggcaccacagcaatcgccgacctcgacaggattttttcaaccaccaggtgctggcttcttcccaccagtgcaggttcagcaatctccatctgcccaacggcaatgatgattctacaacaattgttgggctataaaggaagcaccttgtgctaactttgtatattaaacaataccctgaggattgatctgatagttggcgagtcctgcgtcgtgaagcaggattaatgcttatgaattgggaagatttgtaggataggcttgcggcttatgtgatgtacaactattccttttggtctgaggagttgttcaactcttcttggttatgtgaagttagttagactttacttttgtttgcatagccagatcttatttttagtcctgaggcaaacaaatgttggcattacattttttacttaaagaggtgcccaagtgaaaacctttttgggctcctctatggtagaacttacctttggctctgttagtttgctagagaagccatatatccatagatccttacttgaagttgtgaactgcaaatatttgtcatgttcaagtttatttgtttatttattttttattcaaaatgattgctatgcaagtttgctgttttccattctttcattcattctgaggatgtggctgggttgttagctcagagtaagggaggataattcaggggaggtgaagtctgtaccctgcattgtaaatacaagtacaacatgtcctctttggcaaggttattattgttcagtaatcctgaacaaaaacctcctagcttgtcacagtaaaagtacgccggtaggaacatatatttgctgggtgcttcaggtatatgaacacacaactttgatatggccaccctgagcaattgtggatcaggaatacagactgttatttctgctgattcttgttccagtctaggcagcatggtcccaggaaatagcccattagcctgtgaaatagaaatgatttggaagaagtgacagatagggagaaaaaggaagccaaaaggagcccacaagtatcattcacatactgatctgaacaacggacaagaaattgctgttagttccccaattgcttattctcggtgaattgaaggatacagcagattaagctagcttacctaacggccggaatgtgagtcatccagctgattaagctacaagctactaagctagcagtttagtggaactaatgatgaaactagcgagacgatcttaactgtagtaaagaaagctgggttaaaactatctacaagatgggataaatcataaaactcatctgcaaaacttttgctaactaaaacggagagcagaatccaggaagaagctgaaggttgccgggccggatgcttctaattgtgcctgggattgaagttggtcccggggttgtgcttcatgctggcgtcgaactccaccttgggctcgccgttcgcctgatgaacgccattgactcggaaggtgttggtagccattgccgccggcgccgctgccgtgggctgctgctgctgcagcagcaacctcctgctactcctagcagcagcagcagctactgcattgttgttgccgtcacgcaacaagtcggtgccgatcgttggtgatgcagcagcagttacagagaggagaagatggagcaagaagatggcagcgaacacgcggtgcaaagccttcttcttcatggtgatgatgctttcttgatcagccgtgatgtggtggtagttgcagtactgtgtgcgtgtatggcagttgagcatcaagggggagcaatgctggcttatatatattgttcttttaacttgtgttacagatacagactagcttgattgcagtagcagtaacatgcagatgcaatgtgcaggcgcgctgcttccactacttgggaacatgcagagaacatgccacacatttccctgtaaattttagcttctgtggaatattttgttaagaagaaaggagtcatgcatcaagtgggtctggaacatgccaccctgagacctcacttttgttttgcagacctcaaatagtagtgctgtttctctttgactgaaaaaactccttttccttgagattctcagataatctagtccataaaagtgcttcacattaagcatatgatccataattctttctagggatatatgcgtgagtgccgaccatgtgaaagatgcttctatttgactaatagcatctcttgccgtcaggccggcagtatacgaacaactaaatacaacacgttcggtcatgtgatcagatcagacattcgtttttctttcaagagtacactcaggatataaaagaatctcaataatgttgtatgcttcagattcagatcgggtagcagctcatcgtgcagagtacggctgatcggccgcaaacatatcgtacacagatagcactgtccacggtttcagaatcaagtttttagacccgggcaagcctaacaataacatcagaaattcagaattcattccttccttcctctcttaattttgattttggacagtatatatattcagttcaatgcttatttcagaagaaaattatccaattcagtaatgaacctacatttttgtctgaaacattcgaattgtaggtctatatttgcaaaactgaaacaatgttgaatactatgttaagaataattcttactaatgggatgccctggttaatcataccaagtggaaataccatgatgcatccagtactacataaaaatgcctgtccacatggaagaggctggccatggaccatctgtctcctaagtaaacatgtttgaccataaactaattgccaagtgaaatgctgagcccttcaatcattgcgaagttcatggccacttctacttgaccgtaattgtagatggaaatatggaatcacatggataacgcatttcttcatattacaggaacatcaatgcataccaaatacctgaatctgaagacagcttgagtacatgactattattattatgtcattgcagttttcatagtttcacattttcccacaggcaactgtgtaccgcgaactttgacaatgaggtagcaactattgtcaatgttttaaatatgattaaatataccaaattcaaatgtaatgagcgatactatcttttttgttttttcgttttttgactagcaaagttcagccaccaccaactcctctcttcaatccacataagtccacagatttgatcagccattcgtcaggcttaacttccaagttggttctagctcctgtcaatcattctaacattcttggacttccatagtagatggcatatggaacatgggacattagaagagtggaaatcaacttgtctacatttctaattgtgtcacatgctcattgtatgactgcaaaagggccttctaaaatgaataggaccatctgcggtctctgaacttaaaattggaatgttctaaaggtctgcaaggagctttaaaattacctacacaatttgcaccatggatacacattttgtggcaagaatcgtttttgagacaagctgaagactgacaagaacaatatatgtcatcagagtcttgacaagctagaagcaaaaacgctagacattcggcaggagacgtactgaatttatatgcagaaaagcaaccgacagtaagttcatacagtctcacagatcatgcatgtggttagaaacaggccaatcttgtacaagtggaatatgatgaaacacctatcatttaggaaggttcagggaataaatatcaaacaaatatgcttcttttacatgattcctgtaactaatgcatacattggtgtttgcgttttcatgtctagaaacaaagatgctttagtcttgcgaaatatacaaattttgatgatattcagccagagataagctaattcgctgcgcctcaaaaccggaagctcaccaagggggttcggagttttcgactccgagcccccttgggtctctggggcaccgtcggatcaggcttgtgtggtccagattgagtagatccactccacggcgtgaggtgtcagcgacttgtttgggccgtggtgttgcttgctgggcttgaggtccagcacggacacatgtgtaggcccaacctcacacttcattgcatttaggtgtgatcaagatttgactttgttggttataaaacagtcccgagtttcttaaattttggttacatggatgagccgctacttcctgtgatggcatgccacatctgtatactttccctctggtaataagtatttggcgtttgggaacatcatttgtccaaacctttctcgggcaaactttcaaactaaatatttgagttcagatcaatgatggttacctgccaataaccggttactttttccgaaaccaccggctacaatcacaaaaaatgaaaaatgcatctacaatagatcaaaacaactgtacaattaaaatttgatgtttaaatttgaatctagaatactccggccagcctagagaaatattgacgatccacgagcctagaaacacacgatcgatgactaagcctagaagttagaacatgagatgcactttcacttggactatgagttggatcgacacatgcaagaatattgtgttgcgttaaagcagcaacattttttgttgaatgttgaattttccctttattctgaacgagaacagcaatatttgatgaatattcgaatacgactgaactgtttgctgttgcccaagtaaacatttactaaataattagactcttagttttatttcaaacatcgaaggggatgtagctcaaatggtagagcgctcgctttgcatgcgagaggcacggggttcgatcccccgcatctccagtttttattttttttaaattccttttcttttgtctaatttaattttatgtttttctctaatttaattctatgcgcttctaaattcttgtctaatttaactatgtactttttaattccttttcttttgtctaatttaattttatgattttttttctaatttaattttgtgcgcttctaaattcttgtctaatttaactatgtgctcttctaattttctagtgccatattttgcctctaatttttggtctaattttaattttatgctcaccttattttgtatgtgaatgtgagtatgtgacacgatgaattcttttgccttttttggtttaatttagttttttgagcttctaaatttttataacaattttttatgggattctctttagtactttcctttagtaacagcggctgacagcttggttccatcccacatttcaacgacagctgctatagcctattccttccgtaaaaaagaatagttcatattcgttgtttttagggtaggtcatattatattataggttttttttatagtagaagtacagggctacaagtgcagtatggtgctatggatatcctgcctgccgtatcgtatatagttcatccccactaaatatagttaatgttatttctctcttctcttattaagtcatattaataagagaagagagatatggtttaaattttctcttctttcttctctgcaatctcaattatctttaggcttaaaatttataagtattaatttatttttattttaataatcatattatatctttgcatattatgtaacttagttcattttccacagcaacacggcggggttttcatctagtttatattaagaactcatccaacgtgaattccgttttcaatgcttgttttaaagaaagattcgatgagtgcattttttttaagaacacgataagtgcagttgctcataacttcacgctgaaaaaacgttggcactttgcaatctccattttgcattttacaaaaaatatgtcaataaagagcctgttccctttgatgtcattttcaatcatatcttttttttacaaagttatcaaaaaaatatctacgtttagtttgttgtcaaatttagtcaatacataagaaatcatgccaaaattttgataatattaccatcttgctaaaattttagcattaacaaaacttgataagatttattttagctataatctgaacaggcccaaaaagtaaaaaaggcaaactttttgaatataagtataaaaacaggttaatttattcattccagtgaagagtctaatgccttgtttagtttccattttttttcaaaaacgtcaaatcgaatctttgtacatatacatggatcactaaatatagataaaataaaaaactaattgcacagtttatatggaaatcgtgagagaaatcttttgagcataattagaccatgattagctataagtgctatagtaacttatatgggctaatgacgaattaattaggggcttaataaattcgtctcgtggtttctagacgagttctgaaattagttttttcattatctaaaaacccttttcaacatctaatcaaacgtctgatgtgacacctataaatttttctttccgcgaaggaaacaaggcctaattaatgttgcgttcgtttatcccatgggcgaagcatccgaagcctcactaaatctgtgtttagcacatgcgattagcatcaaccagcccagaccgaagcatctcctcctcttcttccactgtgtgactcgcgcagtgtgatgtgtgtgacacgctgtgacggctgacctgacgaggacaggcgaaaagaaaacttgttttggagggagctttgactttcccatttcacttcatcagtttccctcctccattttcgattcctcctctccgcaatccaaacctcgccgaattcatggcctcctcggccttcaaatccaccacccgccggaccctccaccccgccgccgacgaccgcccgccggctcgtccccgcaaggccccaccgccgtgcccacgccgctcccgcagcgccagcgtcgagccccgcgcccgcggcatcggggagtacgccgccggcaacacccgcaccaaccctctcttcgacgactccgcctctccgccgccgccgcagccgcaggtggatacggaggctgctgggtgtcgcggcggggaggcgagacgggagagggggagggaggtggcgcggaatggttcgtgcgccggcggctccgggagggcgcgctctgtgtccctcgcgccgcggggccggggcgccgactcgtcgccgtcgtgggggaatggtgatggaggcggtgggaggagggcctccagggcgccgtcggtggcggtggacctgcaaccttatcggggtgacgaggttggtttctgatttctcagcggactgggggactgggaagtctcaagaaaaagaaaactcaaacttttttcttaccactacttttgcaaaactctatttttttttttgcaataggaactggaaagaaatatattggagtactttgtaattctgatatcataccatatacatgtggaatgaaaacaatctctctagattctactatatgataatgaacaaaatctactgttttttttttcgttatagtaagtagaaagattcatagtaatctagttcacttggagttgtcactgtagaagcgcagagaaattgagactcggtctttgcattccatctccaccaatcctttgctcgcaagttctgttcttgctaaattcgaacagagtgatgcagaaatcagagatatgtcaatagaatttcagttttgggagagtatgcattcagtttcgagctcagtagaggtcagaagtgatcattcacttgtactagtggaccataggctggcttttttggttcagtgaccaaagtggtacatgaataggttgttgagttgtattaattgatgcaagatattaactttactagcaaacaagtttgtaagctactatgcttttttattaccaccagacatgccaacacatggctggaaatatccattcagaatctagaagtgccttcttaaaaaaaaaaaatctagcagtacccttgtgagatttatgattatcttgagcatgtaaggattacctatgttaagctaagaatgtctttgaccatttatgttctgtgcatgcttataatttatccattttattgtctccgcaccataccccgttctgttttagaacaccaatattgttttacactcatgttctcaacttatcgtgatgctactattattctttcatcgacaggtcatttggcaaagcaatcattcaaatgtcccagtgcaacaggttattgaaattcctcccgagtttgatccagattcttctgagtttgtctccgacataagtgattacacaacagaattcaaaaaggaggaaattttgcacattccttttgagtttgatctagatagagctgatctggctcctgacatagagcaccattcaatagaactgcaacgggaacaaatggaaattcctcttgactttgatccggacagtgccgagctgtctcctgatataacagagtatacaacaaagctcaaacaggtctgactattattatgccaagtgtgctgcgcctccaattctgtgcagtcaacagtcataaccttttactgctttgattacagtcacatgaacgtgctcgaaagctacgggcagatttagctgtcgaagagcaacgtgaacaagagttgagtagagtgctgaagggtattgtaactacaccaaattttactgaggcacataaaagaaggccaagacgaaaggtaactgcatcaaattttaagtatatttgattctgtttgttggtaaactttctattcattttgtcttggtatttgaactgacctttgtctccatgttgtggtaccagagtagtgtagaacgactgaaagtatcgaagcatttggctgaagaggcaatgaattattttgaggaatgtgtctcgatctcgacattggatagcactgatttctcatcactggaggaccctcaaataaattcagttgtgaacatcccacaaaagagcagaaatacatcttttaacaaaggtggatcaagcattgcagaaatccactatccaacagatcgtcattggcataatgaggttagcaaatcaatgctgtttcacttcactgaggctttgagatttgtagtactttttaggaatatcaacccaagtacccaacagcctccatcattcttttaaacatttatttttttattatgtggttcagaaatagtacagtctttactctctgttaattggcatattgcagctattttcatattcctattgttatccactcaaatattcctgaattgtctacgttgtacttaatgtgttgtttcgagtcatattacatattcttgttgatttcccagcagcattttagtagaatgaaaagtaggtctattttgtggatagtaacgatcattctcacactataacaagtacttcttgccctcccaggaatctgacaaccaaacccagtgctcagttagcttaactggatctgatgtgtctggaggccgtacttttagtcataatatgatgacccccgtttcaagaactacaaataactcaagtgatgatctcgatggctttgacacaccaaaaagcagaagttcttgtttctccttcacccatgaaccaacaaaaactgttgagggcgacgacgttcaacaatatttaagaagttttggaaggggaatcagtaaagatctaagagagataaggtcaagttattgtgatgatgactatgtatttcagaaaatgaatgcagacttacttatggatattgtgacatttaagaacagggtaaattttgggggtctccttatttgtaatattagaagatagtgagaaaacatcaactagtgcgctatggtgggaggactgatattcatattagcaacgtgcaattagtactactagagatgtatacatgttcatatgattctatctactaattgtgatttttttggtcatcgactgatatcatgtgatctgcatgctattttctttttaacctgggaataattatttgtaacattagaagatcctgaaagaaaaaaaaatcaagtagtgcgcagtggtggaaatggaacgtgcaattagtagtgctctattgtatatatatccataggattatctctactaatgattttttcgtcattgcattgctctcatgtgatctgcatgctgttttgttacttgggaataatctgttagtactataaagaaatattatatctattcttgtggatagctctgaaacagttcgcatttgattctacaacatccatttctatttgcaatatctttgcacatttcatcctttttaagttataccaaatgaaaaccagaagtttgcatcgactgctgttggcagctgtctctgtaggactatgttacatggaaggacacatgttttaaatccaattcatgatttaatggtgtttcttctgaacattgaaatttgatcattactacagtaataccaggagagagtgtgtgctttattggatattataacaaattggagtgcaagctcattctagagatggtttggttccatgaaagcttcaggtttgactagtgctgttttgtgttacagaaatttttgtacgatatgcaatcagtccgtggacggttgcattgtcaggtagcttgcaagcaagcatgtttctggtctaatgagggagatgttagatggaaaagcttggaatttcttttatcttgattgaatatttgaataatctggcaacctaagatttatcttcactctagcacctcaaatgcaggcaaagtagatgagaaacgtgtttaacaaccaaaccaaacattcaccgtaccgtactgcctgtactacaagaaacatgtctctctttttttttttttagaatttagagttgagaatattcatatttctgcatcatggaccaccctatactacataaacctagtgttagttgttgtgattgcatgtcttaccctgctgatgaatgtgaacaagctggacggacatcatggtggtgacacaagacgtcagtcggtctaatatcgacagtcagtcaggagtcaggttactaatcatctgggcaactgcagcagactgtctagacaaaaatgtggtcagaaaacagactcgtgataaaccattttggtgagtatgatctactacaaaacaaataatttggcagtcaggcatgggagcttaattgggatgactaatttactcaaatattgaggtcatcacggtcagccatcaaaccgtcatccacggtacaacacaacacacatgtttcacatgatctgtagtactccagtaatacagcatgagtaattgctgaattttctaattgaaggatgcactgtttgtttgatgattcttcatcgaaagggggtcgttgcatcggagctacagtagatgcttgttgtgtacagtaattgactgactgcacacagacacagtaggttgctctgaatgttggggacaggtgttgtggttgcatggctagtaggatgctttcctctgaatgaggaattgcatattttgcat

SEQ ID NO: 4978 - DNA, 13456 bp, Oryza sativa
  unsure (1)..(13456): unsure at all n locations
aggtccatgtccgtgtggtggaacgccggaagctgcgtggcaagcgcgggaagctgcgcgctggcagacaacgtcggcgcgcccgccgcggcggccgtgacatcggacaggtcgccggtgacatgncggcgcggcggtggcaggtccatgtcggaggcggggcgcttgcggaccatggcggcggcgaggtggtgttgttcttggtggtctaggtagaggaggagatggtggtcggaggggagaggaggcagcaaggaggtgatggcatgagaggaggaggagggagaataagaggagtgggtggcggaggaggaagaggaggggaagaggaggagggaggaggagcccatctacaaacgccaaggggaagaggccgtgggcatggcgagcggacgggcgtgcgcgggaggcctaacgcttgtgttgggtggaatttttatggaatttggcgcggcgcaagcgaggcgatggcgcgaagggggagtaaagaggaagaggccgagaggaggagaccaagaaggagaggttagcaggagcatatcacgagcattgagggggtaatttatgggggaagagaggcaacgcaacggcaagctgtctactggactggactgctaccagcgtgtcatttgcccttgggctccgtgtatcctttctttttcgttttctttttcacctttcccatggtagattactcgtaccgatgtttgtccctgttgtaatgttcacacttagcatgtaataatgcctttgtcaatatcatgtgtactgtctacaagtttcacactacagttaaaaactgaaaactttgtaaagcagacctccaaaaatcaagagtaaatttcacaaaactacagatactttgatcaaactatcacaaaactacagatttaagaatgtatttcacaaaactacagatttagagttaaatttatcatggaactacagatttaaggtattatatcacaaaactattgatttaacaactattttattacaaaactacacatttaaaaactattttatcacaaaactacaaattttataactttaaataaataatagtgctatgatctaaactctagaatatgtagttctttgataacttaatcactaaatctgtagttttatgatatggtgcattaaatctgtagttccgtgaaaagtttaacgctaaatctgtagttttgtgatacacattcttaaatatgtagttttgtgataatttgacacaagtatctgtagttttgtgaaatttactcaaaaatcaattgtggatcataagtaggatggagtataagggacctctcaattaagcgcccctttgaatcgtaggaatggaaaaatggagtgtcggtgacatgggaccggaagtatcatgacttagagacttgaggcagacacgatcacccacgtggcctaaccccctcaggggggggggggtcgggcccgagggtgatacggccgcccttaccccctgcctcgcatagatcagattgtcgactccacagcggggtacgaccttttgtgttttctagatgcatactctggttaccatcagattcgcatggctagggaggatgaggaaaaaactgcattcattacccccataggaacttattgttatacgacaatgcccttcgggttaaagaatgcaggtcctacttttcaacgtactactcgaatttctttggatagccaaataggacgtaatgttgaggcttatgtcgatgacttggttgtaaagacgcgcaaccaagagaccttactctcggatctagcggaaacttttgagagtctccgctccgcccgcataaaactgaaccccgataagtgcgtgttcggtgtacctgcgggcaagcttctcgggtttttggtctctgctcgaggcatcgaggccaaccccgagaagatacgagctatagagcggatgcgccccccagcaagcttagggatgtgcaatgcgtcaccggttgcatggccgccctaagtcggttcatatcgaggctgggagagaaggcgctacccttatttaagctcctcaaacgctccgggccgtttacttggacggaggaagctgaacgtgccctcactcagttgaaggcgtatctcagttctcccccagttctggtcgccccggagccaaatgaacccttgctactctacttagcggcgaccccgcaagtggttagtgcggcgttggttgtggagcgcgatgaggacaatcctcattccgcgcacccccaccctgtgctggcttggcccgggagagagcagggaggagaggcccccgagccgaacggtggcccaaggcccccgacgaccggagcaggccctctgcccgcttgtcagacggtgccaggtgcccccgacccccaggatggcccgagggccactgcgggaaggccgcacctatcgccctctgaccccgaggctaaccctgtgccgactcgacccgggagagagcagggagaagaggcccccgagccgaacggtggcctaaggcccctgacgaccggagttggccctttgcccgcttgtccgacgacgccaggagcccccgacccccaggacggccccgaggccactgtgggaaggccgcccctgtcgtcctccgaccccgaggtcgtcggcacagaagacgagtgcaccccgcgaggccgcttggacaaagagcgccccagggatgtggcccctagcgaagaggatcggccccaccgaaaggtgcagcggcccatctactttgttagtgaggccctccgggacgctgagacccgataccttcaggcccagaagatgctttacgctatcctgataacttcgaggaagttgcgccattatttccaggcgcatcaggtcacggtggttacgtcttatcccctcggccaaatcttgtataaccgagagggtactggacgggtggtgaaatgggcaatcgaactctctgaattcgatttgcgctttgaaccaagccacgcgatcaagagccaggccctcgccgactttgtggtggagtggaccccagctcccgagctcgtctccgcccccgaggccagctcgagcccatcgcagctgtctcacaccgccctctgggtgatgtagttcgacggcacctataggaaccggccccacctgtcaccaggccttagaagtggcgtcacacccgaccgcttccctcgaggagggcgatcgccctggcataacgccgggggctactgtcggtgacatgggaccaggagtatcatgacttagagacttgaggcagacacgatcacccacgtggcctaaccccctcggggggggtcgggcccgagggtgatacggccgcccttctctttgtctccccgaggggtcggaccgctcccgtctcggccccgagggccgaggcgccccgaccccttgtgggttttgcgccgcgtatatggggtaggtgagcatagcggggctcacctaaccacatttattgcggtttggacgagcgcgtcacgccgcatgtaacgcagtgcagcgcactcgtttatctggtctgtgaccagtcacagaccaatcagattgcgggttaggtggcgacgggcggtctgacgcacgcctcgccccatcccgtcaggatgagagcctccaaacactcgtccctagccggagccggcgtgttagctcctgggggtggcacgttggacccggtcagatatatgccaggcttcatcctaaccattacaagcaagacattgtatgaagaggggcgaacatgcagattgataaactgacgcgtggtggacaagaatgaccgatttgtgaccggtctgacactggtcatgtcgtcagcagacaaccatgttcccacgtcgcgcctgcttccggcggaagtggaggtaggtatgggccgtcccatcagaaggtcattcggacggcaaccatgcaagtctccgtctatttatgaaaagataggataagtccccacaaaaaaagagagagatggtgcatgtggtatccccttgaggtataaaaggaggaccttgtccacttagaaaggggattttggggatcgagaacgatcagagagggagagagtaagagctctctggttctccagctctttggtagcttcttcatacatagatccaccaaaacacaggagtagggtattacgcttctcagcggcccgaacctgtatacatcgcccgtgtcttgtgtgtttccattctcgcgaaccttccacacaccgagagcttagaatctcacccagggcccccggccgaaccggcaaaggggggcctgcgcggtctccccgtgaggagccccacgctccgtcatctggcgcgccaggtagggggttctgcgtgttggaggaatagaaaaaacataggattctgataagaatgtagttgtaaaacagaggattggaaaatacaggaaaaataaaggaatgactgtttgattggaccacaggaaaaatgcagaaatcggatgagagagatagattcaaaggaatttttccaagaggttggacctcttgctaactttcctccaaaatctctataggattagccattccataggaattttaaaggatagtataggattcaatcctttgtttcaaaagctttcataggaattttttccataggattgaaatccttcaaattccctacacttttcctacgaatcaaagggggcctaaaggatttacataggaatttcatatgatttaaattctagaaaattttcctattttgccatttgatctaaggaactgaagctttccaaatcatatggaatgactcgttatatgtcgatttcaaaggaaacttagcgagatctcaaacctcttggaaaatttcctttgactatatctctcttatccgattcatgtgtttttttcatgcggtccaattaaacgattatttctgtgttttgcgtctttctgttttacactcgcatttctgtcagaattatatgtttttcatattactctgttttttaaccctacgattcaaagggccctaaacatttcacatttttctcctcaaacatttgggggactgctaggaacgtagaattaaaatatcatgacaccttaaatccaaaataaatagaaatatatagaaaactgtggaatagtttggatgaagcacatgaaaacacacgtgatttaaaagagagaggtaggttccgacaaaaacaaacatacgatccatatgaacttcaaaggaatccagagacccaatcattcgttccaaagagccttataagaatttttctaatgagatttagggttagtttggtttgtaacctaaatagaccttaccaaattttgtcaatgccaaattttggcaagttttggcatgactaattttggtaaggtaaagttgtgtttggattgaagccaaaatagtctaagttcactattgaaatggcctatttttcttaggcatgccaaaatttggcttcaaaccaaatagacactaaacactattgaaattaccaaatattggtaagtctaatttaggcctgaaaccaaaccggcccttatatcctttgaaatttcactatttttcatgtgttcaaatggagctatgatagaaaaagaaaagaaatggattgattctggtgaaattttagtaaactcctcggtccaaaggagtattaaacaatgtccaaagtcgtagtttgtcatgcgatgcattggaattaagtgaggattggttctttcacatttccaattctcaccagagtcttgaggcaaaaatttcaaatactaaaatacggaaaatgaagaagaatattactgctgaaaagtgtgtgggcattattgtgacgctacatcgatctatcgtgtagaaactagtagaaaggtagcgactcctttggttacgcctgcggcctgcctgttgaccgactagcttgcagagaacaaagtttgggtacgcacgcatgcatatttgttacacgccgcgacatttcttcttcttggcccgataaaaagggtctttgaaacgttcttgtcaacgagtcttttgatcgatccatccatggatcattcgatatgtacgttgttggggtcggcaggcccgaaagatggccatctccatcagaccaggttagataattcatctttttcactaaaaccaagagaaaaggctatctagctcatgttcatgtagtagagctactaccttggtactcccactgtccaaccgatacaaacatttctggcatataaaatttatccaaattctgttatgatatcttacatttacttttttttatcggtagcacgatctttgtgggtccaaaaaaaactttcaaggataccaaagtagtttcaccttgaacttaatctctgctacaagctcaaagaaataattatatttttgtgaacaaagagagtaatcaaatcaaatcattttaaaacattatttttttaaaaaatatgacagtcgaattaacaagtggtaaaaaaaccaaatcgaactaccttgtggatgaaggaccgaactaaccgcacacaagaacaaaaatgaaggaggtgcggagaatgccaacaaagcgagatggggacagtgcctacgaatggaggccattgcaaatgtcacttgcggaggatgcgatggacgatgccagggtagagaccggcatagctggtgatgcaggttgctatggacgaaacccatgacgaaggatgacacggagggagctagccgtgaaaggatggggaataagacatgctatgaaggtgttgatgaaaaacacgagacctgggagatctgcttaactccaatgcaggtccaaaactcgccttcgggtatgcaagcgtgccagttgatttgatcctgcaatcaacaagaacaaagacaaagaaaccgcggttaaactcataaacgatagccgatcggctaagtgccgatgacatatcatttatttttgagccgatgtcatatatgcatcgatcggcaatcgttaagaaataactaaatctactcgatcggctgtagatattaacgatatataatccttatgtcgatatatacttaaatcaagtgattgggatagatcggtcgccatgccgagacagtataaatcacttagatcgaaatatatactaacaatgagactatatatgttcatagcatagccgatcagatagatctagcatgtatcggctaatactccgataccactctatattaagatatcaaagcaaataggatataccaaacaaagagcctaatatacttaaatgcggcaagatcttaacataaagggcagatttaatatgtcaataaagcatataggataaaagcagttaaaccaggtaagatcggctaaaaccccgatactaccctaatcggcaaccaagaagcaggctagagattgagattctaatcacgactcataagatcaaacaactgatgcagctataagtatgaaaagaaagacaatatctagacaatcaaaccattggaagtttcatagagtggtaggtaccttaggtaatctaagtcaacatcgatatctaacctaatcggttgtcctctacagacagatgttagccgattgtaggttaaatagcgatattgccagagattatgtaagatatatgataactcgacgaattacataaacaagattagagtatcataaagatggaagcactaatcccgagaacgcaagccgccataacaagttttacctcttgttgaagatcgaaaccgatgcagctcaaactgaaagcaagaacccgtcgaaataaaacgaaagcaaaaagggtggcgatgtgtcgagattgtattgaacgtgtgttaatttgattacatagggctcggggtctatttatacccgagaattacacaacatgtccataacggacacgactcttatctctaacaaactctaagataccataagtctttgcggtagacttttgtccaaacatatctctaaggaaattacataaaatatcctaattaatagatacaattgccttctcaggactctatccatgcacagcaatcatcttcaagcatatcaactcaacccgatgacgtacaccaagtcgtattgtcagaatcggctatatcgtctaacccagtctgactcggacttagccgatcccgatcatagccgatttggactccagccgattcccactctgttttcgggacgatctccatctcgaattctactttgattctatccctatctccgatacttagattaccaaatttggttgttaacagagggtcataggggccagagaggggagcaagactaaagacgtagtggcagaagatgaattcgatggattgccgaggccggtaggtgcggggtacctatgccacgccttgtgagtgttgaagggttgtgatgctagcgttggatctcttagggatttagggttatactttcatgggccttagttgatggtaagggtgaaaacggtcatggaattttccaatcgaccgagctttgttttcgtataaggggtaccatttccgaacgtaccctttttagctatttataatttttgttttttctaatttttttatatcatattaatatcgacactgaatagtttaaatgataaatatggtcaattactggccgattgagcatcatttccgtacggacttggttcggcatcagcttggttcggtacggactttggttaatttgtgctcacccttaatcgaatgtgactttccttctttgtcggcatttcaacagctggcccgagatgtacacacgcgacttcccatcacggcacgtacctcaagggttaggtttctctccactacttccattagcattacaccgtcttaaaaattagtatttcaggcttgattaattaaaaaaccgtctttgagctgaccatttcaaaaacatactccttccgtccaaaaaaaatatctggagagaagcctcccccgattcgtgttactagattatgtctcatcccaattctaggttggtttttttttctattaaaacatatatatggaataaaggcatattattttgttcttttgaaaatatttatgagatgaaaatagtagtataagaaaacacccttcatcgaccactcaggcttgacaatactggtagttccaccaggttatccccgaaaggatagaaaaaccacctcatgtttaatgcctagaatatgttcatttcaataccattgttcattgttcatttgacgcaggatatgagagattttgaggctacgtaatctggtacgcataacaagagaagggaagggtcaagggggggatatggggaaagatggcagtaggtagagagggtgctttgtgcattggaccccggaaggcaggcaggctttctggcactgtcttcttcactcgtcgatccactccacgcgaggatcgatcgtcgatgtatgtatgcatcgatcctgttttcggggtggaaagtgtctctccttttgttggtccctccctgtccaattctttcgtcacttgctcttgttccttctcattttgcagcctcatctcatcacctgctgcttgcctcgtgccgtctcgatcttcttcacgtccatccaacgcagctcactccaattatactctcttaccaatgtagttggagtactacacatgtgttcaagctggcttcaggtaaacccccaaccataaacaccatgcatatatgcatgcagagttgcagacatgcatcagttgctcttcctcttgctaagttgctatctccattgattaggagtttagaggagtagtcagctgagctcccgtgtcgatcgatgacaacggtaggatcgatacgcagttgcccttttactgcacttgctatagctgctgcacaataacattggcagtgttgcatcgagccaatattggctgcactgggtagctagctgcacgctgcttcttcctgcgctcttctgtatatatgagacaaacaagcggcggtgctgcctgtaactgactcaggtcacgcgctaatcctgcggctgccaatcctgctcaattcctttgtaatcttgtccataatactactctgtatgtctgtatcgctcaccgccaccgatcgatcacctggccgaggctgcaatgaatatcttcacgattcgcataccaggagtccaggactggctctgctcatcagtcatcaactacaaatgcaccaagtacacatactgatactgtgtgttcattcattgagcaatactgctcgtgattgtacagtctgcatcacctacaaatgccatcactggcacagcaagcacgagtaaatatggtgcttgctctctgcttctgttcaggcttttaaaatactggtatggtactccagccttttatttaagaaggttgcaggcttaacagtgtactacagtatagcagcccgtttaattggctagacaagctagtaataaggtatgatcaattcgcatcagtagccattgcctgtatcaagattagcaacaatgcacacactgatcattgacgcatgcaatgcattgtaccttcattcaattgcaattgcctgagatgatgtaggatgattaggacatgttcctgctgcctactgtttagtggagtaattagtactacaacagtgtactaattaaagtagcagcagtatgtatattcaggggatcattgcaagtagtaggtcaaccatgacactgatcagtcgtagcagtaaccatcactccacagattggaaagtctagtgatcagcttttaactaattcctagccatctcgagaacaaaacagacgaaatcatggaaatattcgaaatattatactgtaaagtggtgggtcgatcaacacaggcactagattaacatcatatttacgttacgtgcaaccgttttctatgaccactacttacgcctagcaaactagccatcacagacataaattgcttaactgcatctataaattaagatcacataattaagttttggcaaatggcaaaagtgtatctctgacatcaatttacagtgtaatattctctacgtattaggctatcttttctttggataaacattgaacttggttgtattaactggaacacaaacactggaagggtccgaagaaatattaggctcttttaggcttcaatctgttcaagacattacttaattgcctagcttttttttagaacagttaattgcttagctaggtcactgctttttttttttttttgaaaaccgctaggtcactgctatgatggcgtccccaatttacagccgtgagggttagtacccttttttgtgtatataaaagaaaaaaaaagaggaagtagtcagtagccttttaggtgagacttgactcgatctagaaagcttcggatatactagagtatactcctttactatagtaacaaaaatcctttttgtattattttttttacttgtcactaacaagtagtaacataggagtatgcatcaagataatctttaatatttaccatagctaattttatttatagaattttttacgttggaaggggtgcgagtatttctttttcacgtcagtcgttaggcggagagtgaggaagaagatggaacatgtgcatggggctagcgacagaatcagtttaaggtgagaggttttttcatactaggaggggatctagagtgggagagggcgcgcttatgacttaatgtgagagtaggagtagcacgtagggtgttgtttagtgctaccgtgaattactatagctgagtcgtactaacttttttggttattttttaacgtagtagtacgatctaaaaccagcgtgaacattttgcacatagtgaaattaagacatatcttcgtcacataaataaaattgatcgagaagctagctttggcttatttcattatattattgatagagaagtaaacacgccaccaacctaacaacgggtaaacaccagcagaaaaggtatagcaatcaaatacaaagcttaagtaaaaacatgagagagtatgtatatatatatatatatatatatatatataggagcagtaactagtttttgggagcagcaaccagagtcgataaaaatgcataatactttctccatcctaaatatttgacgctgttgatttttttaaacatgtttaacctttcatcttattcaaaaacttttgtaaaatatgtaaaactatatgtatatataaaagtatatttaacaatgaatcaaatgataggaaaagaattaataattacttaaattttttgaataagataaacagttaaacatgtttagaaaaatcaacggcgttaaatatttagaaatagaaggagtattaaaggcaggcgagcgattggtggtgtggaattgtggataggaaacgatcaaggggtggataatttatcttgggtagggatggaaacagccaggctggggtacagtacatggaaaaagcttaaaggggcaaatgggatccagcaatcagcatacatgtacgaccatatatatcagagcaaacatacaaactagctacgaaacaaacgacttgatcacgagtgtatccatatatatatgcatgcttgacaagcaacaatatataatgcatcaagaattcaggattccatgcgaaatttctgatacgaatgcgacgcttgcatacatcaacaaataatgctgctagcacatgcagatgtagcagacgtacaccagatcgatcgatgtgcggtgcggatatatatttaatatttaattttgatcaatcagcgaatagctaatatgcagcaactggcgggccacggaccttcacctcatctcctgcacgacatgtgattaattgcttcaactaatattatccccaatgtattttaatttgtttttctctcgtacgttttgttgcatgcaatgcaagcagctacttcactaggcgcatggatgaagttcagaaagttcccggtttcggacatgttttgaaaaaagagaggaaaatatcggtcggaatcttttcgaaaaattttggaaacagaaatagattcgaaatgttttctcataatagaaacgaatacggtaaggctactatctatcgaaaatcaaaatcggttggaaactgttggattctttttcttggaattggaaacgaattacttttcatataccgctaattatctccaaccttctctagtctagatgctcagatttgtattgagctttgaggcggttggttgaatgaagatattttttttccgtgctttagatatgtttttcttccattaggctatgtcatactacttacaataatagatgaatatagttcttgttttttttattgttctcctggaaagtgagaggtgcacaactagttgtattactactccctccgatttctgcgagaaaatattttcgaacggtaaaagatgcacaactagttgtactactgctccctccgttctagcagaaatcctgaaaagtgaaagtgagaggtgcacaacaagaaaatatttgtgcacctctc

SEQ ID NO: 4979 - DNA, 2566 bp, Oryza sativa
gaggtccttcagtgccactcagtgcggcgatattaatgtggtaacatcatactttcgagttctacgcgttttaactttggaggattgtagtgttactggggaagcttgtggaaaacatagattagagcatgtagggaatttacgccacctgagatatctggggatttggaatacacgtattgatgagttccccaaggaagtaggagatctcaagtttctacaaacgctgaatttgtcaggtactggaatacaacagctcccggaggctgtgggccttttgaaacaactgttgtgcctacgtatcaatgacagtatagcagttccagctggtttgatcgggaatcttacttcattgcaagagctgaagatatggccggttgatgatgtctcaacaaggcagtttgtgaaggagctgggcaagctgagggagctaaggattctccggtgtaccattcatattagcgatgagggcatggagagagatttgctagaatcgctagcaaatctgcacaagatccgcactttgtgtattttgggctcagcattaccgagcggcatcacacgggaagcatgttttgtgacccctcagcgccttggacagctgtgcttggaatgcttcaagttctctggactaccagtatggatcaactcttcacttcttttgaacctcacccatctagatgtgtcagtgcatgtggtgcaagaacaggacatggaaacccttgggaggctaccagagctctgttatctcaaactgtgttcagattacaccaggctagtaagcataaggaatggtgatctgcaacgctacttatttcggaaattgagattctttgtttctccctttttatttgcccggtttgatgatttgcacggccgtgaaaacgacggcggcatatgcatagcagtagcaccttccatcatgatgccaagccttgaatcccttgtgttttgtgtctacgtacggttcctaaaagatatggtggaaatgcagcctggctttgacaatctgcatatgcagcttggctttgaaaaagttgctagcagttcgctccagagggtcactgcaacgatccaatgtgaggatgctactgctgctgcggaggtggaggaagcgaagacagcattggcgcatgcagctgacctccatcccaaccgtcccacccttacaactcaaatggtgaacaagcataagatgctctcatccgaccgagagctacgagtgtgaagcagaggagatgatggagaactggcggagagaatctaggagcaggagagcaaggataccagctctgctttcccctgatggttaccctgcaaaagcaagcatacatgttgcattgcttctgtatcaattctgtgagacaatttagttgattctctgaacagagtcagctaagtgccaaatgcccggttccagcctgtgtttgatcgattgacgattggttcggatatctccttcacttttcctgaactccatccacgattcaagatgtcaaatgcatataatcattaattagcagctagcattacgtggacaatgtgcttcaagatgcatttcgttttcgcgtttcttgtatatttttgtcagcgggctatctttgtcaaaacgttatgcagttactccaccggtctgtgttatgaacagcggtgtgactgtacttgttcatcccttcctgtttgtgtttctgtcaggatatcgaacaagttctgaatcacattggtactgaaagagactagacttaggcccccagctgaatagtagacaagaccatatatggttcgcatgtattaacttttaattacttcttctaatagaatgacgtacaatcgaattgccagtttgatgaaaaaaatatggtttagaagtgaggttgattgtccttgttaattaggtttactgatccactgtctatcggtagtccacttccaagtaactgaatcatattgtgtactcaggctaatggtcccaatctcgtccggagtctgaatatttcatgaaaatctcctgcaacattgacagtgaaacctgaaatcagttatgtatactgaacgtatgcctatgggcatgtctgtaaaccgtaaccgccacctgaagaaatcaaattcagaagacatacattattagtcattcgaattcagaaggcagattgatagtagtattatcggacaacaatggaggaggcggcgatcaaagatgtgttctgtagatggagttgataaacggggggatccaaatagatggagaagaaaactccgacccctaggatctccgtgagacgtccgattaaggatttgcggcacagattagatgggtaaatacattgggtgcacttctctttttgggcctcagaaatctcgatccggcttttgggcctgaatgtttaaacgggccaactttgcaaaacagttatgctggggacccgacccaacaagcgagcggcggcgtcgccttcgcttccaactccggcggccggggcaacgacggcggcggaaacagccggggcatcgggaggaggctgcggaggtgtacgcccatggatggattcaacggaatcgcaacacg

SEQ ID NO: 4980 - DNA, 8046 bp, Oryza sativa
gaggcattattactaagttatatatatacatgagttccataatgtaaacatattgtgcacaattttttcttactgaagagggaacaaaatgtcagagctgagtaagcagcgctagctgttttctaattcttcagagctgccattacagatccaagaattaaacataagtaacaataaactcagagcagatagatatatacaaattaaaatattaatgttgcgctatgctatacatgctggcatttgctactaacagctggtttgcatgtataattttttttcttagctaggtaacgtagatatatgctacgcgcatttttgtggttaatttcttttttttcttgaaactttttatttaatttgtggttaatttatccaacgccaactagcttattagtgtatatcacatgacaatatgacatcaccacatggcttgcatgcgccgtccaactagctttgcatatataaaccggcctggctgcacgtgattatctgacagtgtcaacacaatttctgacagtagttagctagcttgcaacaagctgtagtgctgtgcttgctagctgtgtgttaacctcaagcccgctcctaacttgtgtagcaagcttacatatacaagacaagaatagaaaattgattgtgtgctttgcacctgatagagatctactatctctcatttgttttccggcctgcagtgcaccatttcttatcattggcatcagtctaatccaaccaatgttgcaatttgctccgtgaaataattagtgacagtacaatatataatggtgcaaagtgcaacatttgcacaaaaaaatatatgatcacaatatgtatagagaactaacaggagaagtctcataaataaatggctcccaaacatgtatgtgccacaacatatcaacaatcagtagtagttagcaccaacaaattaattaacaaaacaaacacgacctttgtatatacaaaagaaacctattaagcaaacggaatatatatagacgaatgatctcgctagctacctaggaagaactaaataatgaagcagtcaacaaaaataaattgcacacacatatattcctaaatctcgatgatgtccatgttcagtacgtaattcagtaatgcagtagccgagcacaaaaattctcagaacgcagcagcatgcaatatatatgtatatgtgatcattactgtcgtgatatgtaatgatccccataattctctatcttgtactgcggcacgccaaggggattctgctgcgtaagcccagccatcgccgacttcgataaacccttcagcttgttgctgctcggcagtagagtaccaaaattcgggacagcaatgacattttctagggctttcaccattgctgcctgctgctgctgcaagttgtagtagctgcttccaattccatgggctcctccagctccaggcgtaatattccaagaagagacgtgctgctgcagaggagcactatagttgctgctgctgctgctgctgcttttgttgatcaagctgtagtagtttggctgctgctggaagctaacggcagtagtattagtcgtcgtcgtacttgcagaaacggaataaaccgcgttgttgttgttgggcggcgccgacaagatgttggaagagttgctgacgaagtagatgctggggtcaatgatgtcgtctagctgaaagaagtcatcgccgccgtcgatgtcgccggcttgaacgacggagctgccgctgttgggggtttcggcagagtactgatccacggctgcatactgtggttgctgctgctggttgttgatggcttcgtctccctgcttcttgtggaagaccttgcacacaacccattcgtccttgggattcagacgaaggtttgggtggtggttgtggaggttggcgtggagacggaactcgtgcatcacccagttggtcttggtgcccttgggagccctccccatgtagaacaccagcgtcttcttcatcccaaccagctgcttcttcttgttgctgctgcctccatagctgcttgtattaacagctgcaggctgcctgaagatctccctgtccttgccggtggccttccagtagccctccttggtggcccggttggttcgcatgccagttgggtatttcatgtccttgtggctgaagaagtaccattctttttcccccatcttcgccttgccttcatcaaattaatatgaaaaacaagcatattaacatcaagatctaattaactacttgtgcatctaaatataagcttttggatcgaagaagaaaagaaaaacaaatttgacttacttggaagatcccatggctcgcacttgttgaggtcgacctcgccgatgggcaaggaggtgaagctagggttgagcaacttctgcaggaggtagcttaagattacctcagcgtccgtcgggtgaaacctgaagcctggaggcaagaacaagcctccatcttgctctaatttcacaagggatgtagtagactccaccatgctagctagctagcttgctccctagcttgaattgaagctagactgaagatggaggaagcactagctctagctagaggagaaggagaggaggagatagcttggtggcacaagcaagaaaggtggagacgacgcgcgatgaatgggaaatggaacagaaatgaaggggacaaagccagcaagttttataatgctttgagaccttttccatggttttgaggggaaggccacaaaaatcttggttagcaaggaagacaagtcctcactcggtttcattatgataaagaattaatatatgtactatatataaagtgtggctcttgccaaactaagtattttgtggccgtcaaattaatcagatttatatatactacatgttgtgcttaattagatccccatctatctatattattattatattcttcttctataatcttataatccgttttgccagataatgctggtgacagctacggctaggaaccgacctaaaagaaactaactgtccggctggaaggcttgtgtggtacgattgaggactacttaattaatttccatgtatagtgctcagaaagatacaaatcactgttctcatctgctcatggtataatagcatgccgaaatttgttacagatgttcaaattaaatttatggccttgtttagttacaaactttttcttcaaactttcaactttttcatcatatcaaaactttcctacatacataggctgtgtttaattcacacaaaaattggaagtttggttgaaattggaacgatgtgacgaaaaagttggaaatttatgtgtgaaggagagttttgatgtgatggaaaagttggaagtttgaagaattattttggactaaacacggtcataaacttccaacttttccatcacatcgttccaatttcaactaaacttttaattttgacgtgaactaaacacaccctatgtaatttgccagtgaacatcgtaaaactattacaaccatagaacttcctaaagctggttatttgtttttataggaaatagtgagggaggtccacagtaattttttctttatttaagattgaaattcgcttactggaaaattcaacctatatataggacctagagaggtgctacttgagcattggaaccgttaggacaacccctttcgcaagctggttattttttgagcaccttaaccactattttattatttatgatctaattggaaagagaaactacgttgaaataacggttttgactctcgaacccgcacatattacttggcttaaggccgagtttagttcccaactttttcttcaaacttctaacttttccatcacatcaaaacttttctacacacacaaactttcaacttttccgtcacatcgtttcaattttaaccaaacatccaattttcccgtgaactaaacacacccttagtttgctcgaatgaggcatctcttctcccattccctccaaatgtactcatgtccatgagtacatttttgtcttccaaaattttcattctcccccgccccacaattttcaaactcttaacatttcatcagtcaagtacattgataccatatgtcatattctttttcactccagcatcggtttagaaacttgtctgtctatcattcttttttttaaaaaaaaagattctctctaattgagccaaaaataatataataatagttatagacttgtggtgtcctctcataaattatcagtttttaaagatgttctacaggctatagatatgatacatttttttaatgttcattagtaaatactccctcctttcaaaagtctaagtcatatttctttttacaccaagatgaaggtgtagttaattcattcatcatgtgacaaaatcaatgaacatgcaacccataagcactaaaatgactttttgggttctgatcaagaatttaatatagcacatagtgactacaaatagaacttagacttttgaaaaaatcaaagaatgaaataggacttacacttttacatttttggaaggagggagtagataaattttaagtgtcttgttgcaaaatttgactaatataattgtttttgtctttttcttttttagaaagagtttgtgcaggtctagcaagttgcaagaagtttttagatgactagctaggtcgcaattgccatcagctccaatgcacaggttagctggcctttccggacgggtggtgtactgtctttcttctcgtgtgtgtgtgtgtgtaatttccatgcatttatatcttgatctctttttgacattaattaattgctagtattagagcgccgagtcagatcctactatgttttatacgtagagtatgtacagctagcgtcgaggaagggtcgtcgtcatgggggagtcaataatcacatgcatgcatggtcaaagaaagaatctgcatgcaatcaaataaatgacggctgttcatacttgatacctgcactgcagcctgcaggccatatataagctagcagctgtagtatccaagttggtcagctcttagatcatgagagagtttcacttctaggttcctctaagtagagtagttcttttttttaaagaattacacagtacaacgcaaacacgcggaccctacccctatgagtatctttgaaaactgggccgataaatcctagagagattaatgaagtcaccacagacgcctcactgtcgacggatacgtcacctaccactgaaagcacaacgccaatttggtgcacttccaataacgtcgacagcttctgttgatattttcttatacttcctccgtttcacaatgtaagtcattctaacattttccacattcatattgatattaatgaaactagatagatatatgtgtctagattcattaacaacaatataaatttagaaaatgctagaatgacttatattgtgaaacggagggagtaacttttatttcttcttaatatattttgatggcctcgatttccaaggaaaaaaaataagtttcacttctcataagctgcagtccctacagttaattatacggacggctagcggcctagcgcgcacgtgctaatatatgaaatgcacgtgcagatgccctcgatcattttcagagcacacaaatgtgcggtccattttatctgttaggcgcgcaagttgcattttggaggctggatgatcaagtcgaaacctgacatatataatttcttgaccgctgacttatataattaggtaaacaactcatatgctccaacttaacgtgcgtacggttcgtccaaaagatagtacaattaatacccctagattatttgacaaaaatgtttattactaattggtttatccaaatattagtaagtttcttgtttactgatatttcagtaatgcaacttagttgaccagttattaacctctgtcttaaggagctacttcctctgtttcatattataagattttctagcattgcccacattcatatatatgctagacatatatacatatatatgaatgtgggtaatactagtaagtcttataatatgaaacagagagagtacctatttttatttatactaaaaatatactaaaagtgattcttttcatgatgtatatgttaattctgaaattcataattaataaatatcgagttgtacttaatttgtaatcttagttttgtatcttttccatatacattttttagtaagtttgaaattttagaatctataaaaacataaagataggtttttaacatggcacacgatgttaatatataatagtaataatggggatgttcagattgtagccaaaataaaccttaccaatgccaaaatttagtaaattggtaatattaccaaaattttggcaggattatttcttatgcatttaccaaaatttggcaagaaactaaatgtatacatatttttagaaacttaaaaaaaaaactatgatttaaaatggcatcaatcggaacaactccaatatgatcatctgatcaacaactagatcttcttattaatgtgaagctatagagtgcccaacaaaatagattcttaatactcaacggataattgaaacacggagtatatacgatgtatttgacatagtaatccgtatgtgaaccggacagctggctcatgcgagatctaacacgtcatcagctgctagatgtatgacctttggatagatgcaagaaaagtattccatgcctagctagctgtaccacactagttaatgaagaaccccatgcatgcatttatcttcttttctttagaatcagatctaaacaaaaagaatctgctcgactagtctcaagaaagctaaatactataatatatgctacatgattctagtatctgctaatactagcaaacagctaaactgctaaagaatactagaaagaaggggtctccgaaatgtggttaattagttaatttctggcccagcccaggaagccaggagtacgtacaaactgtccagaagccaagaaaatctgggaccttgggcattacggcccatgtaatttctggcccagttcgctaaaaaaggccagtactctagatcagagtattgggagttcacaatggttattaactacactagccactaggcaacaaattattaatgtctagctagtggattaattactgttagttacttccagaaacagaatcaaccgtacgtcaatgtcacggataaacttgtgacgtggtgccacacgaagatcctaataagctcaagccccatacatatttcaattaacttttcgtaagcatgcatgcttacagataatctatcatatgcatgcttaaggcatcatgactttgccaccctgattttggacgcacatacccttccttcttatctactctcatctgatcgtcatcaccttttaggcactactgcatgaattgttatcctatcctaatccttcacctaaactagtgcacaagcaccaattataagcagcctctctaacatgcatgtgtgagcgtgacttaatcatcatgctttagctagctgtttcttggtgattgcttactaattaatccaatctatgggagagattgaaggttgttgctagctagctagagccgtagaggtagaccaggacacacgatgaattgttagggtcagaagaataaacaaatcgctgtctccaatagggagacgtggttaagcaagtggagagaatcaacttagtttaatttgggcttatctagtgggaagatgtcatgctatttgcacgcttgatcaaccactccgttgagcaacgtgctctgccgccgtctttccgttgtccttgaacgacataaacaatgctgttttgattgtttaattaggtcgctgatgacgcgtgttaattaagtaggcgccattgcgttttcggatattggtctagcaatctgaagcacagttcttcctcagtactgaattgtggacaagacgaccattaatttgtcattttggttggagtcgtagagattagttgatgaagcagctggtttgtcctgaagtatttgacaaattgagcaagaatttagtcagtattgttgtttgaaagtacaattgatcagcgtact

SEQ ID NO: 4981 - DNA, 10933 bp, Oryza sativa
cggatattggtctagcaatctgaagcacagttcttcctcagtactgaattgtggacaagacgaccattaatttgtcattttggttggagtcgtagagattagttgatgaagcagctggtttgtcctgaagtatttgacaaattgagcaagaatttagtcagtattgttgtttgaaagtacaattgatcagcgtactatatgtacaagtggtgttatgcaagctactcctagctgcagggcactcgtttggcgccgatgatcagagccatctcaatctactcgaaaggaatcttgagcaggcaaaggtatattccgacctcaactgtaaagtttatctaatcctttcaaaatggataaggattgaaactttgaagatgcaaatgctagctagcccaccaactagtcctttgcatagtacaagaccaattatatatcagcacattcagacaagaacaaattgtttaatttgtaaggtccaatgaatcaacgacaaagtagcatgtttctttcgtgtgcttgataccagaataattaagaaacatgcataaagattatcatataaattggcttgagtactagcttgcacgatattaccatttataatttacattcttgtacatgaaaatgaaaacaaaaaaaaactcacaaattaatgccataggaagaaatctgaatctttccttgcatgggttacatcaagaattccgtctgtttgtctatctgtcatgcaactcctcaaaataaatccaaatggaacaatcagtatcttcctctctgaatctgtagtttcattcgttgaaattaattcacctctcttcagatcgatcggtaaacggatctagacgcctactagctactgcatctgcagatgattgttcagcagtagctgctggttcagaggaaatggatggctcaacatattgccgttctgaaactgaaaaccagtcgcagtctctgaaagctgctggttgcagtaacctcctccaaaaccactgccccttgaatcacttggcagcagcagcggtttcttggcaacatgcaaaaagtcactgctgctgctgctgctgccatcatcaaaagaagttgcactacacgccatcattctcttcctccttaggccattaacattataattgttaacgtaaccatcgtgatgatctaggcgtgactcgaaggcgtgtggcatgttgttgttgatgttatagtttagtgtttggtttggatatattagagggctgggaggagcaggaagctcagcgatggcgtcggatgagccgtcgaggagaaactgcgagagcgcggcgcagtcgaggttgttgaggagatcggtgagggagcatgacttgctcatgctcatcgccgtcatgggctggaaatctgactgttggttgttcatgtcaggtggagcaggaggttgttgagaggaagagttgttgtcatggatgtcttcaagctgttcatcgacggttgatccctcgggttcttggtcgtgttggtcagaggaattgaagtcgttgctcttcttgtggattctgcacagcacccagtcgtccagctgatgaacaatatcacaaatgcagtaaacaataattagaagtgtgcaaacttgctttatttatttttaaaataaagaataaaacacaagctcaatcaacatcaacaaatttgactttgtagagtgagttaactaagagcaacatgcacgtttgcttccttcaatatgccaattcaaacaacgacgtagctttcaaagaagacgtacgacgaagagaaaaacaaattaataatgaactaaaattaagtaattaaatgaatctcaccctcatggtcatggatgatgctctacgctgctttgtggtggtggtgttgttagctgatgtgcctgtgaggcgatactcgtgcatgatccagtcggtcttgacgcccttggggggcttgcccttgtagaagactagggccttcttgacgccgatgttgtcgctcgtcggagttgacaagatggacttgtcggtgccggtggccttccagtaccccgagccggcggcgcggttggggcgtgcgccgttggggtacttgcggtccctcgggctgaagaagtaccattcgttctcgccgaacagcgccttacctgcaacattccatatccattttcaaagcccaaaattaaatttggtcagtttgaaggcattaatttgatcgagtttaattgatacatggatagtttatatatgtatggtgattagttagttagttaccaggaaggtcccatgggttgcacttgtagatgttgacctcggcgatgattggcacggggcacttgatggaggcggcctggttcatgaggtagtgaacgatgagctcctcgtcggtggggtggaagcggaagcctggtggaagggcaggcatggcgccgccgctgctcggcatgctcagctccttcaatcggctcgcctagctagattttttttctttttttaaaaaaaaacaaacaaacagaataacagatggtgtttggtcagcgtgagctgaaggaagaagatgacgacctggctagcttagattacgtaggaggaaaactggcactagtgaaggaaggaagctaataagctaaggaagaggaaggattgaaatttttgagatggagggggtagggctctcttttatagacgccatgggcttggctcatcttcttgctgttcgggagaaagagaggtgggtgcatggatggattactacaaagcaattgattaatgagagctaattaactaggggcacaatagacaattaactagttattagtaggtggcgtggatgtgagtaccaaagactggaccacatttgacacttaaccatgcatgtcagattaaataacttgaaatttcagcgtccaagcgatttagtcgtaagttcagtttgacatagggttgtactacttgctacctcctttgatcgttgcattttttgtcaccggattactatttatttgcaaagtttcactatttatcttttttcaaaaaagaatgacattgttcttagtactctctatggcttcatatgttattgaagttagtagcaaataattcaaaaagtcaaatctaactcttgtaaaattaatcagtggcaaatgaaggtaatacaatgaaagagccatacaaatatatatttcaatcgtcttctatcttcattccaaaataaatttattttataatatgaatatagatacattcaaaataaatttattataaggcgaagataagataccatgagaagagaatatcgtcaaaccattaaccatggcatgatatactaaaacaaatattactccgcgtacgtagtagtaccacccaaggacaattggtaatgcaagaagctaatgacctgtccttggcgcatgcatatatacacagtaattataattgtacgtacgtggctccacgtcagctagctaccagtgggcaggggggaccacaacgtacgtgtggtgtggataaactcatgcatatggaagcaaaacaaatggatcgatcggctttaatttgttcttcacatactgtactaaagacgatgacgacacatgcatccagtagtacatggatttatgttgagccgtccaggtgtcaactacgcattgccgccaatgatatgtgcaccgatatgatggttccgtcttggcagcttgtgcgcgtggcacgctttcgactctttcttcttttgttaggccgaccggtgggccccacctacctcgtggaaaccacctgcatcgtcactccatgggctctaccctcgcttacactagacgacaatttggttgacgattaattaaagggttaattggatccatactactttaattttgcccattcattagatctatgctattatcatcatgtttgatattatcatatagactaaaatatctctagacgtgagatccacatgttagtcatatcttctttctccatcctcccattttttctcttatctgccggacgacacaacgcctctatctgcatctcgtcctcctctcgatctccccacgccccgtccgctagagaccaaggcctcgccctctctctccatctcatgtcctcctcctcccgatctcatcgtgctccgctcacttgctagagaccaaggcctcggcctcggcctcaaccttcaggacctcggatctagaggatgaaaggcggaagcatgctggccgtcgaagctctggtgccccttgcaacaagcatcaggatgacgacgttgatcagggagccgcgagcaaggagaagggcggagctctggtgcctcttcagacgagtagcaggatggccggctagggagcgatgagcaaggagaagtgcaccggggaggggggatagtagtggtggtggattgtcatggccaaagctcctccatgcggtttgcggcacctggcgcaccaaagaatttactatttgccatcttttcaaaatgtacatgcccaactctcccaaatgttcacttgatttgccatccggtcccatatgtcagcctccttccacgtttggacaaatgagatgtgggatcaggtgatgaaggaggctgacatgtgagaccgggtagaaaatgtgaatgaaaattatggagagtggcatttgggcttgtgcattttgggaggatggcaaatagtaaattctccccctgacgcgccgatgccaagcaacaggacggcggtgttgcccagggagcacacacgcctaatccgagtgctaggagcacgaatatttccatgcgacacatcatcttggcctaaaaggaacatcgtcttggcgacaagtgtgatgacggcttccgtaacgaatgttaccgccggctgcatccatgccggcatgctcgtgtcctctactcactgttgcgctctcttgccggttgaggaatggggatgagacagtgtggtagagaagatgagagaaatcatggagtgacatggttcaaattttataaatttccagtgacacttaaccaatatctcgaattgtaatagcacttttttgaattagcaaaattgtaatggcatggatcaaattaaccattaattaaagcgcatgcatgtatcatatcatgatgtgtagtactccatccggcccaaaataacttaatctaggatagaatgtgatatatcctggaataacaaatttggacaagtgttatcgagattcgttatcctaaaatatgtcgtattttatccaagattgagttattttttttagatgtagggtgtactctcttcataaggtaccctgcactaaagccaaaacaaacagatgaagcacgccttgactttggtgtgttcagttcacgttaaaattggaagtttggttgaaattggaacgatgtgacggaaaacttgaaagtttgtatgtgtagaaaagttttgatgtaatggaaaagttgaaagtttaaagaaaaattttggagctaaactcggcctaagacgacgacgaatgctccaaattgacaagatcatgatcgatcgaccgatatggatgatcctgctgtgcacatgcatgcagcaaattaatgcggcatgtgccatggatatatagagtatagaccagccgcctgaaaaatgcacgtgagtaacgttgataaagtatctcccacgcggccggagctaactagctagatgaggtacacgtacgcgcgatggacaacttcaataccaatactggtactttgcaattttttatatatatgaaaataaatttatttttcattcatctaatacatactccctccttcccagtatagtggacgtttttaactttgtactttcaacgtttgactattcgttttatttgaaaaattagtgcaaatataaaaaagataagtcatatgtaaagtacttttgataataaagcaattgacaaacaaaataaataataattccaaaattttttgaataagacgaatgatcaaaaattataaaaaaaactcaaaaagacaagtaatatgggacggaggtagtaccaatatatttttgaaaaaactcaagtttaaaacatatcgatcaattaggaggagacagaaagtacagcgtgtggctgctcaaatggaccggtcataaatctaaatctaacagctagaaaggagtcaaagaattcggcccacgtgtgagtgtgtgcattgctggctgacggcccaagtgacgaaatgtgtgaaagggacgtagtcctacatacgtacgtcgtagtaccaaattaattaataacgcatctaataattttaccgagtgaatactactcctacgtaccagtataattcttccttatttcatattcaccactgatggctatgttctaccagtacaattgacattctaccactggtggctgccgatatatataaaaacaggctagcgagttgggatgaaaaaggttcgaaaatttttctactctagatgttcacatttgtacttagtattgaggtggttagttaaatgaacgttttttttttcagtcaggtgttttagatcatttttcttttgcctaatcgctattttttgttttggtactacttatagttaccaattaaataattgttgattattgtagttctatcggagagtgaagtatacaattatttgtattattaccaattgatgacaatcgatgaaaaggttctatatgcagattggaatatttggaagcatcgaaatggttatattaatttttgataatgttgcaccctcagttttctcttgaatgacattctttaagaatgacttatcccatcttgtttttttgtttaagtttagattaaatatcagcgtctatctcctggataagtcagttgtagtaccttttattttaacctcctttttataatatatttactatgggggcttcctcatagtgctttcataaaaaaaagatgatagatttattatttttaaaaacaataagctacatctctttgttgatttgagaaggccagttagaattgtttttatattccgataaacattgttaccgtattcgctccgatctatattcactctattttagtattcaataatattcgattccgtttttataaccgtggttttcaattctgagaagaaatggaaacgaaaatggtagagctagttttctagctgttttcattcctaccagtgattatatatatataatcttaattaatttacttacaaaataattactagtcgcaggcacatctggggacgtatgacgtgcaagggctctaggcgtcaaagggctggtacctttcttccttgcccgtgcggatggaacggattatctactaccggagtacttgactaaaacaaacatcagatccatatagctttatagttggccttattacacgtcacgatcttgacacccagttcaacaatcctctactcatttctaccaagaaattctagcttgtgataagtacctataccaatccagtttgcatgcgtccatattagactctcctgtcaaaagatgttcgttcatatagatcgatagctatgtcaactgtgtattatatactagtatatcattagcaaaagtcgtacacaaagcaagtaaagtcatactgtagggcttttttgtcaggcgctatacaaattaattgaaattaatgttgaagggtcttaaaatgcaactgtactgcattcagatatgcacgcatatccgttcatgcaaatatatctatgttgacgtcttaaaatcgcacgtataataagttatttatgatatccatccatgtacggcccgccgtgacgccgccgccgcacgccgcagcaacgcacgccgccgcccgcgcaaccggctgtctccaaacaaatttagggttagtgtcttagggaattggggatttttggaggaggggatttttgtttggaaatgggctcagttgcggcccaagtggaatgcgggccgagtggaaagggggaggggagtggaaaatttaggcccaatacaacagaaatggtaaaacaaggcccaaataagtagcttctttatctttttgcatacatatatgaactatagagtatatatacctattttttgtccaaaaatctttggtatacatctgaatacccttgaattatagctgggcctgcccctgcacgtacctattaatcatgtgactcatttttgcacaaaattactacgattcaaaagtactacatgggtgcaaagcggtcggtttaacaagaaacctctttctcgttaaaaaagaaaaacctctttctcaacctactagaccaacttaaatttctaggcctactaagcctacttagattcattgtgctatcaacttattgggccattcttttcaggatacctatttagttattgggccttaacgttgagccaatatctgctgtaatcgaccctgctcatgctgttatgcagataaattaattagctgcttaattaatcacttacatccgaggccatgtagtagaaactggtcgcaacgtagagctcgtcctgcccagcgccaccgccgccgttccacactccgttgaagctgcagttgttggtttcgcagggcgcgtccaggttgagtgccttcaccacctcatctctgcacttgtggtagtctgctccttgtggcgcgccgttgcatcatactgctccccgttataaatgtacttacctttaatattccaaggattggcacaattaaaccacttgattaattataattagaaatgtagtaaacaatggattaattacatactccctctatttattataagtcactttgatttttttagtcaaattttttaaaagttcgaccaaatttatatacaaatacaataatatttatagcaccaaatcaattttattaaatctaaaattgaatatattttgatagtttacttattttatgttaaaaatattattatatttttttataaatttagtaaaaactaaagaaatttgacttagaaaaaaataaaacgacttataatataaaagagatgtatttcgtaaaacggaggtattatatatgatgcatcttgaagaaaaaagatgtgtaaacaaatctcaaggaacaagctagtaccgcaaaatccgcgcagcatgcagttgctaaatgtcccattcttcctttttaggatctccacgcgagaagcccgagcaccatagtgcaggtaactgcagattgatgattattgatcttagctagtaactacagtgataaaaagtatgcataattccttcccatagcttcagttatatattcactagagaactgttcaacaacgtagcagactgaggattgatcttagttaactgaacgttacactcttgaaaaccttattattcagctgctggtagtagagattgagatgtaaaatgagatcgatctgataaaaaaaataaaaacgaattaagttactgacctgtgcacataaacattgtaatctcttcctttaagatactcctttataatgtaaggatcctgcccatcgggcatttctggagcattagcagctgtgcctgatgagatggcataggccatttgcacggatccgcctccgagatcaatcacacccacagttttggagtagtcacctcctaatctatccaacaaatagttaagtgcaacccacatgtaagatcattcttgagatccactaagaacattaatccagtttggattgtattggaacttggtcttggtgtggacaacatctctaacctgtattatgaatcaaattgctgctagtgatatgaaggtgtttaatttgtatggtacgattattctgaaagtatacttaccgcttcaagaatctagtttgtcttgtcatctccaataagtctgagtccagcagttgcctacatgttcgattggcaagttaaaaggtttttttgtgagtaatatttgtttcaatttttctattttaatttgttcaaggaggaaacatatttttacaacgttacggtaggaaaatggtttcaactcgagtgatactccctccgttcgctcttacaaggcatattctaactctacaaatgactttaagactaaatttgaccattaatttctgataatatatattcatgataagcatgaaactaatattatagtagtatatgaaaagctctttgaaatccagatctagtcttataaaactgaacggtggaagtattctaacttatgggtaaaggatataagcaggttcataatcctaataaatcaaatctgctcacgagcgacatcatcggatttcatgtaatccgtaaaaaaactgatagaaaccaatgaaatctggataaattttatcaacaaaataaaattcactttaaactttttaaaaaattgatcgaaaaatcaagtggtttgtgtttacgacctggtcaaaaagttcggatttcgcgagatctaaatcagatttaattgaaattgggaaccctggatacaagagactacttcgtcacatggtccaatatttttttcttgtctgtattgatgttgttctcaagtagttgcaccaatctcaaaaccaggggccaacttaaatatttgattaaagtcataaacgtctactatatctatcgttttagaaaagcaaattagatgaaaagcaaattaaattttgttaagtacggtaccccaagttcaaggggagttttgttcataagccagatagggatagcgtggttggccttgtcaagcagaggcattatggattttgctgcctcttgcggccgcccagcgtacgagctcagcccaggatccacctgcaaccaacacaaaaattatgtttatatatctttattagtagtagtagtaattaagtagtaggaggataataattatctttagcagttaataagtactctcaccaattgataatacttgttattttgaacaaacatgatgtcaaactttaaaatctttgattacgaataatttttaaacactggtggag

SEQ ID NO: 4982 - DNA, 12601 bp, Oryza sativa
  unsure (1)..(12601): unsure at all n locations
ccgccgccgctgatggttggatgggtagtacattaacggctacagcctagtatagctagtaacagctgtgcattgaacagagagatattacattacttattatacctgtgaattgaattaatttcataattagtgtccaattttgtggtgcatttcgagctgttggtgaggagattaatggattaccaccagtgtagcattttgcatgttgcagatgtaattggtgaaatactgatggttttctctgttttctgtttgttcaaatggagaatgaattaatcggatatttactcagtttcagatgtaactgatgaagttttggttacagataagtgtctgttattgtacaaaataagcgtaaatttgatcatatctttgatcttgctctaccaaaatggctcctcccctgcactaacattctaacaatgtactgtatagtaagtttcagttgctgttggtcggtgaccttgcctgtagttaatagtagtaagtcagtcaactcgtgtgcttgtgctgctagctttcgttttaacttttaactggtgtgctatcaactattcaacttgcctagtcgtccgtgtaccttcgctttcttcatttgtccattaattgacgctgtgcaatttgctgacgacaaaaacgaaatcgtccaacgaggttgctgagagttttctgcccccgtctcttttataatttattcaccaaacgttagcagcagtctgaaaccttgcatgtttgattgtcctactccaaggttatgttttagctgttgtcattcatctcttttcaaaaattatctccgtggtagatacaatattttataggaaataaatcgtatcattgaacgctttctgaagatcgctggccatgtattagtagcataatactaatatgatattgagctgtcgtcaagacctagtttagttaattatgacaataggattaattaggatgcaaagtatagtggcggagcggctgtccataaccgtgtgctgggtaagcaggagagagaatgaaacttagggaaatgtaggtctgcatagctgtagctttgtgctttaggatatactaggctcttggatgtttcttccttttctcttctatctaattaaacggtatgatcttactcaaaccgcaagaaatatactccgtacgattcaaattacttacagttttagttttatcctaaattatacatttgtatctttgaccatcaatttcttaaaattcggacagttttaacaacacgtggatgctataatatgaaaatacttctcatgttgattctaagatgctaaaatacatgaagttttaagaattaatagtcaaagatacaaatatttaacttatgatataagttaaaactataaataatttaaacggagtatatactagtttagcaaagtactctatccgtcccataaaaaacgaatctaaaaccagatatgatatattctagatatgtccaaattcatagtcataggatgtgtcatatccggtattagcggtattaggttggttttttataggacagagtgagtatgtatcttagttcttaaggctcagttcatctggggccatcaataaaatcaagagttgaacgtttcaataactaatagcagcgcatacgtgttttcaccaattgtcgccatggttgctttcgcctgaactcagtcatcccctgattttgtctagacggcgacagcccaacttcagtttgtttgtgcaactagctgtgtgcatgtcaacatactaggaatttccagcggggtggttagcaatatagtaatacggcaaacctgcaggacctgaatgatgcatgcaagaaacacacatctagtaaaataatagcagccaacttttttttctatttttctttcttttctccgagttggaccgtacctcatgcaagctgcctactccctccgtccaaacaaaaaaaggcaatctagtgctaagaatatccagattcgttgtactaggatatatcacatattatagtacgaggttgagtttttttgggacgaaaggagtatgttttagtatagagtacgatagctgcatcagcaagtagaatacgccctcaaaaagagaaaaatgaaaagaacaagtagaatacgtcaagcaagtagtccaggactcaacaagctgttctccatagctaagtcagctgggtgaggatcatcttcatcttcacattcacataaacaaaaatacttctgacttggctgcccttgttcaggatattctcaaccctgaaaccaacctcactctgttttttctctatttttgggtttttcctcctgactcctaggcaaccttccattcactgtttatacaagtcagcaaccacacaatgctggctgtgctgggacctgggagctttaaattgtcccttttaggaagagacacaaagaaataagcaacatagaggggaaaaaaacagcatgcatgaaactagcatcaacaagcaagagagccattcaaacaattaactgtgctgccacaagcaggcttgctttgccaaatgaaagcattaggcttctaatacgttctaagagttagtaacaagagcatccgaaagctatatatattcctctccaactagaagttgcaactttgcctgccacttcaaaaggattacctactggctactgctactgtatgtacatgacaaaaggaacctggagatctcactagcaagcacagatcaatctcatcagttctttcttctcttagatgccctggttgactgcgaaggtcctgctgcagatggcacctcttgagcagcctcaactgcttcagctttagagcttctcaaagccctccttgtcatcctcgctgatgggcctgctctttcattttcttccaccagttcagatttgacacctctgcgtctagtcctcgaatgctggttggctgatgggacctgatcttcctcaggttcgttaacatcctcatcctcagcaccgtcatcttcaccctccaaccgaggccattcagtaccacaaccacaagctctcgaggcctacagacacaaacaaatttagaaagccactcctgttcatatgtgtaaagtggaattaaaaataggtgactacctttctctgcgaaaatttcttcttcaaacagtacccatgaatccttacattgcattcctcattaggacaacatgatgcctgttttaaatataagtaataaaaatacatggaatgacattagtgaagtatatgaccatgggtacaagataaatgcaaatgtagaatcgtaattcataatgacatatctgcacctttatacaagcttcattgcagacctcacatgatgggatatcattactacgtaaccaacttcggagatcaagaaatgatcttatgccaagaccaatctttcctgtgggagtgtatgacagccaacgatcctgtatgagttcattaagagttttctccttttgggacaatgagaagttggtaatggaagtaggcagacgggattgactgccctgtgaagcgtctgcaattacaacctgggagcagaacaccaaataattctttcatttgtcacactaccataaaagtttgcaacaataaaaatataaaacatttgcttaaacagaaacaaaagctctcatagtgattgggtattaatacgagatacctggttctcaatccgtgtgttaagagcatcgatatttgttatgctcccatcatttccagcttcatgaactattgcttccaactgcccatacaattacatgaatatagcgaatactagattgagctggattttttaaaaaaaagtgcaaattgattgcataccaatcccttgtagaatgcaatctgtggcacagaaaactttgatccaagctttgactcttcatcagcaatgttattgaccactccataatacacagtaccatcatactggtttatgcctgctcttaactcaaactgcaagtacgtgagctccttgttgatcttgaggagtgtatcatcgaacagctgccgatgagtggctgcaagcagtgatacggaacatgagtgatcgcaaaccattttgttagactcaattatgggaatattcacaccccttaggccggaaattatataacatcacgcatagtatttttatgatttgtcagcaatcttaggtaataaaaccaggcgtcaatggtgaactgaagcagaaattatctgaaactgagagaaggttgggaccaactaagattgtttccattgagatgatagtaattcctagaggggcattacgtcgaacacctgtgctacgagtaatgaaatcaatgactgggagctacatcaggagaaagataagagtagcaagcggagcaggcagaagcatataccggggttcttgccgccggagatggcggagaagagggcgtggaagtcgcgctccgagaggggcccgcgggagagcagcgcctgcagcagcgtgtggtggcgccacgagagcggcgccatcgctcgacttgcccctgccgcaggatcgagctcgctagtaatctggaagagagggacggaatgggagggagatgaaggaatgaaggaaggaaccctagcaagagcagaaggaagtttggggatgaaatggaattgacgagggcattgagcgaggtgaggtgggggaaaatgtgttggcgattggcgggaagaggcgcgaggagacgcgggaagagaagaagagattggcagcgcagcgggccagcggagcaggacggcagaacaggacaggttggcgtgtgcgggccgaatacaaggcccatgtgatcgagcccacccattgccgttggtgagaattgagcccgacccaatcctacccgcccaagtatttcaagtgtagccgatgcatggtttaagccgaacgggaaaggacaaaagtttattcgaggcgcctcatgttgttgttgagtttcaaaatcgatttttgaaccgtaaaaggggatacaacgcatttctaactttcaaaaccagtacaaacaagattccttcctttatgtattgtccctgattttatctgacgtggaggccgccagccccatctctctccccgttagccgcccttctctccactgcccgtgttcggccaacatcggtctgtagatcatagatggaagaaagagggaagtaataagggttggttgttgatatgtgggtcctattattatttttattttctgatatgtggccccttgatttttattttttttcctggatcaaattatcatgtaagcgtcatgtcaatatcacacgtcgaataaatacctaatcaaagaagccacgcaaacgtcacataaaccaaaagcagtaacattattgtcaagtgacctcgtttgtattgggtttaaaagttaagagatgtgttgtatctgattttacggttgattcgacgagggaaaatttttctaacaggaaacgatgagaaaaccaggtcagtctaggccaggcagaccggctgacggctgttgcttcttggcctcttgggcctgtggttactggttagatatttttgcagccagttggtgcgtgtttgacactttgacccactgcattgtccattggttggttctgcatgcacgagtgagtgtctcaacctctgcttgagtccacacgtcctccacgtcacacgctcgcgattcgactcccatttcgtggcaggacagagacaaagcagagctagcgatctctgcagctttcttgttcctaattcgattcccatggcgcactcccactctgcggcttcgctgcacgccgcccggctactaccgcagcagcgcacgcccaccgcgccacggacactgttgccggcgggcggtggcctcttgctccgccgcccccacccaccgctccaccagcagcgccgcagccgctcctcctctcgtcctgacctccgctgccgccgccgcctcctcaccgcgcggggtgactacgacttctacgagaactatgccgatgaagaaggagatgaggaggaggagtcggaagtcataggtgggagcttcgacgcggcggtggcgctgttcaacggcggcgagttccacgcgtgccacgacgtggtggaggagctctggtacaccgccgaggagcccacccggacgctgctccacgccatcctccagtgcgccgtcgccttccaccacctcttcaaccaagtatatattttcatcgtctcatttccacatttgactatgcatagtaaattagtaattactccagtaaaatttgtgattagacatgatcgtgcacaaacacagaaccaccgtggcgccatgatggagctcggggaaggcctctgcaagctccgcaagctgcgtctcgacgacgacaccacgagcccattctctcggttccaggaggaggtcgccgcggcgctcaacttcatctaccgcacacagaaggagctcgcggcgtgcaccgacgatctctgcctcaccatggatggctccgcgacctcctaccagctgcttggcaacttcgccgctggccagaagctctaccggcttgaaacaacaaccagtgcagatggagatggcgttccaactataatcttctctgcttcttcacgactcgtcagggtgaagctccccacattgagcgccacggagcatcatctagcagcgcttcaatgtacaagcgagtatatttagtttctttttttttccctgataaaatgtttagctcttccgatccgtttgaaccaaattgtagttttctgtacttgggaaacgaggaatggagtcaaatggattatagtaccattggtttccttttctttcccttcaatttttctctgcacatactcttattatacgatgatgctaattttagcataacgggtgaccatgcatcttaaaaaaatagtagaactatgttatatttaaagtacctcaaatgataaaatgagtagatttcataaaacctgaggtcttaggctatctaacacaaaatcctaaaatttacaatttatgttcatgcccaccatgttttagggtaaaatgttccatacgattctagctacaagtatttcgtccatttgattataatagttgtaaaaaatgtatgagatattttttctatatgcacatgttaattatgtgcttttcaacgagccatcatcatggttttattgagtgaatttcactttggtccccctgctatcgaagtttcactttggagcatttttatctgatttttttttcactttggatcatctatttttgttttcttacattttggaccatccaaactctctttgcggcacatcaacaatctcaagaacattggcaccctcatgaggacgatctctcctatttacattcaagttacatcgttaccgagggagagattggatgtgattatacataagcattagggctaaagtgtagcctaatatgttgctaaaatatattctccccgtcctagcatataagagattttaattggacgtgacacattctagaactacgaatcttagttctgattcgtagtattaggatccaacccaaataccttacattttggaacagagggatgtagtgagtattatttggaaaaaaataaatgaacgagccttatcataacattaaatatgtaagggtatcaccaaaagcgatatgtataattcaagtgataaatgctatggctatattcaatatagcccgcattgtacgctaaacaaataacacgctttaacgtatgtatattaatagaaaaaatgtatagcatatttgtatacgagttttcaaatctcacaagaataaaaccaatagtattatctatttaattcatttttatagctatctttgataaaattataatccaataacattatcctcagtttcttttttcaccctctcatgttctgatgtgaaaaaccctctgccctcttgaacccaagaggcttgcagcgaacacacgcagcacggaaaggggaaaaaaaaagaaaaccaaaccctctcgtctcgtcctcccccgcccgccccggcctcgccgcccccttccctcgctcaccggcggcgaattcaagctgacgagctcgccaccggggtacacgccactctccctcccaaaacctccgcaagcttcaatctctcacttccaaattcctgattttctcgctttttttgggggattttttctgcgccaggattggttcgatcttggccggccaagaagcacaagtttcttcgggggattagcttgttcgcgagggggaggagttcggtggtggagccttcgccttcgtgatggcggacaccaaggcggacgccaaggcggaggcaaaggcggaaactatcggcggcggcggctctggctcgttcagcgagcaagcgtttgttgagaagcttaacaagctcaacaacacggcgactaggatccagagtatcctttcttccggttgtttatttcttttgcgcttgcaaatttggtagcgctcgtactttatctgtctagtggttttaattgatttactgttccagatgaatagaaccctaaattgcaatgtggatcagtacaactgacataggatatctccttggcgttccatacgttggttcttgcgctatttgtttggttaatattcaccttcttatgttcctaacagtgcttattgctgttagacagcatctcgtgcgttatttactgatgcatacggatataacttagtgtggcaattgtttctgtagcttctggatcatttttttgggcatattttgatatactgttttgaattatagctgtataagtgtatatagatgagcatggctacaaaatttagatttcttatcagcattatggtgtatcagcaatcaaagttggtataataatttctgtttgatgcattcttactgtatacatgctttccattatttttgtttcttggggaaatctttttttcttgtcttttgaggatgattatctttacaaaaatgaaaaataatggcatgaactgttaggtattattttaatagtatccttctgtttgatatgcaacgattttttgtttgttgagaaatactatgtttttcaatgccttttgaggatgactgtatctagaaaccgaaaaatgatgataaggagcgttcgggctttgtgttacattttactagtattttctaggttgtctacttagtacttatatatgtttcctgtacattagaatggaatattttacctgttcaatttgcaaattaataaccagaactgatcatattgccacatactttggttccttttggttggtgctattagggtagtggtatgctagtgctattagggtagtactactttggttgcttatattatctgtctggtagttttgattgatttactattcaagttgaatagaaccctaaattgcaatgtgaattagtacaactgacccagcatatctccttggcattccatatattgccttttgcactgtttgtttggttactgttcaccttcttctgttcctaactgtgcttattgctgttagagttagattgcatctcatgttttacttatcaatacttattgatgtgtacgatgatacacatataacttggtgtggccattttttctctagcttctggatcattcttttgggcatattttcatatattattttcaattatagctgtatataaattagcctagctaaaatatttgtagtttcttatcagcgttatggtgtattgtgctattggcaatcaaatttatattacaattttggtttgatgtgttcttactgtcaatacatgctttccttttgtttttgtttcttgggaaaataagttttcactgtcttttgaggatgattatcttttgaaaaatgacaaataatggcatgatttgttaagctgttgtgttacatctagtagtatcttctattcttctgtttgacgtgtaataattttttgtttgttgtgaaaaattaagtttttctatgtctgttgaggatgattatattttgaaattgactaataataataataaggagcgttaggtttgtatcacattgtagtagtgttttcttgtacattcgaatataactgttttcctgttcaatatacaaattaatgggtagaatcagtcatatatcacatagtttgtttccttttggttgctgctatcagggtactgatatgctagttcaactttttttttttatctcttgatggctgagcacaatctttgtggaattgctttttacgatgttcgaaatacagtgtgacaatatttggttgcactaatgttgtacgcccttcgtcccaaaatataacaatatctagccttcagaatttgttgcaaatataataacttcttcactaacattctctttccaaccaatcacaatcctccatttctcatccaatcacaaccttcctccatttaattctacctattttcttaataaccgtgtataaccctaaaatttcttatatttctaccaaacaggcccgtagtattggcaaatgaataaacaaccttttctattattttatggccatttatcttcatttctaagtcagttaatcagttaggtcagaactaatatactttcatcaatttaacaaataacaaattccctacggttgtaaaaaaaaaacaaattgcaattttttggcctttgaacaaggataaatatagcatttatccacctgcatccatatattcatgctactaagggggtggggggattatgtgatggttatgtcatgtccttttgcttacatattagcaactcgaagccctatgtaaaatcttctgaacaagttttaccacttgctttcctgtgtttaatgccaatgccataaaaatcatttacacagtcatgataccaaattcccacagcatatttttaacaatagcatctagaatacagtagcttgccttttttattccttaattcttaagcagcactttcaaattggtgcatttttcaccgaaagagagccagaaaggttgttgatacatgggagaagcagtataacagtgcaaataaggataagaaagtatcattcctgtacctgtcaaatgatatcctgcaaaatagtaaacgcaagggaggggagtttgtgaatgaattctggagggttcttcctggattattgaaagacttttatgtcaatgggggagaagatggaaagaaagtagtcggaagattagtaagttattcttaattccgttacatgtttaatggcaggaaaagtctatttacttcatttttttctatcacaaggccaaaacccgaaaagtaaaaaaatatatttatttttaaaattacagatagatatttgggatgaacggaaggtctttggaacccgtattgaaagtctgaaagatgacattcttggtggtagcactcatacaatgggtaacaatggcaatagctcaaatccaagctctcacccctcttcagtttccaaagctgtgcgaaaagattctggtacagtaacaaaagtaagttgccagatcttgacctgctaaagaaatattttcttgtgctgaggatggatgcagtatattgtcatgaatgtgagctatttttgttgttttttcttttgatgtagaaacttactattggcgggatgccagaaaagattgtaacagcatatcagtctgtgcttgatcaacattttgacgaagacacagctttaaacaaatgcaataatgctgttagtgttttggaaaggatggataaagatgtagatgatgcttgtacccaaggtaaaggattttctctcttcaataggtctgttatgttgtagatatgtaccgttgaaaaattggcacttaatgcattctgataccttggcctgtattgcatcatgattgttccagcgttattttacttctagttccatcatgtacttgacttgggaaaaaaggaatttacatagtatttccgattttccattgatctgccatgtaaattctagactaaacaaacatctcaaatacataaaaatgatctagcatgttgacaaagaaaattgctgtacataattttataatcatgtgaaaaaaactataatgatgtgattgtagcacgcgttggcatataaaggggaaaaaacatttttctgacatttgttttcacaagtggtggtctagcatacatatcctttttcagtggaccacatccagcagcttaattattttacattgcgttccttgagtcctttatagtgcccactatgcctgtaggccataattattgacaattgctaatttcaaatttgactaaatgttttaatgagtcatagaggaaaagaaaatactgtagggcaaagttacctattaaaaatgttcctagctctgatgatatgaaagagtaaaatacatggccagtccttaaactagagcggtggtgtcacatagttccgtaaacttgaaaattgcacatttatgtccatgataatgaaccacagtaggtccaaacctcgattgactgaggctgaccgccgatgtggcgctccacgtaggcaacaattttgcatccggcccccttttgcaggacagcgtggtggtaatattgtacttagcccctttgagccacaggggtncgagctnggttctcaatgcaatcaagccgc

SEQ ID NO: 4983 - DNA, 20729 bp, Oryza sativa
acgtagattatcgtgattatcacgtacggtaacattctcagcttttgaaactctagtataccttgcggtaactgtgtggttatcacggtaaccgttaaaacgtggggtgacaataacccaccctaacggtttagtaaaccctaaatacacactgacatgtgggctcaaggatctattgggcctacatatcagtgagcagcattgtacatacagacgctctctccacgactccacgcctccacgcggacatggacccacccgcccgctacgtacgtccccacgactggcacgctctctcacacacatctgctcacacgtctgctcactcgaccacacatgcgccgcgccagcccgctcctcttctccgctcatgtcacacgcgtcgtgccgtttgcgttgcacgacagggcttatttttggaatgttttttaaaagggcttcttgtaaaaatgttctgaagaaaaataggctgtgttctacccttcattttcccaacccacctctctcgttttccacgcacacgcttttcaaactgctaaatgtaatgatttatgtaaaaactttctatatgaaagttatttaaaaaaatcatataattcatttaaaaaaagttaatacttaattaatcatacaataatacgagcttcgttttgcgtgccccaacccctcctcccaaacccagccaaatctgcattgtgcgcatgttcattctctctgaattgcaaaacccatcccctgatcgttgtttatttgaaaatgagataaataacaaatggctaaatatgctttgagtaaaaaacgactacgtataaacatcatctctatcatggttcgtcacggatgagcaaaacgatgagctccgcaagctggaaggtgtcgtcgttctccacagagagcggcgacgtcacattgctcttgccgaacccgtcccggcactccttcaccgcgctcgccgatttctccagcgatgaaatcgcctcctggaacctgccgcccttcacggcggcgccgacggcggcctgaacttgcagtatcccgccgtacaccgcctggcatgacttgaggcaccgcgtcgtggcgtcgccgccgccgccgctgctccggagcatggcgtctatctcggacttggtgctcgtcgcgttggccgtgaggaggtcgacggcgatcaccgcgaactccttgtagctgccgacgttgctgctccggttgtcggagctgagcgcgtcgatgcagaacgtgacgccgatgagcccgctgccgccggcgatggtcttgcacgcaccgtacacggccgagttgatgccggcggcgagttgagacgcagcaattaggagaacagccaagaggaagagagcgctgacgccattgttggaggaggccattgtggaaacctctgcaagtctgtaagataatgttgaaacagatggttttcttgacgccattgcgtgtcaattatataagcacaaaattttgcatggcatttaatgacctgatcgatcgtctcgaatcaatgattatatcgtggatttgtagaatcgattattgattttccgttaatttctctccccattaaatgatgcatcgtcctttattgccatgagggaatttatggtttttttaattagatgaaaaaaaagagattccttttcagagtttatggtctatgaaaaagatgctgttacaaagttttgccccgtatatatgccatcatatggatgttttcatgatgttcctcgttttataaaaaataaatacacgaatagtcatgaacatttttagaacaattatttgatggtgggcccaaccaagtttagtacacaagtatagagtatcccatatttaggacaataacagtagcccctgacctctattcaaatgtataaatcgatcacattagaatccaccgaggagccgagctgtcggaatagatttactttcagtagcacagaaggaatttatccgtacaaatatcatgatggagaaaagcagtacaaaaaacacattgccatcagctgctataagaacttgaatatatagatgaaagtatggttatactatttctgcagccaaaataaaaccttaatgacatcaacacaaaatacaatggaattgtggaacaaaaatatgcggtaactttaaaacagccatctactcctggtgacaaacagccatctacatctggagtatgtagcaacagacgagtatgaccacgagtttactttgtctgcaaagcacagataagtgacacctggtgagcaatgccatcaggtgaacacagcagtcagcagctgacttcatttagatgttaacagtttagtggtaataaaataagagctcatttgattcctgcatcctgattgaagattcaagtttttgtccatgttctatcgtcactgtcccttggtgagacaatggaaggttaataatctggaatagatgcaaaggtgtatcctggtgcccctctcgaggaatagtaagcaactcgagtctcataaaaacctacaaaacaatgtcagaacaatataatccatctcgctaaatggatacaatagtagagctgtctactatctacaacaataacaaaggacataattttacactgatgcacacttaaatagatttcatatccaaagagtatgaccattctgtttccagtatggcactccctccattccacattataaggtgttttgggtttgtcctaagtcaaacttcttcaaatttgaccaagtttatagaaaaatgtagcaatatttccatcaaactacactaaaataaatacttttgaaggaagtcatggcaaatgatcaataaataattgggggaaaaatttcattgagaagatgaaaaaaattccatgataacgttacgtgaaaatgtaaggtaaaccagtgtacattaacataccaggaaggaaggcaaggatgcccaggaacaagagaccatatgcctgagagttatccccctccatgtgacctgtgaatataaaatatgacaggaagagaagagaacatcctaggaggaggaggaatagtgccagggcaattgatttccacgggatttttctgagggattttggggtgtaagtgaaccgaaggtctacatcatcagtaaggttgctgtcatccctgtcctctgtaggaagaggagcataccccccaacattgcgtctagacgccatagtgcagtgcctgcatttgaaacacatactgtaaaatacaggtagaaaatggcatggtaatacacagtaagatctaagagttcaactgacaaagaaaaattaaaatacactgttgctgttaatgataatccaaaattacaaggtttgaaaaaaaaggtgcaccaaacagtaacagagatgatatgacaaacaaaactaaggttgtggttgtcgtcgcatgtgccatgccaagggccttaatggactgcatgtgacatggacatcacaaatttcatgtgaatcattctcagagaagaactattagtttttatagaatgattagaaaaatataagataaaattttctgtaatgcgatacataatttgaaatgaactcaaagaacagaatcaaagacaagaacaagatggcataccagacagatttgagtttctctaggttgttgcacatataaaataaaaccttatgcatcaagatgcatattaaagctttgatcatctacaatcatctgcacgaactaaggctaaaatgagcactctattctacaggataacaacctgaaaatatggactaaacaagacacatctaataattttaacatggtgattattaatcgttccttttccttaataatttcaacatggtaagtatgtaaggttctaaaagtaattcaaaattggtactccaaaagattgatactttcaagttgctgcaagatagccaaaaatctcacagacaactctagtgttgtagtcattccaatcagcagaatctatgggcattttaacacccttcaaagacacattttgagccatgcctgtcatccactcactcacaccaatcctttttcaataccaacatacatcataggttgaaaattgagatgattgattctgaacagagtctacaagttgacatttatatgtacagaaaagaacaacatccacacagccatagtgaaccatacagaaaagaacaacataactaatagcagtgatacaaagggactagtttctcgagagcaaatgtgaaacatacaggcagttggaacggaaggtgtcatgaaaacatttctgatgtgatgtgcatctcatgtaaactataactacagatcgataatacaagtatccaatctaagttagtactaaattttgctgaccaaatctttcaagaaatctaagggtgtgtttggttgctcgtatccctctagcctggctcatctccctcatccaggctaagctgagcctggtttaggggatacacatgcaggcatttggttgcttggatgagatgaacctggatatgatgagatgttgtttggttggttgcagcaaggggcggatggaatggtagcatgcaggagatgttgtttggttggatagatacatattgtgtgtaaaatacctattcttgtgggtggtgaggttacccccataaagtttgtgaaacaagattttttccaagtccctaatctatttatgtgtgataagtttaatccgtcgtagaggttatagattaaattatgttactctgggtgtgtgcacacctactaatattcctaagctcatttttgtcttagagaatcgatgtactgtgcatgtatgttttactgatgtcattttttaaaaccaatgagcagcactgatgataattttttttttaacaaatgtaacgaaatggcctggatgaacacgcaagagtgattattctagcaaaaatcaactacataattttattgacgacactggtacatttgacaattcaaaacaaacatacaaatatacgtgctcatggcaagttttttacaagtaaccaatttgataaacaaatctgtaaccgcatacaaaactaaaccatctgtttcagctatgttctgcctgcaagcttttgtacagattgcttcaaactcatcaaccttagtatatctacacttgatctcacaagtttttccattatcacattttcctgaaacatagtaaaagtaaacaggataacctgtacctttgaaacagtacaggatcagagttgcagagatcaggtcgcaagaacatcaacacttaatagtagtattatctttaccaaaagagcaagtgcagagtgtatcggtttcatataaaaacttgatcatgtcaaaatcaagtgtggttaccaaaaaaaaatgagtacatctgttgatatcaaaacatgaacaaggaacttgatagtatttgcctgacatcaataactcgaaaatgtagcaaatgtgcagaaatttgacatcattgagcctcatttccagcaggtaaataaatgcagaacaatggcctcagatatatgaagaatgtgaattagctactatcattggtatctgttcttaccagtatctatcaaatgtagcaaaagaaaaggtataaggaaaaggaaaataagaccaaatgtaggaaaaaaaaccacaagaaaatgagaacaagtgtagagcaaaaatttattcacatgcatcacaaacagcagcatatatcatcattggccatctttcccagcctaacagcaagaaaaaagaacaagtgtagaaaaatctgttcatgtactcttataaattctgctcaattcaagtgtagaggtggcctcagttctgctaagatcatctgaagtataaaatactgagaaagatcacagaaagacagaaacttagaaagggcatgtttggtggcctgaccttatcgaataaggtcaagtgcaggcatatctgttcttatgcatcacaaataagcactattaatcaagtgtgtatctgtcagtatcaatttaaaagaacgcactatttcttgccttatcagtaacttctatttgtaggcaaagatacaatggcataacacaaatcaacaggaaataggaataagtgtaggaaaaatctattcataagcatcacaaatcagcaacattagtcatcattggccatcttagaacaaaaaagcaagccactagacatttcattccatcgaaatcaactaagaaagatatcagcttttagtagatctagcatatttatgaaggggacacggtctaatccaaacaaatcggctgaaatcaaaggaagagaggagaagaaaactggaggaggtgagaaaaggaaggagatgcccaacctagcccttaccagagagctcaacggagagagtcgacgaaagagaggggcgtagcagagagccggcgaaaccaaacggcttgacggagagagcgaaccagtggaagagagcgatggcggctagcgaaagagagggaggatgatcaacggaagagaggatgctgacggacgaccggccctcccgccggcgaggacggcgcgacgagcagcgccctccactcgcgagtcggcgaaaccctagctttccactggtttggaacaaatgaggagggatggtggtgaccctatccatgggttctgcacgcgcgggtgcaagcggtgcacgcgtggatgcagcctcgcggcatgaggcgagccaggccgcaactcagcctggctccgcgggcctttttgcatccatcgaacctggctctgagccaagtgcaggcatctaaacgaacacaaccctgctgactaggtgtgagctaggtgcggtccggaaaaccaaacacatcctaagttgacaagtatattgagaatatggttgaagtatactgactaataatcaagtaataatagacatacagacggtgaaaatttaactggcaaccaagcaatgaatcccccaagaaataaaccagatttgagggagaaagtccaggattttagcctttgagtttatggataccttgcaccagatctcctatgccgccgccgttgtgcgcctccgtcaccgccgtgcgcagcccaaacctccgcgcggcgccctagccgagagaggactgagtcaggcgcctcctttctgtcgtcgcgagagaagccgaggggatgcgcgactcggcctgagcccggtgcggatggggaacgctggcatcctgcttgtaatttcgtccaacactagtgtttattacttccattttggactttttcttttagcgaaacttaaataagtttgatcaactttataaaaataactagcaatattcgtaatatttaattagtttcattaaactgataatacatctattttatgtactaaatattattatattttttataaacttgatcatttgacttagaaaaaaaattaaaacgaacaaaaatagtactccctccgttctaaaatataaacatttttagttgtgtgtccagatttatagacaaaagttgttatattttggaacggaggtagtagcttatttgtttactcttacttcaattctgacttattttaaagtagttgagatctggttattggattggacacaattcatgtgtgcttccccttaacttccacttcatatgacagtatgagactaacgtttatatccttcatatgcatcatatgcataagcatgtcattggcatatatttcacttctatttactcattgacatgtatggatataaatcaattgtcaagcttcaatataatgttggtttatatccttcatatccaaatgtggttattgttaatggatttgtcatcaatcaccaaaaagggggagattgtaagttcaagtgccttaatttggtttcggtgattaatgacaaatctaattatatgagacttatgtttttatgagcctttctttgactagtctcatttggatatggaagtaaaaatgatgagaggtatgtattaaacttcacatattctaacttggtctctcttgtggatccaaaatattgtgttagcttcctatttgatctttattgattatgtgcatatgcgttccttcatatccatatgtatgcacatcttgagggagagcttatcctatattttgtttattataagatttctatcttgatttgaaatcattttttatctcatcaccaaagagagaaaagattgaaagatcttggattaaacaatttgtgtaattgttactttagtgatagatgataaaccgatgtttatgggattaacctctcttttgcataagttgtctactaggttatttcccgataatgagatgtggaagacatgcattcttttttgatggaccttaatcatgactaggatgaaatgcatggagataaaacgatatgtaccacttcttatctcctactttttgataggttcatatatatgatttccatgttattgatatataagtgtgagactaatatttactcgaatgttatcttatttagtctcatttacattgagaacatggagatcatgaaggtatatgttttatgttggtctacatcattactacatatgccttctctatatgtataggataaacccccattggtcattctctaattatgcatacacttgcatctcttgtatatttatttgtatgcatatatttagggggagcaaatcctatacatttattgtgcatgttctagatccatgttgttcacctattatttatattggatctttgcacttgagcttgcatacgagtatatgacacttgtgatgttaatgaatactcaacaaacatatccatatctttcatatgcaaccggttggtcatcaagtgaaggatgacaaccgatttgttgagactaatgttctcctttgaggtgtgaaaaggaataggtcccactacgatgaggctaatgaatgacaccatgggttagtggtcaccaagtcaaggacatcgtcatgttggcaagaatgaagtcaagcttttgatgagaataaagtcttgacaaaggatggacaagacctcggcataaacatggttcaaccgaatggtcacaagtgttgatctcggctcaagcttgaccccaagatggatggcgcaaggcaaaggtataatgtagctaagaatgttttcttagtcttttcccggtcttggtgtttggtgtagactagatttgctagataggcgccgtactatcaagaggggtctatgaagcgagcttgtggatgatcttgtgctatattagttcatatgcatgtaggtgcattttgtgggcttgtctaaccaagtgtgatgagttttctcaagtcctaaaccaagagagaagtgggcatgtccaataggagtgagtgacatcttgtgggtatgtccggtggatatcctttggagtgtgagccctttatccttgacttaagttgtgtttcttggatggatttttcatgggttggatggccctttgaataagctttccatagagtccaagaacgccaaattccgagacccgagtcaagagatatcgccgttttactaacggttggttgagctgaaaagtgacctgcggtctgaccgtgggccttaggccggtctgaccgggtctgttagccggtctgaccggcgtggtaaggccggtctaaccggctccactggtctgttgcactggtctggtttttggtggcgatacagagccgccagagccgcaaccggtcagaccgagccgacggcggtctgaccgagccgtggacggtctgaccggccactacactgcagttagaccggccaggttgagtgggctcaatgattgccctgtaacggctagttttctagccgttacaaagtagtccggtctgaccggcctcacaacggcggtctgaccggcagagcacaaagttggggatttcggttccaacggctagttttggtggttgggggtatatatacccactcctcagcagcaagggtaaggttttggcactccattgcattatcttgaacccttgcaagagctctcacacccttgtgcacttagtttatctagtgaggtgttagagagtgagttaagccaatccaagtgcgttgcttcattgttatagctagtgtggcacttgatcatactcggcaagcatcctagacttgttactcttggaggttgccgcctcctagacgtcttgtggaggtgttgcccggtgacctctccgaggagattgtggaggaggcccggcaccgtttgtgagtggtttggagttcaccaccttcggagtgaaggaagaactaccccgagtgatcgaggcttgggtagtcctctctgtgggccggctcccgccttgcccaccccttgacgaagggggcgtgcggtggcttcgtggttgagcggtggagttgggctcgcctcaacggggattaggaaaccggcgagtttccgaacctcggtgaaaaattccttgtctcttgtctcatttatttgctgcatttatatttgtgctatttacattcatagagacatatttgagcccatatcagttaggtttgcaaaacttaacttagttgcttagttaaccttgcacctcaccttgtctagcaacttaggttagttttgtttaagtgccattaagttttaaaaccgtctattcacccccctctagtcggcctgcttgatcctacacacgcctgcgtatgccgcctggcacatctggaggctcactgttgtggcatcgtcgggtttcatgccgccgccatcatccttgaggatgctgtctatcttggcattggcgctcgtcgcgttggatgtcaggaggtcgatggcgacgatggcgaggtcactgtagtggttggcgttgaggctccggctgtcggaaccgagcgcgtccatgcagaacgtgacactgatgacgccaccgttgctgccagcaacggtcttgcatgcgccggacatgaaagggtcagtgttgatggcgagttgaacttgagacgccgcgacgaggacaatggcgaagaggaagagggattgatgacgccatgggaggagaccattgtgaaacctcgatcgatctgcaagatgatgtcgaatagtttttttggatgaatacctttgtggccttgcgtgtgaactatatatggacatgttttgcatggtgttaaaaacgaatagatcgtgtctctagttaatgattagatagagtagatccgtagagtcaattattgattccccgtaaatctctgaccaaatatggctaaggcatgtataataacaattaatagcatgttctctaagttattaataatatgattttacttacataaaaaagagaagacagagaaatatatttgttacgtgtgacaacgacagatttttagtgttgtgttacgtgtgaaaaaaaaacattcgtgacgcctccgacccttctttccctcacatcgtcgcacattctcaatccaatggtttgattgtgtgaacccaacttggggagggggtttggagaattattctccgacctggtgtgacctcccactaagccgtcgcggcgcttgccgcgcctctgacactccatactaccaaacgcctccggcaagccgttgtgttgcgctcgggtagcaaacaccacgagactcatgacgcttactatgtatctcgagataaaatttgatacctttagatactaaggctgtgttcgctcattagggttaggaacccatctcctttacacggaaaacggaacggtccattaggacatgattaattaagtatttagtaattttttttcaaaaatggattaatttgatctttttaagcaactttcgtatataaactttttgcaaaaatcacactgtttagcagtttgaaaagcgtgcgcgtggaaaacgagagagaggggttgggaactagaagttccgaacacagcctaagtatctcgagatacctctagttattagtgtaaacttttctagttaaaatctaattcctctatatactaagtatctcgagataagaaaaaggtgtaaaatttaggtaccgagatatcttctcaaggatcgtaaaatttcacttgtttcagagatgtcggtccatgatgattacaagcatgcgtgatgtatatcatattttactataaagttaatgcttaataactactaaatctcaatatccaagtgtgtcacctcatcatccactttaaattttattatttattgcttttgtcaggtgtgatgtaatatgcattagtacatttgtttgtacatttttctttatcgcattatattgtttgttacaacaatgtgtgcatttctgtcattttgtaaaattcagcagattatgtatggaagggaacaaataatataatgtacttacaggtacacatatgtgattacttgcaaacggaaatcctctagctggtacatcaagagaacaaacaaaatgaagagagaaaaagtgagacatgggctaagccatcgttggatgcacttaatataggcaaatagagtatgcatacattaagaatgtcttgccatttctgagtgtataattaatgtttatgtggtcacgtacttgcatctttttcttcccctcttgtccttttgcagtgttcaataattgcatgccaccgaaattcatccatgtaaaaaaaaaattaaataactaggcacaattaataattcaagctagacatggtaaacagacaagaacttgattcgatttgtgcaagtacatatacggaaatactactactgtccaatttccgacttcatgagatttatgtctttgtggtcagtatcttcccctcttccctctcttgcttcttgccgtgtgtttgcgtgcttgccagtgaaattcattcgatgaagatattttatttacataaataggaccaataattcaatgcacgcatagtaaaaaaaaaaaaacttgcatgatttgctttgtgttaatttgtacatggaaattggaaatgctgtcctcttttgtcgatcctgttcagttgcttgtcgcaacaggacatgtctagcccgagaagcaactgaattgccgatcaagcggttgcccgttctgcctttccaaccgctcgatcaagatccaacggtgcacatactcagtagaggcgcttgcattattgcgtccgtggctcaggctacagatgtcacgttatgatgtagctcagctcacacttgtcttgttcatagcatgagcatcgcacgcctatttaaagatgctatagcttcgattccctcctgagctctaacactatcgaagcttcacaaattcagttgacgaattgtagctgttctctctcgtctccaagtgttggaggcaaaggaatccttcgatccataggttcaaatctctctctcctccactcttctgaccctgatcttgttgtgcggttgaaatgttcgacgaaatgcctgagagaaccactctgctttcccttctgctgttggttctctgcatgatagattcgtctctgtttcttcttttctaaggaaaattttgtggggtttcactgaaatttggatggtttactggtgactactgacgcttttttggagttccctttgtaagtgcttggttgtggatttatgtttctgtaactggcagtttcgattttcatgtaggtctgatccaatgatacctattgttttctcttcagtttcttgctgttaaacgattcaatctatattgttctcatccctttattgttactgcgcttactctatgatctatgggctgaattagtgtttatcggcaggcaggacgcaggacagagaatgggtttcgaagaaacatatttttctgccttctgttacttgcttcttttctctgtcagctggaaatgccaagctgcagaactggacatggctcagacagcagtactcgaagttgatgcttcatggaacctttctcgaaagatccctgacacgctatttggattgtttttcgaggtcaggctttgcttatttagcttctggttcagtacatccttctcgcatcactcccacgggcactagaactgatatcaggatcggctcaataacttaatgaaccttacctgggggatgcataaatgcatctagtattttcagtcgaatttaccgttgttcacacttcacactgcagcacgttgtactagctatgatgagatttaataaatcttcatgcccatcttctgcttggtttcagaaaataactcctattctgtacatgttttctcctgcgccggtgtattatagttccattttcttctgtggatggcggtgttgaaatttttatgcattacttgggaagaggagggattggggtggggtgtgtgaagatttcttttgttggcccttgttatattcattacatgttcgctgcaatttgaatattctagattatcctcgacagtcatgataactggatcggtgaacatcacaggaaattaaccatgccggagctggtgggatatgggcggagcttgtcagtaacagaggtaactgtcagcttgataatcatgcctcttggttcccttggaagctatgagaaatgaatggatgcacttgactaagttgcagatttgttacatggaaatagatatatcagtcctaaaaagcaatgagtcattgtactgcctacttgtcagagagagagagagagagagtagcattttaccagtggcatacagtgtagatttacttcataatagatgttcttaggttaataggtctaatagtcaatgaaggaaaataaattataaagtgaaccttttcatgtgatagacaactcctcttttacaaggacaatatagaactccatgtcaggatccagaaccatggtattatacttcttgtaaaagagattaagagcaaacttccctcctaaatgaaatgatatgcatcactcctccttattcatgagaaaaaaatatcaactctcgtcaagagtatttattatgtttatccttattcatattgataactgaaatcagtttgcctaacttctattggcttctagctagagaacagaataggctaaagctcagcactaaaacctagaaaatgaaacaaaagaatctgtgctttataaatttccattaacattgaagtattgccttcactgactaatgcaaaatttatacttcagggtttgaagctggagggccccacaccccttcaaatattgacccatggtctatcattggagatgaatcctctatatacgtcacgactgattgctcatcttgtttccgccaaaatattgttgctctaaggatggagattctctgtgataattgtccagccggcggtgtcggcatttacaacccaggattctggggcatggtatgagactctgtcaacgaaaaataactcacagtccaaataatcttttcttctaaatgacagtttacactgtacacactgtcacttacagaaaatacagcaaaattatcatttatcttccaaaaagtgaaactaacaaatagctaagctaaccctttttttttttggtttcagttcatgttgatctttttctgacgtagtgttggctttctatccaatggttgcatgttgcttacttggaaaatgaataactgttctagttttttcttcaaaccatttccacttttatcttctgtttgttttctgggattttaccttctgattatttgaagaatctgttcatttcaacttccagaatatagaagaaggaaaagcctataatctagtcatgtatatcagatcattagaatcagtcgaattgacagcttcgctcacatgctcagatggaatgcaaaatctggcatcagtttctatacagtatgtatctttgccatagaaataaataattgttaatgtcttctttgtttaagattgaaaggattgcatattgaaatgttgcagaggtattgatctgtcaaattggacaaagatagagttgcaattactagctgaaggaacatgcagaacttcaagacttgaattaacaagtatgaaaaagggaataatttggtttgatcaagtgtcactcatgccttcagacacatacaaggttcatcgcattttcatcttgctagtggctactgaccatcatagaagcatgctttgctctgggagcagccactgaatatatatatatatatatatatattttttgactgggcagccactgaatattcatgaagaaaatatagtaactagaatactcgaaaagataaagcaacgatgcactgctttgagatgcagatatgtgtactagcagaattataaagtattcataagtacataacaaacatgttggttcaatctcattgctaattaataagtcataataaaattttatattcattttgaaaaaaaactggaaataaaatctatccctcctttctttattggcagaccatgattattagtttacaacattttttaatgggaattttctagcaatatttgttaatgggcattttctgctatatgtacagggccatggctttcgcaaggaactactatacatgcttttggaattaaaaccacagttcctacgctttcctggtatttcttgttccctaaccaaaataaactattaggggctttgaacatatgccttggtttttcgcatatttacgatcactgtattatatccagttatttctcgttaaacttcaaccctatattcctttttaaaaaattcgaggtcatattctaactagaattaggaaaaaaaaactaatatccaggtaactaaaaataaatcaaacgtgcactttatgatgtctgccagaggaattaataaggacttgctatcataatataacagaaatacattgtattttactttgtgatgttaatctaaatcattgctgggataggaacaagcattaataatcaagactctagagtaaagcattaaaaagttgaattagtacaaaacagcatgttagacatatatacatataatttttagataacataacatatagataactgttcgtctgtttgtccctaacagttatagatttacctatatttgcatatgatttccataatatcctagatagtgataacttgtagtaactaacttctgaacaagtccatatatgtctcaatcaaaaactttatatgacacttttgataggggggtgctttgttgaaggcgattggttaagaaatgctttcaggtggagggaaactattggtccctgggaacagagacctgggcactttggagatgtttggaattattggaccgatgatggcctaggatattacgagtttctccaggtgtatgttagttaatgccatctgagtgtttttttttcatctcttctgctatcaacatatctaacgaaatatttctaccgaaattttcatggaaagctttctgaagacctgggtgctgcccctatttgggtgttcaatgttggtaatacattattcttatttatatttttcttgttttaccatatgttttcttatcgctagcatgcccattaactgcttacagtttttatcttgaaatttagggatcagccaccatgatgaagtcgataccaccataattgaaccttttgttaaggtacgttaaatgcccaagtaagaatagtcatccaaatataactgggtagagggttactacggttccatttttccttattgcagatgccatcattgcaaaacaaaatgttgttctatgcatatgccattgtttcaagtttttttttcttattataggatgtattggatagtcttgaatttgcaagggggagagcagaatcgacatggggttctgttagagctgcaatggggcatccagaacggttcccactgaagtatgttgctattggaaatgaagattgtgacaagggattttaccgaggtatatttttattaaccagagcttgtcatgctaatgatcccatttgttgtcaatgccatagttgttctcattagttttcaatagacacatctataggctaaaatgatgtgatggccaagtataattaacacaaaatctcttatcatttatgtctgcatatctaaaaccgcttattttccttcttcgttcccctttttctttgtttgtatgccatcattacttggagtcaactacagttatgaaaaaataatttcacccttacaaataagcataataaaaatataaacatttgtaataaataatagatgaaaatagaatgtatgtaacttttagccatttattgtaccagtttccgaggatacattttctttgcacatgaagttataattgctcataaccttcagagttactatagccttcactaatttcatgaaagtactagagagccatgacggttttcaatcctattgtacaggaaattacctcaagttttatgatgctatacgcaaggcctatccggatattcaaatgatttcaaactgtgatggatcatctaggccacttgatcatcctgctgatttatacgatttccatgtaatcttctttcatcagaaaatattctccattttcactttttaaatactgtttcatgatttcgacatacttctcattgtgttttcattaagatgcattctgacatttttttcaggtctataccagtgctgctaatctttttatcatgaagaataagtttgataggacatcacgcattgggtctaaggtattttttaatccttatttggatagtatgggtctctgggatttctggccatcatggtccatccaaaacatgacctttgtttttgtgatttattctggcaatagatatatccttaaaatactgatataaaggttggccttaaataggcctatcttcctaattttggtagaatatttttaggacattgtttcttccatattattctacctgaagttggtttcttcatttatttaagtttctttagaaattatattgaagtcataattttatacgtgcaaattcaatcaatggtgttgtagtgtcaactgtcacaacactctggaaggctttgtttctctgtaccattacagttctcttgcatctcgacatcctaggatattggatacacagaaagtagtcattaatgactatgctataatcttattccaggtatttgtcagtgagtatgctgtcaatgaacaaagggatgctggtaaaggaagccttcttgcttcactggctgaggctgctttccttactgggttagagaaaaataggtgatctccttcacttcatactttccttgaataatctctctctccatattcttgggctagctgaaatgctgaatcatgcatgcggctgtatttagatcatccatgacttttccaggataaatgtcaatattgtcatgaataattactagtttatgaccctgtttagataattaaatttgaattgaggggataaaagtttgtttttcagaaattacaagataacatgtacacatgttgtaaatactaatactgagcagcaaaaatactctccatcatgaataaattaaaagtttctgtcatgtttctttgcagtgatcttgttcagatggcaagctatgcaccgctcttcgtaaatgacaatgaccgcacgttagtacctttggctttgccttttttattttctaacattcttcttgttcacaagtgcttgagtttgactagctctgaatgtgatgatcagctggaacccagatgcaattgtattcaattcctggcaacagtatggcactcctagttattggatgcaaacatatttccgtgaatcaagtggttctgtgattcatccaattacgatcggttccagctactccgattcactggctgcatctgcaatcacctggaaagacacacatgatatctttctgagaataaaggtagttaaccattccatttttttcctaacttgcataccattgcagcaattcattagcgaattacctaaatgttttgaatgatttagttacaacaatataaagcgatataaaactgattgagccactgcatacttgcacatctgtttggattttagaagatatattcatcttcaaaagatcttctgcagatagtaaactttgggccaaatgctgttaacctcgcaatatcttcaagaggacttcaagctggcgtcaatacggcaaaatcaactgtgactgttctcacatccggcaatttgctggatgaaaattcatttgctgaaccaaacaaagtaagacaaccattggttggatcacaagttatttgtttcataactatgcactgaattagtgaatttagcagagggtaagtttaccattacaactttatagaatgcacacatatgcaagccgtatgtcgtaagcaaactctgtctttcagctttatttgtaagcttttaagaaattgtttatttagctgtctggaattattctctagtctttctcgataattttttcgcagacagggtcaatctcagtgtggcacacgatattctcaggtgttggcgagttcatctaacgtacaagtatcttgtgaacgatggatgcaggtcgtaccggttaaaagcgagctgccagatgcttcagaagagatggaagcagcgctctctccttattcattcacttcatttgacctcgctctagatcagtacagcaagctcgtggcagagatgtgaagcaatgatgcacacttataccagagaatagaacacaggatgattacgtgaggtgtggtacctgaatttcagaaagctaacagagtgtatatactgcattctggcatttgctaatcacacttcgtgtgaccctgttgtttatgacgctgtaagagtagtttaaggttgtcacattatcgaacctagcggtaa

SEQ ID NO: 4984 - DNA, 10246 bp, Oryza sativa
ccacctaaccacatttattgcggtttggctgagcatgtcacgccgcatgtaacgcagtgcagtgcactcgtttatccggtctgtgaccagtcacagaccggtcagatcgcgggttaggtggcgacaggcgatctgacacacgcctcgccccttcccgtcaggacgagggcttctaggcgctcgtccccagctggagctagcgtgttacctcccagagatggcacgttagtcctggtcagatatatgccaggcttcatcctaaccattacaggcaagatattgtatgaagaagggcgaacatgcagattgataaactgacgcgtggtggacaagaatgaccgatttgtgaccggtctgacactggtcatgtcgtcagcagacagccatgttcccacgtcgcgcctgcttccggcggaagtggaggtaggtatgggccgtcccatcagaaggtcattcggacggcaaccatacaagtctccgtctgtttatgaaaaggtggggtaagtccccacaaaaaaagagagaaatggtgcatgtggtatccccttaagatataaaaggaggaccttgcccactgagaggggggactggacttttctagattagaaacccagaacaagggagaggctggctgatactttgtagctccttcatacacagatctcccaaaacacaggagtagggtattacgcttctcagcggcccgaacctgtatacatcgcccgtgtcttgtgtgtttcctgtctcgcgagccttccacatacagagagcttagaatctctccctgagtccccggccgaaccggcaaaggggggcctgcgcggtctcccggtgaggagccccacgctccgtcagtttcgatcttcaacaagaggtaaaacttgtcatgacgacttatgttctcaagattagtgcttccatctttatgacactctaatcttgtctatataattcgtcgagttatcatatatttcacataatctttgataatatcttcatctaacctataatcggctaacatctgttaatggaaggcagccgattaggttagataatgatgttaacttagactatgtgatatatctaccactctatgaaacttccagcggcttgattgtctagatattgtttttcttttcatacttaatgctgcatcagttgagtttgatctattaagtcgtgcttagaattgcaatctctagcctgctttctgattgctgattagggtagtatcggagtttcaaccgatcttatctgatttaactacttttattctatatgcttgattgacatgttaaatctgccctttatgttaagatattgtcgcatctaagtatattaagcttatgtttagtatattctacttgctttaaaatcttagtatagagtagtatcggagtattagccgatacatgctagatctacctgatcggctatgctatgaatgtatataatcctactattaatatatatttcgatctaagtgatttatactgtctcagcaaggcgaccgatctatcacaatcatttgatttaagtatatattgatataaggattatatatcattaacatctacagccgatcgagtagatttagttctggtttgcttattgatatttgtcggtcgatgtacacatgacaacggcttgaaataaatgatatgtcatcggcacctagccgatcggctatcatttataggattaattgtggtttctttgttctatttcttgttgattgcaggatcaaatcaactggcacgctcatacatccgaagacgagctttggacctgcactggagttaagcagatctcccaggcctcgtgttttctgtcaacatatatttactgagcatagtgattgcagaagcattatattgaagtagctaaattttgcacatacttaacagtcttatgccacacatatatatcatttggttactgctagcttgctgcctgtcatatgggcaacactgtgttttatttttaagggaaaattgcaaaaaccaccctcacatatcactctgggtttgagatgttccctcataagaagatttgttgcaaatccccacctcctaattcaccttgatttgatttaggcaccttttctctatacatgcatgtttcctagagaatctcatggtgaaatcaatcgagtcccactcggcaggaacaagaggttatgttatttgttctgtataagacgatctttgtgcagtaccaagaaattaacaacaccctaaaacaaaatttccattgattacattgccaaaaccaaaaaaataaccacttgctaccatgaatttctaccctaacgaggatgtaatctgatagtgctacatatgaaaaaccaactctctgtaaattgtaatgccaacgaaatctcaaattttaccaacacccaagaacttactgtatgtccgttccgcgatcgtcgaagtgaaaccctttctagtcgcttggacaagagaaagcatcacaatcggcggcgatcttcgcagctgttccgcccgctaccgccgcctcaatctccactcccgactcaaactgactcggagggaacggtgtgattaactaggtctcggcgtctctcgctcccgtcaagcgggacttggctaatttcgccacgagatgctccaggaaaaacgcatgtgtagagagaaggtgtccaaatcaaaccaaggtgaattaggaggtggggatttgcaacaaatctttttataggggggcatctcaaacttagagtgatatttggagtggtttttgcaattttccctatttttaaggaagtcagctgcagtgcccaatttttcattaatatcgcatacggccatcgctcccataagctaacaagacctaatttttcagaccaatcagttcaatgaatcagagaatgatgaactacccaacatggtcatatctctgaatgcagtgcaccctcttttcagcatgctcatatgtgaaacatgctcatatgtgaaaccacctaactgtattattaatggccctgttatatcatacactagcaatatgtatgacaccttcaaagagcaagctataaaaatgagtgcaaaaaattttatggctggaggtacgtagacagactacataatcatgaaattaaattgcatctagcaattgttaattgcatcctcaccagtaagagtgaacaatcgaaatcgtaatatggtgatttatgattttttttagatgaaatactgcctgacatttgccgagcagtgttgtatggtgatttatgactgaagcagtctaattccacagttagtaaatttaaatgtactgataatgcaatagaaatgtaaaaccaaataaccataaacaacatccagtcattcagtgttcatcagcactgctgtgcttaacattacgttaaattgtctatgcagaaactgtatacatttctttgtgtcaatatgctttttatcgcctccaatttgatgcatagtacactttagttttgactgtgctaatccaggtcattgagtaattagtccctaatctatccatctcctacttgttcttcctgtgatcattgccaccccaaactctgaggtcctcatcgatgaaaatgaggaatgagcacaggaaggataaggggagccgggaacgagatagatttagagttgataaaatgtacaaggaccatcaataaattagggaacatagatagattcagagtttggggtgattcatgcagatgcagagatgacaaaaggtacaacatagatagatgcagagatgacaaaatgtacaaggaccatcaataatttcactactgacatcccgtcaagccaaaaggtacaacatagatagatgcagaggtgacaaaatgtacaacgaccatcaataatttcactactgacatcccgtcgagttgcttaacagaagatagagtagaggggataatatggtcacctggtggagttcatggttggtgactttaacgaggatgtggcagcgaagcaggaatccaagcccagttttagtaggccaacatgcagctggagcaagactgcaagaggcggcatcccggtcgggtggcctgagatggatcagatggcgtcgcataggcactgtactgccgatgatggcgccggcgggctagggcgcatggtggtggcaacgaattgcattcggcggagcgatggttgctaggagaagtcagggagaggagaagcgctatttcggggagggggggcgcagcgtgggaggttggtaacgatcgctatttttgtttttaatcggtggttacgtgttgcagagcaggagattgctaattgtagggacagatttaactcgccacataagccattggatgaaaatatctaatggttaaaagagaattatgtacaatttgtggataaaactgttacattttatatcagtatatctctactatattataagaattgaagatgtttccgctgaaattttgatacgtcattcgtgttagtttttcagtttgttgtacatcgtctatacacaattctatgtaagtatagaatagctattatacactctcctcctatctcaaccactcctcctcccagcccatcccaactggcccacaccatcctatcagcccatcctgcgtgcctccactcggagccgcaggtgcaactccccatatcagtgtcttttttctcttgatcatcctgatcctctccctatccttccaatctcctctcttttctctccatgttctcttctttcctcttagttttctctttcaaatttctgttatcataaatatttttgttttgatattatgaatatttaaggtatatgtggcaagtttgttactttagaaatgtttttcatctatattaaaaaaaacttccactgattgaataatcaaaatttcaaactttggtcaatgaggtatagagaaatacgcatgcgtcaacttatggaatagccacccaacgatttgtaaggctatggaaatgtgtacaaaagagattctttgtgtgatgcatgaaacgagcgcaactaggttcaatgctatatatgattcctaattttgttttgtttgtcttatttcggtttgtcgtttaaattagtggagtttttatcaatcatgaaaattatcttcacctgttgcagtattttttgctagtatacatatagatataaaactgattctttggtgcaaggttttgtgccaagcgtgaaacgctatgattcgctttgtctcttaactctgaacgcgcaatacatttagcttgtagtaatatatgcttcttttattctactttctacactatctgaactcttagaaaaaaatgattatgctacgattgtgtcaggtcaaatactcaaatgtgcaccagatgttcagtcttttacatacaagacatgcgtgctcatgacacacaaacacaaccgatgatttctgtgatagtacgtaattatatatagaaagctgctatatattcaaacatacacaacttggagtctaggacaaagagcatggccgcctcgatctattgatagctcgacccattattaacatactacttatatatcatgatactcagttatactgtaataaccagcacacagacatcgatcatacaacaatcgatatcctaacttccaaagtagctagtacatcgatctcaagatcatttgtatatttctcgaagccgttttttgggtgacacagcttcaatagctgtacccaatggccaagccgcgtcaatgtagtactccccatgcttcaccttgtctaccagcgttatctccttacttggatgtagacctgacatccaattatatatatattaattagtaaactgcatgttagataaattgttcaacaatttacacacctatatatgagttctttttctttagagttaatttcttatccatggatatatattgtatctccattattagaagctagtgtacgtaccgaagccgtcaacgagcaaggagtattcgtagataagatccatgcataagtaggcatgatcacgaacgttggggtattctacttttgcttctttgacactcagtttacaaaccttttctgcaacagccttaaacgttgcaggggttgacttcgcactgggtgcatcgctgttgatgaacccaacctttatcccggtccgatcaaaatgtatgcattggagataaaattatcaggtaaaagtattaatttgtatatgtaacataattacacaaacaattaaatgcacatatttaggggtatatatttacataactagttagctagtagccagtctgaagcatgcctgagaagttaaataatttagttggctaattaattaagtaatcacgacgtacatgggaggctatgtagtagaaggcggacgcaacgtagaggtcatcctgccctgctccgccaccaccgttccagacgccattgaagctgcagttcttggtttcgcagggcgcattcaccttcagtaacttcactacttcttctctgcacttgtggtagtctgcaccttgtggtgcggccgttgcgtcgtactgcttgccgttgtaggtgaagttaccttgtttttgccaaatcaacaaaacaaattaaatctcacttggttcattaagcactaaacgttaattgattatatgaatcttaaaggattaaagggtcgatgcgtatagtaaacagaacaagtaataagctagtatctaggtaccactgaatccgcgcagcatgcagttgctaaatggtccatcctttctctctaggatgtgcgcgcgagaagcaaaaccgccatagtgcaaatagctgcaaattgttgattgatcttagtaaactacggttcaaaagactatatatgcattatttttcatattttctacagtaagttcagatattaacaggctaaagcctacaggcttcaatagttcagtttattcagtattcactagtacagtgtgtgcaacaaatgaattaatgttgcactttctaagtagtatattattcaccagcttgcagtggatccagatataaaattaaacaaagatcaaattatacttaacaagagcgtgaacttattaattgacctgtgcacataaatgttataatcttttcccttgagatactccttcacaacatagggatcttttccttcgggcacctttggagcggtagcagcggtgtttgatgagatggcgtatgccatttgtacggatccacctccaagatcaaccacccctacggttttagagtagtctcctcccaatttatccaggagataattcagagcaacccatatgtatgacccttcctgggatccctcaagaacgttgatccagttcgggttatactgatatttgctcttggtgtggactacatccctaacctgtattaagacccagagtactaattaaagggattattaagaacaaaaagttattaagaatcaaagcaagaaatggttttgagttaaaaattttgtatgatatgatgtatatcattgtggaattgcacgtaccgcttcaagaatctggttcgccttttcatctccaataagtctgagtccggcagttgcctagtacatgtttgattgaattaacaaagaacaaaatttagagagtacaagaagtcaggccattttgtttcagaggaaacatatcatcgttaacattttgtcagtagttttaagaaactatttcgtcagataaaccatcatacggaaacatccgtacgtattagtaattttaaattaagttcccgatgcaggtttcgtttaataattagataaagagcaaatcaatttagttgtgtacgtaccccaagtttaaggggagttttgttcataagtctggcaggaacaacggtgttggccttgtcaagcagaggcaatatggagtttgcggcatcctgaggacgtccagcgtaggagctcagcccaggatccacctacaacaacacacaaattaattagtcagtcagtagtaggattaaaatagctcaattaagtaggtactaacgaatcatcatatattaataagtacttcctccgtttcatattataaaactttctagcattgcccgcattcatatatatgttaatgaatctagacttatatgtgtgtctagattcattagcatatatatgaatatggacaatgctaaaaagtcttataacctgaaacggaggtagtagattagattaatgtggttaccttagcgaagagctcgatgttgtcgccgaccttgaggaggtccagcttgttgtcgaacctgaagacgtgcacccgtgtgccggtgctgccggcgtccaatatcacggcgtacctccccggccccgccgcctgcccttccacgacgccgcctttccggccgagcaccgccgtgtcgtcagcaacggccggcggcgacaaagccagcaggagaagcatggccacgacaaggtgatcagccgccattgctaactagacaaggtgaggcgcaggtgctcatcaacagaatgcaaggggcaggttttaaagggagaggggaattaatggattactaacgtagagtttactctgcataattcagtccctaatcacagtgtccacccattagcacagtacaatactcaatccgtattaattgtatttactgtaataaacagcttttagacggggccgtgttgcaaaggtttcactgtggattcacgtgtgtaatcctagtgcgctagctttattgattttgattgatcagaagaactgattcttggtgcccagcgtgaaacacgatgattctatctgtctccaactctccttacataacaagtttaaatcataaatattttcttggaaagaaaatcagttgattgtaaaagaaagaaaatcagttgattgtaaaagaaagaaaatcagttaattgtaaaatataggattccatttccgtcaccgtcagattagacccctaacatcttagcttcctctcacacggttgggtccgtccgtccatgacatcaagggggccctttcgatgcaggcgctgcacttgtgggatcggcttgaggcaattcagctacagccggattccagggacagctttgtgtggaagctttcggccgacggaaactactactcctcctcagcttactccatgtttttcatggggaaaacaaaggtggtatgggtggagttagtctggggggctaaggtcactcctcgctgtaaaatgttcatgtacctgacggctcggggcagctgcttgacctccgacaatttggacaaacgcaggtggccttcctgccctctctgttcgtctgggccagaaaccgggaaccacctgtttgtcaattgccctttctccaaacaggtttgggcgcaactgcgactccgcctccgccttcagccgcaaacaccaaatatcccccggtatggtttcctggtggctgcatgaacacgagcttcataacaaacaagggaagaaggtgtttgacgctagactcttcctcttctattggctgatttggaaagaaagaaatgggagggtcttcgaaggcgtttccaacttccaagacagcaaccgaggtggcagaagccatgacagaggagtggtggacttggagagatgctggtttaggtgctaggatcgagtctgtatagtcctcctgtggtattagacttggcagtggcatgtgtatagctatgttgtgggtcttcttccctgtggtacttagctcagtctccgctctgggcttggcgatggcccgactctctgctccctaggggagcgttagccttctccgtcaagaaccgttattgttgtaactgataatcttttctctcattttaatacaatttcgtcggcttccgctggcccagcgaaaaatcttgcttcctctccagaagttcactttatcttagtaatggttgccccttgttctctaattgatcagacaaaccaacaaaaagttaactatcctaactctcttcctttcaaatatattccattatacttgaacgcatgtattggcgctcaaatcttttacatgttcgcttggatcaaatatcaatcataaagggttagaaataactagttgttgttagtgctatctatattcaaattttaattgtttgtcaaatatgttgattattttccaaattatagcaacatagattaaaagaagagtctatccacattagtatttcttgaattgttacgacttgtacctaacaaaacagtccatatcagttacaatgtgctactccctccatttcacaatgtaagtcattctagcat

SEQ ID NO: 4985 - DNA, 59876 bp, Oryza sativa
gcccataggtgggagctggccccgtccaatctccctctcatcccacccccaatggcgacgccgccgcaccatctcctccaactccgaccatccactccctcccggcccttctccacctccgcctcgcctacagcagtggcaaccgactgtagagagtgtgcgtcgaccgcccgccccccgcccccgcaggcccgccgtcgtgcgcgccgaccgcccgtcccctgtccccgctggcccaccgtcgcgggccgccgcgagggattgcggccgaccgcctgccctcgcacgcacgccgccgtgtgccgcccgccgctccacttgtgcccgtgcgtcgtgacgatgatgatgagagagagaggggaagatgggaagatgaggtcttacaggtgggccccaccattttaaaaaaagaaaatgctgattggatttcaacctcagcgccacgtgtatgccacgaaagattcataccgcttcagattgagtgaggggggtaatttgtccggttttaatagtttgaggtttaatatgtctggttttgtggtttgaggaggtaattcggacgatcgcgatagtttacaggtaattcgtaccttttccgagattgaatgattttgtcaaataaacgtgaactggttaaataggcgagcacagtcagctaagacagcaagtctgggtggtgtagttggttatcacgttagtctcacacactaaaggtccccagttcgaacctgggctcagacacaaacatgttttttccattttttttcaacaatatgaatatttttcttaataacaacagcataattacatgcaaaaaatatttctccataacaataaccatttttttcaacaatttgaatatttttcttaataacaacaacataattacatgcaaaaaatatttttttccatttttttcaacaatttgaatatttttcttaataacaacagcataattacatgcaaaaaatatttctccgtaacaattaccatttttttttcaacaatttgaatatttttcttaataaaaacagcataattacatgcaaaaaatatttctccataacaataacataaaaacttgataaccacatgcacatgattttttttttcaaaaattcgaatatttctcaataacaacagcataattacatgcaaaaaatatttctccataacaataacataaacacttgataaccacatgcacatgattttttttttcaaaaattcgaatatttctcaataacaacatcatacttacatgcaaaaaatatttctccataacaataacataaacacatgcacatgcacatgcacatgcacatgatctttcttttattttaaaaaattcaaatatttctcaataacaacagcataaccacatgcacatgatctttttttttaaaaaaaataaccctccatatcatcgagcaactttaacagcataaccttttctttttcaaatatttcctccataccaacagcataaccacatccacatgatatattttttttcaaaaaaaaaatcttcatatcatcaagcagcagtataagctgcaaaaccatatgcacatgaagtcaaatatttcctatacgacctatatagcatcttagcagcacaaccatttgcagtaatgcagatgatctcattcagagagttaacagggtttagtgctacagcttcacatccatatgatctcatccactaagttaacagagctttaattctaccacagcaactagcaaaagatatagtaattgcattggtggctacaggcctacgacatcggcaatgtacagcacaaaatgtgagggtctcatctcatgccacacaaagcagcagtccttgctacatttccactaacccaccaccacaaatacagagagcccctttatcactttatgctaccattcatagagtagcttaatatcctgcaaatgtaggatggaagcattaggcagtcacaagagaaatagagttgccatagtttcagatctaattgttcagtttgtcaatatcgtatacattcttgaataaatatatggcatgctaagcttaagttgaaaatatatgcttatgtaccaaagcatgaaaatcaccacgtaggtgcctcaggcgactgtaaccacataaagttgttttgagagttcttgacttacatgaatggagtgatgaatcagctacttctaaaagagattattcagttgcataaataggttggaagaatgcatttcccatgaagaagcagtttttgttttaaaaattataaattggaacgattgttaaacaagttttacctgctttagtacaccagcctccatatcttttatcagaacaaacctcgacaatgcttagagccacagaggcatgatttgagtttgcaagctttgaagggttttccctcaaagccagggggagcacctcttgtaccataatcataagtcagttcagtcatgggagggatatgttccattgcaaaaaacatgatatgggggtagctgtcatcgccatggtcatactgtacagcttgccaaaggagattaggagaacagctatggttcagaaaacgagccacattcccttcattgtttgctcttatgatgattggtagcttcttaaagttcttggttgtcacagccgtacttttttcttcaagtaattctgctcccaaattccagcttaaagccttatcgccgggacatgaagcgcaaaaggtatatttgtcttcctcaacatctatgtccatcttagtttcatcaatgacttcaccggcgtactcacaaatgaatgtgccagcacggataggatcccaagaccgcaggccccagccacggtctccagtccagaatacctcaaagttcagttttatacccttctgtgtgatcctgtttcgacaattatgagaacactgacagttagaggagcactcataaaccattggagtgtgctttgccagcaatcccgttgcgctgtaaggaagatcaccaccattctgttgcgcacacgaacaattagggtcaccaggcaagcaaacactaggacatttgcaacattgtaatggttttgtcttcctaagaggtctcaaatacttcactccagcaacataattgaagtgacttggccctttttcatcatcaacatcattaacaaggcacacaggtaggtgttcaacctttgatgataaatccaacaatatagccttttctcttgtggcaggatttgctttccacttctcagtcatcttccaaagtgaaattccatcaggctgtcctgggtcccttctcagcttgtacttgaaaacattaaatccgttctttgccgtgtctgtccaagtgtcttcgatacgataaagcccatcataaatatatattttgcctgagttacaaaaggggtcttgtgcgctgcgcacaaccctgatctgattcttcttgatcttgctgttcatgagagcaaggttacctctctcaagcttctgatcatgcttctccttgtgacgactattgcctccctgtcctgtgtagaccaaaatgtcagtgtcatcatcgtcattctcatagcctccagatgaaatgatgcagacagccagagtctcatctttgttcttagaagagatgtaatcaatgccacccatggctggtgcatgcaaaccaatgatgcacatttcaatcctaaagaagaagatatcgccgacttcaacaccaggcacatgccctatcatcttatgattgttgattctgaggttgttctgcatcatgagggtgccagctttcaggtcagcccgcctgcttgcatcctccttttcatccaactgcagtacacggcgccgaagggaatcaaacatcatcaggattccttccaccgattcctttgggttgtctgatgaggatgaacacaagttgaactcgttgtccaggctcctccttattgatctgcgcttgatgttggcatcattagatttctcagcttgctggggcctcttggctctctttggcagcgttggttttttctgcctgcaaaagggcttgtaatcttgatctgatgattcatcttcatgttgcggtgttggaaatgccgctgagattggtgtagcttttataggaactggtgactttggtaagggcagagaaaatgaagctggggcttcttgaggctgttgtgatgaatggtgtggcataaactaacaatggattggttgattgagtttccacatcatatcccaaaatagtaggaaactttggcgctaatgagcgcaatggctccaattccaagggtagtttgccattctctgcttcatcttcagagttctccatggtgaactcttggagaaattctggcagcagcaaaagcagaagtcaataaatagtctgagcatgatacttgtatgtatcagcagatgaatgatgtctcagaacttgatatgttaagaataagtacgcgagataaatataaagaaaacatcgttcagtgcaaatacaacgtagagcaaagaaattgaataaaaagaaaatagatctgcaaaatcagaaagctgcatcaacttctgaacaatcagaaacagaacaatctgcatattttggccattgatcggtcggctgagcactgatggctcacttaaagataaaaatgtgtcaatgcgaagtctctgtggcatatgaatcatggatgttctgtccggaatctatttggctcacataagcattaacatttcaaagttctacttgttccccccttacaaattaaccaaaacaaatgcaggcactagaatgacgaagatggaaacaaaatgcattgcaacttccaggcgctcatctggggaacccaaatacagtgcgtccatttgttcaacaaacccatagttaaactccaggcaaccatttgcagtacacacagacaataacactaacaatcacacgaacttgctacaatcaaaaagatgatcaggaactaggacttgcagaaaattagttagaattctaggaaaaaaaaacaatggagagaaagctgatcaagaagcatcagatgaggagtggtgtaccttgaggatgtcgccttgctggggagtgtgaaggggcacaggacagcagttccactatcggagacccctagaccaaaccgtcaaatgtatacatgtatgtggacacaggcaatcgtgtcagtgtggcactaagcactagctttacaccatctaccgtcggataatctcgagatgcgcgcctctggaattggctggaatatactgagtgagatacttaatggtgattacttaaacataaatttagaacagcggtgtacttcatctactgtaaaaaaaaaaggaacagcggtgtagttacagtcattcatggcaggacactggaagtgttcaatttctgataaactcatttcactttcattatctaaaaaagcaccaccttattttctccaaggacacagacacttcattaacacatttgctgctccagcctatgagcttgtctctgattcttttcaggtcaaaagtagtcaaagtacagtagcgtttttaatctccttgcaagagcaaaacttgcaatcttttcactgaacgtatagcaggaaaaacaccaaaactgacaaaatgtagcaaaaagcaagtgatgccccttaggtatagtttctagcatcaactatagtagattctacattctcgacgcaggaaagacctatgcgaattttcacctagggctgctaactcgttgcatggtgagcatcttcagttcgagaaagcgttttgcgcagttggacagacacgaggcttcgctgttgctgaagctgcttccaatgctcccagtgatgcatttgtcccagcaaacatcagtcagcttcgccacgaactcgtttgccattgccttcctcttctcctcctgaagagggaaagaaaaacaaaaatgtcagtaacatttctgtgagtaacaagcaccgcggttctgcaattgaataggggatcttgaaaatgaacacatggcttaattatccattgtccaaagaacagagtacacaaaataatttcttgtgcataaagggaagcaagcaacttctgccattctcattacatatcagaaacccaggacaaaaaggtcctagcagcatactagatgtaaaaaggcaattcccttttttccttaagtcgtttaatttgcagactgatgacctttctatgttagtatttcctttcacataagagtatatcggtatgtcaccgggaaaacatctttggttccttgcaacgtgtcagaatacccagcactatcattttctaacataacaaagctggtagcaaatcaaatttaataaaacacctcactgcgctatatgcattagcggctagcacacttgggatttgggactactgcaatttaagaaactactgcatgaaaataaataatttgttggatatcatgagagagaattgtaacttctattagtaatgagtgaacagccataatccttaaatacagagcaccacaaaagcaattgggaatgacagaatatcacctcagttgaagcgttagaaacttttcaagctatggctattttttaggaaagacttcatgaaccaccaggaccattctgatggtgcctaaaactagactctatccaaattagtttggttcacagtcagggttactgggtacttgggtgatagtcacaaccacaaggagccccaagaacataccctagttctccgcaaggaattgatcaaaagccacaaccacaagctggattaactccagttatgctatggatttgggaccctatcaacaacagaaccggctatgagatttgaggccaaacaatccttggatataagataccgcaattgctctgagcacttgatatactttaaaataaaattgctatgatactagatacctaagtaacacaactaggattcgaataccgatctccacctgaactgcaactcccaggacatctgttaaaccccaaaattagggcacaaccttactcttagctagaaaaaccagtcgtgatgcctaggaattcctgcagactgaagaatattgctaaaacaactgaacaaaataaataaaatgcatacataataagctaatggttggaaggaacagggcaaaaacttggcacaaatcagcaaaatttcgcccaaagctcagcctttttcacgaatcttcgagtagatctaaaaaggacaaaaaattaatcgcgagcgtagcaacaaacagatgggctgatgggatcaaaagaagggggctgctaattaatctccgtgttagggttccataggtcgggtactcgagtgtgcggctcatctctaaatctccctaatacattatgggtttattattacctctagcatggcctgcagccgcgggttgctgagcgctgaagcatccatggctcctctcctccttctcttccgctcttcttcttcttcttctctctcctctgcgattttctctctccttctctctctctagtggtggtagacttgtgcttgcctcgtcggcggcttgcagaggaggaagaaaggagagaagaggccgtgggctcttttcgttaatgggctatgggcttttttagaaatcagatcgataaaaatgggctatggacttttttttacattctggcccaataccgtttgcgaaagcggccctcaaccgcatccaattgcctttccccgtgtcactgtcaaccggagccaacctaagcaaagtgaagagattaaagatttttattagggaataataccagaaattaaagatctatagaagagtgagaaatcaagagtagagtagtggaactggaatgaacacttgtgcattatattctccaggacagatgtgacgattactgtcgcatatatatcttgcaagcaatgcaacttcttcttcaattcgtggatatcaatcatatctcgagtgcaaacggacacgcaagagagcatcagatatatatatatatatatatatatatatatatatatatatatatatatatatcgagaaatcataaatgagctgctagtattattatatatgcaacattcaaactcaagctagatatatctgtcgatcgatccatggatgaatcaatatgtttgtgttgcagtgcacgcatgcgcatgcatttcagtgatttctgtcgatcagaatcagatcagatcagcggtaaatgagtcacatcgctatcgcgcatgtatgatcgatcgatgttccttcacgtttagacccaagcaaggcaacgccattatattccatcaatcattacgcatgaacgttattttcatgcatgcccggtcaatatagttcctcaatttgacggcacataatctgggaaatttgtttcacttgctgtcctgcatggctacatcttactaggttcttaactaatcaccacttttctttaatcaatttcattctagccatgaatgatcagaattgcaacgttgtcgatgagggactacctacgaagtggatgactaattagaggtcctaatttttttcatatcttaatttatgccaatttgttttaatatgtttaaagatctttcactctctttttttcttttttgaaaaaaaagtactcttactttttttattaatgactagaatgagtttgtttcttcagctttggtaagtagtactactaattatggccaccttaaagaggcgataacgatacgaacatatgtttcaggcattacaaattccatttttccacataacaaaaaaaaataaatcactacatcacaccacaattctttttctaaaatctatttcttttaaaaaaaaattcttccgacttagttagagtaccaccatcaatttattcttttgtttcttggcatttttctaaatatcaatttatgattcgtatcggggactcagattattaggtacggccccacggaattgtaaaacaaaacacactactcctctgtttcatattactcatcattctagcacttttttttaaaagacaaaacatgaaggtatggtaaattactgaactatcctattaataacagcaatatttgtacttcatattggagttaaatgggtattttatacaagcacaatagttgagggggtacaatgaacttaataaaatgtctaaatataacagtgttgtaccttttttttccttctttctgtatgcaagaacatgcgctgttacctagtactatgtagaatgaacatgacaatcttcactgccacactgctcaccaaatcctaggagagagctacttgtaattttagtcttgttgaaatgatcaattgattagaggctatgtgcattatctcatactttggtagtactaatacaaactttgtttttgcgaggaagtactaatacaaactttgacggaggcgcaactgcctcatcccttgtgatagcaaggaaccatgaagaaccgatcctcttttgtattggtgtgctctgtgtatgatttcgtatgtgatcgatagctgaaatcgctccctaccgtttccattgataactctagtcgttaacgttattgccaaaaaccgatgaaagtcagataaatttggttagaaagtttcatttttttaatctttggccaattatggttaaatacagccagctcaataggaaccatgacatatatcgtatttgaatccaggctctgctctgttgagatatttttgttttcttttggacaccaatcatgtactctctacatccccattttaagtgcagccatagttttccgcgtccaactttgacgattcgtcttatttgaaaatttttaaaagaattttaaaaatataagtcacgagtaaaatactatttatattttatcatctcataataaccaaaacactaattataaattttttttaaataaaacagatgatcaaagttaggcgcggtaatggatggttgcacttaaatgaaaaagagagggagtagattagatagagtcaggcagtgtgggccacggagatgtctgagagccatagacagatgatccatttcattcgataattaaatacagtactgtagctagggataatcaatccctcgtgtctgtcggtgggccccgcgcacccaaccgccgcgccgaaccccgccgcagcaagcaactgctacccgtgccgccgcccgtctccggcgtccgatcaccatcaggcggccgcgcgacctcctctgcttgcgttgcgtgcctccccacgaggtcgaggtacacttcccttcaaagccactgtctctctctcctcctctcctctacttaacaccaaagcctcgcgctctgtccgtcctgctcctaatcctcgcggcagcttgcttggcgctcgcctccctcggccgcacttctttcttcctgattcctgacgtcttggatggtgcgctttattatggtgagaaattttgacgaaaatcgtttactgctattcctgcttgtcttctttggttatgcggacgacctgttcgacgaaatgactgatacaagggaattgattggtctttgtgttgtttagcctcttccgctctcctaatccttaacaagttgactgtttcattttgttgtctggtgtcaacgcttttatgattttctaaaaattgtagttgagcaaatgatgcaagtgttgttatattgtagacatggttttggacatatcactgtcttctctatgtttggcctttcgtttcttctaatggtatcgctgttttgatgccatctagtaatagcatctgcttgtccgatgcctatctttcttagttgacttctcatgcatactgtatcatcttctggccttatttgttcaacagacacacgacctgcactagtgtttacagctccaagtatgggttccagagaacccttcctgagtgccatcttcttcttcttcttcttgcttttgttctgcctcggctgcaagtgtatagcttcagagttacacttacacacgacccagactgcggtcctcaaggttgatgcctcactgcaacatgctcgacagatccccgacacgctatttggaatattttttgaggtaaaccgtaagatacatatagtaattttgttttgcacaattgcattatatcactttgtcctttcctctggcactttgttagcatgtctagaataagtcaggtagactacatgtttcactatgtcctgatggcaatttcttggctaatattgtaggaaatcaaccatgcaggagctggtggaatatgggctgaacttgttagtaacagaggtacttcaattattctttaatgcaagatatgcacttattttgttccatcgtccagataaaacataatttgcttctggatgaacatgaataacttattctgcaatccgatggaacacaaacacatggctttaaaaaaatccttttgttatttttttttgctgggccggcaaaaaccggcagagttgtatattaagaagaaaagaaagttttacaagtacaccctaagccaggggtggcttaggctacagtgaatcgtctcagcgatttagcctacagacaaacttaggctacagtgaatcgtctcagcgatttagccagcatcgatcgcgctcaacaggccggcggccttccatgtttcccactcatcagcgatggtagcacagaggtgtaccgccgatgtggtttttccatcaaacgcgtgcatttcgttccttccaaactaaccacgttaccaggataaccccggcgtcgaaggtcttccgatccgtcttatgaaccgatttgtgcgcctcgcaccaccagcacagtaggaaatccttttgttattgtctttactcgaaaattctccctactatcttattaactaaattatgtttttcccatgaacttaaaaaaagagtttaattttttttagcataactgtaattctgtaaacttggaacacaaaactttgattaggagcataaactggatgggatgcaaaataatatgccctttcatggaagctatattgacatgtagggcttagtataaccagcttatgagttttatgcacaggttttgaagctggaggccctcataccccatcaaacattgatccatggtccataattggagatgactcttccatatttgtggcgactgatcgaacgtcatgtttcagtcggaatactgttgctctaaggatggaggttctctgtgacaattgcccagctggtggtgttggcatttataacccaggattctggggcatggtatgggtttatgtattgttgttctttagtttgttttcctcatagtactgctaccattttgctgtattttctcatgaaattacctagtaaatcatggacctccacacgttctgtttcaaattttcatgtagcgatatttctttcgtgcacttgtgttgggcaaaatatggtaaacatttgctttcctaacttttgcaatgcttcctttccaatgctttgatcgcccttaattgtcatatcaacctgcagaacatagaagatggaaagacctacaatttagtgatgtatgttaaatcaccagaaactgtggagttgacagtttccttgacaagttctgatgggtcgcaaaatctggcttcaagtaccataccgtcagtgcctttgctctcaatactgggacaggagaacaaggatgtctgcccattcccattagttgaaagaattatattgttgcagggtttctggtgcgtcgaattggacaaaactggagcagaagttggttgctaaaggaacaaatagaacctcaaggcttcaaataacaactaccaagaagggagttgtatggtttgatcaagtctctctcatgtctgcagacacttacaaggtacattatattttgttatcaaacttcgttactggaaaaggaaaacgatatcatggactttttcatgctatctctatatagtgtatgataccacttaaatcttcatgggctttttctactgcttccaacatttcttttacacattcagggacatggttttcgcacagaactaatatctatgatgttggacttaaaaccacgattcttgagattccctggtatgagctatattttccaattgaaaatcaagttcttgatatctgcacatatatgtcagacgtgtctgggataattgacttgatttccattcaaacaattgtaggaggttgcttcgtggagggtgaatggttaagaaacgcattcaggtggagggaatctattggtccatgggaagagaggcctggacactttggggatgtttggcattactggactgatgatggccttggatattatgagtttctccaggtaccagtttagttgacattatttccgcccttcattttcttatcactccctaatcatatattgcctttgaattctatttttttttctaatgaaaaatttgaactctacatcaaagctttctgaggacctgggcgctgccccaatctgggtgtttaacaatggtaataattgccatattttttatatctttatcgccacagctgacctccttaattgctactaaactcttttatatatcaggaatcagccataatgatgaagttgatactgctgcaattgctccttttgtaaaagtatgttctgaactccctggtttattttctgttaagtcagatgcaccttgattcgctaaattgtttccactttaaaatttacctgcaacatcctagctatgactgggcattactatggatatggaatgtgagaaaattgatactatcttcactaccatcgtagtagtgttccatcttttatctttgtatatctaaatattaaggatcttcgttgtgcagatcctaagaatgcaactgcatatgatgtgtctcattgactgatgctaaaactcttgccttgttttctcatgattgaaatagagctgattttctgtgtaaaataaaggatggtttgggcttgttcttttacactattagttcagagagttctttaaaaaattttcacaaagttcacaagcagtgatgatgtttaacctgaatttgcattctgatctacttttcctgaattgagacggtaacgtacctatccaagaaaataccaaatatcttttccttaattgagactatggtagttatcataacaccacttttgttttgggaacgtctcctgtctctctacaggacgtattggacagtctagaatttgcaagggggagtgcagattcgacatggggttctgttagagctgcaatggggcaccctgaaccattccctgtcaaatacgttgcaattggaaatgaagattgtgggaaaaaattttaccgcggtatattcctcatccaatttcatattttatccacttgaccatataactgcataagttgaagaggcttgtctggataattaagaaggtgtatgatcgaggaaaaggatatgcacatgaaccatgctaattatgtaaaatatattttatggatttagtcactcaactcactctctatccactttcaatactgggctttgattttgtgattggacgtgtatttcaaataatattagctcaataaaataaatctctacatgaaccagagggaaatatagtccacaacttctttatgatgctgtttctgtttcctgagaagtcgttcattaatttagtcacataaaatctccatagaaaaaccttacaaggtgacatttgtttcttacactatttcaattagtatataatattaatttttttatgtcatatgttctttttcctcttttatactcacagtaatatacgttgttattttttatcgttgcaaataaagtaggattagtaatacataaaaacaagtcctggaagcaaaaactactaaaatgtggttattttcattattttttaaaaaaattgggatgcaatttttttatgtttgatcataatccccaatggtactgcacaagttttacttgaactgtgtggagagcaactgttgagttctccttttaggtatatgcatgatgttctcttatccgttatacaggtaattacctcaagttttataatgctataagggaggcctatccggacattcaaatgatttcaaattgtgatgcttcatcaagaccacttgaccatcctgctgatttatatgacttccatgtaaactactcatcctctggagttctgttatgcagtacttctcattctgtcaccaatgtcaaggtttttcccatttattaaattctaataattcctttttctctaggtctatactgattctaagactttgttttcgatgaagagtgcatttgatagatcatctcgtaatgggcccaaggtatgttgtatacctggactttcattgctgtgtgaaccttttcatttatggagatgcttgtaaaacagcactgtgaatctcccatctttcatttatattttacattaataatccaggacttctcttggtatattcgtaggatgaccttggccatctatgttttaacaacaattcagtaacatccacagttcatctatgtcacgtgtgatgattttttccatgttttggataattttggaatctcattgcttctcttgcttattcacttctatctttacagatgtgctgcctatttatctcttctcatccctattggccattaaatatatttcttcatatatgttttggttgcaggcttttgtcagtgaatatgctgtttggagaagtgatgcaggtagaggaagtctacttgcttcattggcagaagctgctttccttactggactggagaagaataggttatctttccttgaaacaatcttttctttccgggtcgtgtgacagatcacatttgagctttcctgcgtagggctttattaagatctactaacaaatgcaatgagatatttactgtaacttcttgttggttctttgcagtgatgttgttcagatggcaagttatgcaccactgttcgtgaacaacaatgatcaaacgttagttttgatggctccatggtttctttatttgtgtttttgtttatttaacaagtactgtaataatgcttcaatcaaacaatcaggtggaacccagacgccattgtatttaactcctggcaacaatacggaactcctagttactggatgcagactcttttccgtgaatctagcggtgctatgtttcatccaattacaatcacttccagctactctggttctctggcagcatctgcaattacttggcaggattctgaaaatagcttcttaagagtaaaggcaagaaattttgttataaacctactctacatctgtaggagaattgcgtacctcatggattgatcttgaaatctcctgtgcagattataaactttgggtctgatccagtgagcctcacgatctctgcaactgggcttcaggcccgtgttaacgcactgggatcaactgccactgttatcacatccagcaatgtgatggatgagaactcttttagtaacccgaataaggtaagcaaacatttctgatttcttactggatgtaatgcacatatcaatgtctagtagagtttgtggttttggtcatctgaagccaaagctttgctcatgataaccaatgcaggttgttcctgtcaaaagccagctttccaatgcagcagagcagatgcaagtcacgcttgctcctcactctttctcctcattcgatcttgcgcttgcccagtccaaactcgtggcagagatgtgaagcaggaacacaaggttagcgacagaaacacaagaaatacacgagatgtgatatgcgaataccagaatgcagtccatatatgtgcatgtatcttgaagcactactgtatagtgtaatacacaggaaatgatgaataaaattcactccaggcttactttcttcttttcgtttcgtttcttttcttttttttttcttttttttgctttctccatatttgtatcggatgagactagatggcgcattgccaccgtgttgctttgttccaaggataacaaatatgggctctttagcctgggaaagagagaataatttggttcaaggataacaaatttgtagagaatatctgaatttgatttaaggatttgtgaactgaagttggcatttaaacttgagaaaaattaaggctcagattatgggctaagaatttgaatttaggattgagcagatccaaatggagtccaatccctattaggatggatgttgattatttgtggatatgtttccctgtaaatctggaatgttccccattaggtatattgataaaatgatgatgagaagaaaaggttggaagagggaaacttgtgtcgtgtgcatagatgagaactgtgtcagtaaccccggataaggtaagcaactgttttctacttttatctctggatgtaatgcacaagtcaatgtgtggtagaataggtggttttggccatctcaagccatagcttcgatgcaggagcagatgcaagtgtcacttggtcctcattcgatcttggtctgggccggtccaaagtggtggcagagatgtgcagctgcaacgcgcacggggttagcaatagaaatgcttgtgcttattcgtcttcctcgatatatttctgtcgaatgaatcaagatgagcagataaagaagaggaaaatggaagaaaatatgcatgggctggctgtacatttttggctggaacccatgtgaacttgtgaagtgaactagtaacttgttggcaattttagcaagttgactgactctgtctaactaaagcattttccagtagtagatcgtgcaacctcgaataatcattttggatcgtttcgtgtaactcaagtagtgtagttcatgttacactaactgaagcctccatctggcagaggaatttctgtgaaatgaatcaagatgagcagataaagaagaggaaaaaaggaagaaaacatgggctatggctgtacatttttactggaacccatgtgaatgaactactacttgttggcaattttagcgacttactgtatctaactagagcaatttccagcagtagatatcgagcaacctcgaataatcaggttggatcgtgtcgtctaatacactactacaccagctagcagcctagcaagtagtgtagttcatatcaatatatcatactaactcaagcctccctctagcaagtagcaacacaatccaatccattgtcatcgcagtcgcagaatgatgagagtgtggccgccggcgacgacgagcatgctgtccaggcaagccattgtcgtcgtcgtcgtcttcctcgttctgttcttcgtcggcggcggcagcagcagatgcgaagccgagacgttggagacggcgtctctccatgtggattactctgtcgctcgaagaatgccggacactttgttcggcctcttcttcgaggtgagactagctacgtctcttttctttcttttccatttcttctcctgtggatgcttgcttttcttttctttatcaaaatctgcattattattatttgtgcaggagattaaccacgctggaagtggtggcctttgggctgaactcgtcagtaacagaggtaacaccacattatagtactactccctcctttcctaaatatttgacgccgttaatttttttaaatatgtttgactgttcgtcttattcaaaaacttttgtaaaatgtataaaactagacgtatacataaaagtatatttaacaataaatcaaatgataggaaaagaattaacaattacttaaattttttgaataagacgaacggtcaaacatttttaaaaaagtcaacggcgtcaaacattttgggatggaggtagtattttatttggcttccgagctgaaattgaccattaaattaaagaagagagcagtggagtggtatcagccgttggatgtccattcaacggctgattggtcttcaacctccagttcattgacacgatttgtctctctttttatcttctctctatttttttttctctttgagaactcttctctggtgaagttgaacattaaatcaagagttaatttcactttggactatatttttttaaaaaaattattttggatcaccctttgtttccaattttttcactttggactaagtaactttaccttttgttgtataatagatactccaatccacatcttcagcacttcaatgactctgagcaaatcgttaacgatatgctggcgaattttcatacctatacgcatgccatatctttgccaaaggaaacaatagacatggctagcaaatagagttagggtggttcattatgcaacaaaggtaaaagtacctattcaaagtaaagagattgggtatatggtgttgcaaattgaaattttggcgataaaacatggcactaagtttaattcactcttaaattaaagaagaagagagcagtggagtgctgtcagccgttggatggccatccaacggttgatggatcgtcttcaacctccagctcatggctactctctctctctctctctctcctcttgaacgattccctcctgcctcctccctccccgcacctgcacctgcaccatctccggcgtctctcgcggccggatccgccgcctcctcacccaccgcccaaggcctcccctccctgtatacgaagccccgatgaactgctcctccctccacaacccctctataccccgccagatccactccacggccccaccccaacccaatatcctaatccattcgccctctctcgccggggaagaaagccaaaaggaggaggaggaggctcatcggcgcagggatgctcgggattcaccggccagctcgacctcgttttggtgggggtggtgtgtgtgagagtgagtaacgaaggcttgaggttgaagaagcaacatggatggtttggatttgtgatctactgccaagaatatttggggagaaatcaatcacctcatgtatggcaaatgcaaggatttttgaggagaaatcaaccggctgatgtatagcaatgttgaataagaaaacattttcccccctcaataaataaataaataataatatttggagtttaactttaactgattttttgtctaatttcttgctttaggttttgaagctggagccaacacatcaaacattgacccatggtccatcattggagatgaatcctctgttcacgtgacaactgatcgctcatcctgtttcagtcaaaatcctgttgctgtaaggatagaggttgtctgtgacgattgtccagccggtggtgttggaatttacaatccaggattttggggcatggtatgagttctatccatttttataagtgcattcctatatgaataatatgcaaaatagagcttgtaattgaaagtagtatcctttttttttacgacagtttacaataaacagtgctgccacagaaagaaactatagcaaagttatttattctgttcgaaatggtgaagaaaacaaataattaagctaacctattttttgtttgatttcaatttgcatttatcttttccttgcataatgctggttttttatcagattgttgtgcattgctcttggaaaagtgtaatctatagcttttcttcgaaccgttttcattttaccttctcatattttaatgggattttaccttctggttttgtgacgaatatgatcatttcaattttcagaatgtagaagaaggaaaggcatataatctggtcatgcatatcagatcattagaatcggtggagttgacagcttcactcacatgctcaaatggatcgcaaaatcttgcatcaaattctgttcggtatatattttttccgtaacactgagataaaaaaggtttttcaatctctctcgctcgttcgctcgctaaccgaaaggattgtacatcaaatttctgcagagaaactaatttgtcaacttggacaaagatagagctacagttactagctcaagggacatgcagaacttcaagacttgaactaacaactaggaaaaggggagtaatatggcttgatcaggtgtcacttatgccttcagaaacatacaaggtgcactgtcttttacttttttattgctactgtcatcatagcttgatctggaatccggtatcatcttgtgaagaatggagaatagaattcatgcactgaccccaaagattttagccactacaccatgccaggttcaatggacaccctgttcaaatcatgtctgctatttgatattattcaaacttatttaaaaaggtcatcataaaaattatcaatttattcacattgctatctgacaagaaaaaaaagtaaattaacttatctgtaatcagtaatcccgtagagatggcagatcgagttattgttccttaatctacatttgcttactatgagtccataggagttgttgatcgacatttttcttctacatatgcagggccatggttttcgcaaggaactcatgtacatgcttttggacttaaaaccacggtttctacggtttcctggtatttcgaatgttttccaactggcaatcaatttcggttgccctgtaatttaatcgctcgcattacatttggcagggggttgctttgtcgaaggcaattggttaaaaaatgcattcaggtggaaggaaactattggtccatgggaagagagacctggacactatggagatgtctggcactactggacggatgatggccttgggtattatgagttactcgaggtatgggttgattaatgtgaaatgggttttttcttttggtctcggcatatctcaccatttgtttacttcaaaatgttcatgaaagcttgctgaagacttgggtgctaaccctgtatgggtgctcaacattggtaaatatcgtgtctatttgtcttgttcaatgtatttttaatctttgcacaaaccaacgaactgctcagggttttttatcttgtaattagggatgagtcaccatgatgcagttaatggaactatgctcgcaccttttataaaggtatgttttcgatgccctacattttttgaagtatggatgagatgaagatggacttctcatgatgtaacagaaaacagttgtaacatgtgaatattaacataaggccttgcatttattgtgatcccatgtttcttatttcgagatgctttgattttcttgctacaggatgcaactgacagtcttgagtttgcaaaggggagtgacaaatcaacatggggctctgttagagccacgatggggcaccctgaaccattcccactgaagtatgttgcactagggaatgaagattgtgctccattcaagctgatataccgaggtaaattttgcataataaacaaatagtattgtccttcgtgttaatgctgcgatgattggctaaattcatcattctgttttttatcgatctgcaagggtaatagcactattttatttaacttcaccctttttagtactatctgattgcataatggagatattttggagaaataatagatgaaaaaattggctgcatgccttgtggcagaggccagggatgtaaaatatttccattataaaaaaaataatagatgaaaagaaaaacaagaagttaatttaccagtctgctgttatgtttcgaaacagactttaccagtttctagaaggttcattagttttacatttgattgaggccaaattggctacgacgtataatgctgtttcagtacatttaaatgggctactactatcataaatatcctaattttcccttgatatcatataaccatgtaattctgttgaacagaaaattatcccaagttctacaacgccataaaagaggcttatcctgacatccaaataatttcaaactgtgatggctcgtctgggccacttgatcatcctgccgatctctatgactaccatgtaaacaactcactgagactaatttatttctatcattctccctatttttaaattctgtcttgctggtttttttcagacttggttatgtgatcattttctccatagatttctgagaatgttacatttattctgtagatatatgaaaatgcatccactgtgtttttcaagaagaatgaatttgataggacatcacgtaatggtccaaaggtaatgaatttgatataaagtggcttcttttgggaaattaagttcttttttttattttttttagagaagggtattttttacccggcctctacatccaaccggatatatgcggccattgaaatagggaacttagccccacaaacaacccaatctgaaattcgctccataggagatttgaactcaggaccttgggtactaggagattcgctccataggaaattaagttcttagattagatcagtcttacaaaggcagcttctctcatgcgccattatcctcgacattttcttgaatgaaatatgcttctagttatttcgaaaaaaaagtgtttctaggtattagtttcttccatcttcttccatgactgagactgaatctataagatcagaatatatgataacttgaataatatcccaaactagagcaatctactagtacttcataacttgaactccagatcgcttctagagcaatctgctgtggtattgattgacaacaagcatagttagtaattatgacaacaagcatgttcttcttcttctcttccttttcccatgagaagaagcctaactatcgaatagcaaaacgtaagacgctgttcttccttttcccatgtttgttggatggtttggaaggaaagaaatgcgcgtgtgtttcagaaccagcggcgctcagccggtttcctgtttggttcaatcaaagaggaagtggcgatttggaaggaagctggggttttcagaaatataggagagtagtcccttagtgtaatcttttgcttttgggaggttgctccggtgacaacttccattacttcgacagcttcttgttgaagttataactttgtatatttgtatatattcttcaatcttaagtaaatttggttggcctttcttggccggcccggcaatttattcatctcattaccctttgatgttggatagacagaatataagtgagcaggaaccactgactatgcaattgtttcactgcaggtatttgtaagtgagtatgctgttaatggtgaggatgctggcaatggaagccttcttgcatcattggcagaagctgctttcctaattggtttagagaaaaataggtgatccctctggggatactctcttaattctttatcttgggttcagagtaaatataaaatcatgcgcagagttgtctacttgtatccagaccatgcatgaatataagagatcgttcaatgggattcctggataaattgttgatttttgtttgacaactactacctcatctttgtacttctccacaaggaaaatattttgagtaaatgtataatttgtaaaaatttacattgagcaacagtaattccttattgcaagttattgaattggctctcatcatgcatgcttctttgcagtgatgtcgttcagatggcatgttatgcaccactcttcgtgaatgacaacgatcgcgtgttagtatacatggtcttatactttctttgttcaaggattctagcatctgtttcctctctgactattgctaatgtataaatgtgataaccagctggaacccagatgcgattgtcttcaactcctggcaacagtatggaactcctagttattggatgcagacatatttccgtgaatcaagcggtgctatgattcatccaattatgatcagttccagctactctgatttattggctgcctctgcaatcacctggcaagacgctgagaatacctttctgagagtgaaggtaaaccatccattccagtttcttctaaacttatatgcatttggttcaattcattagacatgcgccttattgtttggaatgatttagttacaacgatacaaaattgattcagccaatgcatacttgcataacatgcatctgtctttatatgtattactgctggagtaatatgtttggatcttagaacatcctgatcttcaaatgatcttccacagatagtaaacttcgggccaaatgctgtgaacctcacaatatcttcaagtggacttcaagctggtgtagatacggcaaaatcaactgtgactgttctcacatccagcaacttgctggatgaaaattcatttagtgaaccaaacaaggtatgaccaattttgctttgatcagtaattattggtttcagactttcattactatgcacagaatttagaagagggtaacttctccattacaaaaatctggtctgttacaattagacatgcaggtggtatgcctcgcatttgtcaagtagtgcgtgctacataaacacctttgtagatatatccctactctgccttttattttgtcatgtctggattatttccttgtctttctaaagaacacagagaatctattgtaacacacgatatctcagggtacgcaagttggtctaacatacaagtttcttgtgaacacgcattgcaggtcgtgccagttgccagcgagttgccgaatgcagcagaacagatgcaagtcttacattttccttactcaatttgttcgtttgatcttgctctggtttagccgtttaattagcacaagtttatcaggctaacatgttgggacgctgtttctgtccttaatgacatcccaggatttcatagtgatcaaaagctaattattccactgtatcagagcccattaggccaaggatggttttaattaaagcttagtttgaacaactcgctttatttataatatatccctttattgcttctaagaaatcatcgagttgtttgtttggatattagtaatgatatgggaattattaagttgaccagataaaaatgtagaatgcatcaaaaaggaacttggtatcaatgagatcacgtctcctttttgtttgatagccatggatatgatgtttctataatatggggatggtgatgagtctctcttttgttttcttgcggtaatgcagctctgttaatttctctattacggtttggcaagatggccggtgtctccggatgtgattttttttgagtaaatttcactttggacctgttttattgaccaaagtttcaccatgaactatgtctaactcgaccttttcagttaacaccaggtatgattaccttcttttgcaatttggaccgggttttaagacttcgggccaccacgctggcttgatctgagcctagtgaactcagttcagggaagagaaattatcgacggaaactagcgcatgggagaggaagatagtgccgtggaggcgcggaggcggattttctcaacgcctcggtctccaccctcaccactggtggctcctgcgcctgcggagcggcacgatgcggcggcggcgtggcacgacgcggcggccgtgtgcacgtctctggctctggcgaggcatggcgcaacggccgcgcgtgctcttcttcggctccggcgcggcagggcggcggcatgcatgctcttctcctgctcgaccgcggtgccggcaacgggggtgcacgcactgctccttcagctcacggcagaatggaggccaaaagcctcaccaagttagagtaggatttattagctctgtgtactgtagataagtaccactaaagagaaggcactgggaagggaaattatcagaaatgccatgttgtgccgataattcattgtacctcaccatcaggtacatgtacatatggaacttggaacctctctgcttgtttttagtggcaaaatggacagctccatcttacttgcacactcattcagaaacaaacattgattcattccgccagcactacactggagctgaagagcgcgccgccatgccaattcggagccagaaaagagcacgccgccgccgcgccatgccgctccggagacacggccgtgagccaccggttgcgagggtggagatcgaggcattgagcaagtccacctccacgacactatcttcctcctttcccgtgcgctagtctccctcgataactctctgccctgaactgagttcaccagctcaagccaacgtgctggcccaaaagtattggtacccggtccaaactatataagaaggtaatcatacctggtgctaactgaaaaagtagagttagacttggttcatggtaaaactttggccaaaaaatcaggcccaaagtgaaatttactctttttttttttgataaaatgtaacttccattacccagctctcgggagaaagccaaacaggaataaacagggtgttatacaaagctcataaactaaccaagagcattcatctccggtaacggacacgctacagcgctaatatgttgttgcctcccatgcggcgcagtccacaccaaaacgaccagacctctaaccccacaaaagaaagagtttagacctaatagggacggtaacaacttgctaggtaatttggctctcaagaaatgatgtggtttttataggaaaactgtttcttctcctttgcaggttattttcttaattacacattggctctacattggctctgatcatgggttattctcgagaagcccaatttgtagggttttgtcacttcgacttgtctatatttaaagcaagtgtcaatgagttttatacctcggtatataggtgacgacctattatttgggttgtagccttgtagggtcttgatcttgcaagctgtttttttctcttcttttgagtgtgttggctgtgtgcactatcgtagtgcagaggctgggagtgttatcaaaacttttgagtgaaatcaataaagcttccattatcttaaaaagaaagaacccaacagactgacacatactaatcccagcaaaaacttttgagtgagatcaataaagcttccattatcttaaaaagaaagaacccaacagattgacacataataatcccagcagaaaggaaactacgatatactccctccatcccataaaaagaggattcctagcatcccaaggcaaatttagtgagaagtaaaatgactaaaatgaccctcatcaatagaaaaggtagtactggtgataggtaggtaaagattatttaagagataaaacttctcgttttatgtgttgaagataggtaggatggtagaagttggttttttgtgggataaaatttaaactctagaagttaagttttttttttgggatggagagagtatcaggcaaggtctccggttcctgcagcttgtccatcagctccttatgccacttgtctgggcaatctccttccatttgtagcagtttccatctttgcacccacgccagggctttgtagactacctgcaaaggtgatttagcaattttattttcaaaaacccactcatttctatttaaccaaatcccccaacagaaccaagcaacgaacacaattgtgaggtttgtttttagtttcttctttagcatcctcaagccatcctcaaaatcatttggtatttctgacagacccagagtttctctcaacacacaccatctaaatttggcaacagagaaattaacgggatatcgattctacagatccgatatctgatatcggaatcattgattggagatgatcgatcaggtcattgaatgccatgcaaaatgctgtacttatgtaattgacacgcaagggcatccagaaaaccatctcattcaacatcatcttacagagaaggtccaagatcaaatccacaaccacaatggcgtcatcctccaatgttaacaatggcgtcagtgttctcttcctcttcgctgttctcctaattgctgcgtctcagctcgccgccggcaccaactcgttcctgtacggtgcatgcaagaccatcgccggcggcagcgagctcctcagcgtcacgttctgcatcgacgcgctcagctccgacaaccggagcagcaacatcagcagctacaaggaattcgcggtgatcgccgtcgacctcctcacggccaacgcgacgagcaccaagtctgagatagacggcaagctccggaacggcagcggcgacgccgctgcgacgcggtgcctctagtcatgccagtcggtgtacggcggcatactgtaatctcaggccgccgtcggcgcgacggtgaaggcaggcatgttccaggaggcgatctcatcgctggagaaatcggcgagcgcggtgaaggaatgccaggacgggttcggcaagagcaatgtgacgtcgccgctctccgcggagaacgacgatgccttccagcttgccgagctcatcgttttgctcatccgtgacgaacagatcaacaatgtttcgccttaattgctttttttataagggcagtcccaacccataacactggatatggtttccatagaaactagtactagacactactcttccaatgcaaacaccactattccatacttcaatttaatgctactttatctcacatgatgtcttagatgttgtgtagaaaccatgtctcgtgtaagacatggtttccttctctttcctcatttattcacttgccacatcattttttttcctaggtgacaacttatttaatgctatggacaccatcctagtcattgggttgggaatgccctaatgcatgttttccccgggttctcaataatatagggggctgtttacttcccaaaacaaaaacttttcacccaccacatcaaatgtttggacatgtgtatggagtattaaatgtggaaaagaaaaactaattacacagtttgtgtgcaaattacgagacgaatattttaagcctaattgcgccatgatttgacaatgtggtgctacagtaaatatttgctaatgtcggcttaattaggcttaataaattcgtctcgcagtttcctggcggaatctgtaatttgttttgtcaatacttcaaatgtgtgtccgtatatgtgatatgacaaccaaacctaaaaatttttcccaactaaacaaggcctaagtgatgataaaggtaatgatactacctgcgtttctttttcagatagagcattttatggcactgattctttccagtaataaacagcagaaaagaaatgcacacaaattatttttccaaatgtaacatatgcatccaaatatcaagatatgcatgtaaacgatcttgattaaaagcttcatccattttaattttaattgtttgatattaggtcacgttttttttttatcaaaagcttccatagtcaatgttcaatgaatttggtggaagtattaattcaatggtggaaatttcgtattcatttatttgatgtacaatacttattttgcccttgtttttagaccctatttttagggttttgttttccctccttttttaaaaaaacgaaaccaagttttgctctattttagatgaacaagttaacgatgttaaattttggcaaaaagacattcataccttattattgcccatattttatacatgcaacttgcaattttgaaaaactacaatttcaacaaaaaaaatgtttcaaaacttacattcttttgccacatttgataattttgggcacaattttacgctactaaaaatttgggcacaattttttttacacagttatgaccacctttacgcaccgagccctcaccgcctccctgtaagttcaagtgccttaatttggtttcggtgattaatgacaaatctaattatatgagactaacgtttttatgagtctttctttgactagtattatttggatataaaagtaaaaatgatgggaggtatgtattaaacttcacatattctaacttggtctctcttgtggatccaaaatatagtgtgagctccctcattgatcttgattgattatgtgcatatgcattccttcatatccatatgtatgcacatcttgagggggagcttattctatattttgttcattataagatctctaccttgatttgaaattatctttcatctcatctctttgtattgtttatatcggattattatctatcacagaagagagaaaagattgaaagatcttggattaaacaatttgtgtaattgttactttggtgatagatgataaaccgatgtttatgggattaacctctcttttacataagttttcaacaaggttatttcccgataatgagatgtggtagatatgcattctttggtgatggaccttaatcatgacaagaatgaaattcatggagataaagcgatatgtatcacttcttatctcctactttttgataggttcatatatatgatttccatgttattgttatataagtgtgagactaatgtttacttgagtcttatcttatttagtctcctttacattgagaacatggagatcatgaagatatgtgtttttttgtttatcttcatcattactacatatgccttctctatgtgtataggataaacccccattggttcttctttacttatgcatacacttgtctctcttgtatatttctttgtatgcatatacttagggggagcaaatcctatacatttattgtgcatgttttagatccatgttgttcacctattatttatatcggatctttgcacttgagcttgcatacgagtatatgacacttgtgatgttaatgaatactcaacaaacatatccatatctttcatatgcaaccggttggtcatcaagtgaaggatgacaaccgatttgttaagactaatgttctcctttgagatgtgaaaaggaataggtcccactatgatgaggctaatggatgacaccatgggttaatggtcaccaagccaaggacatcgccatgttggcaagaatgaaatcaagcttgtgatgagaagaaagtcttgacaaatgatggtaaataccttggtataaacatggttgaatcaaatggtcacaagtgttgatctcgactcaagcttgaccccaagatggatggcgcaaggcaaaggtataatgtagctaagaatgttttcttagtcttttcccggtcttagtgtttggtgtagaccggatttgctagataggcgccgtactatcaagaggggtctatgaagcgagcttgtggatgatcttgtgccatattagttcatatgcatgtaggtgtatttggtgggcttgtctagccaagtgtggtgagttttttcaagtcctaaacaaagagagatgtgggcaaatcctataggtttgggcagcctcatgtggttatgtccggtggagtatcctttagagtgtgagccctttctccctgagaaaagttgtgtttcttggatggattgttcatgggttggatagccctttgaataagctttccataaagtccaagaacgccaaattccgagacccgagtcaagagatatcgtcgttttactaacgttcggttgagctgaaaagtgacatgcgatatgaccgtgggccttaggccggtctgaccgggcctgttagcaggtctgaccgacgtggtaaggccggtctgaccagccccactggtctgttgcactggtctggtttttggtggcgatacagagccgctagagctgcaaccggtcagaccgagccgacggcggtctgaccgagccgtggacggtctgaccggccactacactgcggtcagaccggccaggttgagtgggctcaatgattgccctgtaacggctagttttctagccattacaaagtagtccggtctgaccggcctcacaacggcggtctgaccgacagagcacaaagttggggatttcggttccaacggttagttttggtggttaggggtatatatacccactccccagcagcaagggtgtcacaccctaaaaatcctaaatatataaattgttgtttaattggaattattagaatttattttaaaagcctagaagagaagatctagttttaattaataaattccaatataaaatggggccagataaaatttcattaaatactttgcttaattctataattcctagatttttctgggatttatttgagctaaggaagtatttttaataaatggaattgcatttcatgaataatttaaattgaaaaaggttttttaaaagtcttcttttggctttgggccgaaagtcggcccaaaaccctctctctctcctcctcggcccaagccggcccagtcaagccgagccgcccacgtgcgctcgctgccgctgacaagtggggcccacctatcaggcctgtcgtctacctccggccggccgccgcccgaaccctagcgccgcgccgccgtcgtctctttccaaattcggccgcccctttccttttccggtgaaatcaatagaggggaaatgatcttcgggatctcctctaccttttctcttttggaatcgtcggctaaaatcgtttggaaatctgtggattcgatctcgaatcggattcgtctctctccccgaaccctagaccttccttcgccgtcgccggtcgccgtgggccttcgccgccgcctccttgcccctataaaaggacccccaagcccgccgctacctgccgccaccctcgccttcgtctctcgtcgccggtagaaccctagcaccgtgtagcctcgcgccgccgtcgtcgccgccgctccagccgtgcgccgccgtcgctccagtcgtcgccgtcgctcgggaaggccgccgtcgtggtcgccgtcgcgttgccgtcctcgtccgcccctccatcgttgctgtagaccgtcggagcaccgccgtcgtcgtcaagccgaaggttgccgccgcttcttcctcgacgccgtcgccgtccgttgatcttccgccgccgttttggtcaccggtgagttcgccgcgtcattctctacgtgctggtgccctccgttcgcgtcgtcgcgccgtcgttcgccggcgagcttgtgcgcccgagccgctgccggtggtgacgtcaccgctgacgtcatcgttgccgtccgtcgtggtccggccgtggaccggttgatctcggccgttcgttttggttaggatcgatctcggccgttcgtttccgtgagccgtcgccgtgcacccggtccaccgcaaaccctagccgctgacgcaataaacccctttttccttttcaaaaataattcattattgcgtcataattcaattaaaacccatataagtgttttaatccgatttaatctctaaaaattcataactaattcatcttagctcggatttagttggttcaagtctctaaatttttttaaaattgagatctacatgttaaaaatatccacatgtactgttcatgcttgtttatgtgctgttttggtgtttttgctcttttctgtttagattctgacgtttccggagagttcgttttcgctggagaagaatttgaagagttccaagggcagcaaggcaagtcacacagatcccaaacaaccctttgaacatgtttatcccgtttaaagctattgtttctattcaactattgcatttattttcgaatgccattgggtggaattaacctattgtttgttatagtccttttgttcttgattactttattccttgataccttggattattataacttgactagttgagctttatatattggttcagctagatattagatatgattgcttagccatgcttagaaatattagcacacaattgggataactaatgtttcactattacttaatgatggatatttaatgatagctcatgatggttaatcatgattggttaattaattaaattgccaactaaaacttgataatggtgggttgtgagcacatggttttgagagtcgtgctcatgacaatttaggaccggttcacgagtttcggttgtgaaacattaaccgtgccaaccacaagccagcgtgggcaacggctttaccttttgtatagcatggttcattgcggagcaccagactgagaagtggcggagataagcccatgggggtcgctggggagtctatgccttgtttataagggggtgattatgatccaggaaaggtgcgctgtggtggattgtgttgtgcgaggggtactgtcacagctcctttccgaggtaccgtggtggtattgaggcacatggtgacatgttgtggggctgtgtcttgtgggtacagtggtacacctctggccagagtaaaactattcgaatagccgtgcccgcggttatgggcgggtctaacaatgtctttcgtgattagtctcacacttctcaccataataaaagatgctataactggtaataatttgattagctcctggtttggaatggtatattcctggtttggagatagaactgtgcagccaggattggttgtacagaatggttgggcctatgcaacagggtatgttgtatagcgttggattaatattgtttaaattactacttaactattttattaaattctgaaatgtttattaaatgctgtttatgcaaatgaaaccctactatgccatcctttgttatcctgtgcacttgcatatttgctacgtggcttgctgagtatgtcatatactcaccttgcaatcattcatcagaggaggagttctacagtgatgctgatggtgtggatgattaggtgtagccctggtcaagctgcctgtggagtggagtcgtctgcgccgtttatcttatttttccgctgcttagatctttattgattgagaggaactatctacctctgtaatgacattttattcgcttattaattagagtaataattgtactctattatcaatttgttattgtgtgcctcggctgattcctggacgagggttcacacacatgtaagcgtttggaattttggatagaaattccgggcgtgacaaagggtaaggttttggcactccattgcattatcttgaacccttgcaagagctctcacacccttgtgcacttagtttatctagtgaggtgttagagagtgagttaagccaatccaagtgcattgcttcattgttttagctagtgtggcacttgatcatcctcggcaagcatcctagacttgttactcttggaggttgccgcctcctagacggcttgtataggtgttgcccggtgacctctccgagaagattgtggaggaggcccggcaccgtttgtgagtggtttggagttcaccaccttcggagtgaaggaagaactaccccgagtgatcgaggcttggatagtcctctccgtgggtcggctcccgccttgcccaccccttgacgaagggggcgtgcggtggcttcgtgattgagcggtggagttgggctcgcctcaacggggattaggaaaccggcgagtttccgaacctcggtgaaaaatttcttgtctcttgtctcatttatttgttgtatttacatttgtgctatttacattcatagagacatatttgagcctataacacataggtttgcaaaacttaacttagttgcttagttaaccttgtaccttaccttgcctagcaacttaggttagttttgtttaagtgccattaaattttaaaaccgcctattcacccccctctagtcggcctgcttgatcctacactccctgcgctgagtcgctattgcatcgcctactcatagcagccaccccgcgccgaatcgccgtcgcttgccctactcgccatcacctccccacaccaagccgccgccatctcatcgcactgacctgccgtcttcctgcgttgaactctagctaggccactgactcctccttatgcagagtcgtcaccaccgtcacccctccctacaaggagccgccgccgcctagccaggctatcaccgattcctcctccctgtgaggagctgccactgccattgcctggttgggccaccactgtcgcctcctccctacaaggagcagctgcctggctgggcctccttcctacacggaactgccgctgtcatcacctcctcttcgccgcctggctgagctgctattgccttaggtttgggggcatgaatttggatttgggataggaaaatgactcaagggtattgtttgcatatggcaaaatctccacgggtagaaaggttaactgttaagttgaaataatattatttcttgttttgttactttttagtttagcaatcctggacccactaacttctataaaaaatatttgaaaagaaataatgaaaaccaaaaaatagggaaaaacaatatcggaatcaaagtagcagcaagaataaaattgtcccaattcaatatgatggatgaaatgaaacaaaaagacgattatatcttgctgtttcaaattgctatgtgatgcaaaaattatgaaattgtttcaaaatcacactacaatatgtaagtaaaaaaaaattaaaaagccctattttaatctggttgtggtaacttccattcgaaattaatttactagctgaatttgattgcattaattacgaactctatacttatacaagtaaacattggtccttattgtaatacaatggttgacatattaatggagtctaaatagttcttttttttaagaaataaggttataggacccggctaattgttaaacatttatgtccccttaatgcacatctttataaaattgactaatgcgtgcatgcagtcaagctttacaaagtttcgcaacgatcacaaacaagtatcaacatttattatatgacattgaattattactagcctttagggcttaattgatcatcctcttatatttatggcctaaaatgtaaaggcgcaacagagttttgaaagtaatctacgcgtcttgagccaatccatcttcttgatgattttggtttagcttatagcaattatcggtgcaaataccatgtgtatatggaataacatgaccaacagtattataggtggcaaataacaattaacatcggtaccattagttgtggcatacaaaatcaaataacaattaacatcggtaccattagttgtggcatacaaaatcaggaaaaggctccagggtgttggtctgaccggctataggtagcccgatctaaccagccaggtacttggtctgaccgacggctataggtagcccgatctaaccagcctggtacttggtctgaccgacagttagtgagatggttagaccggccacaagaggcatgatctggccgaggtagggcgcagtctgaccagtcatgatgagcacggtctgaccaatagagggagcggtaactattctctcaacgaaatgtgcaaaggaattgatttccttccagtagcacagaaggaatttatccatacaaatatcatcatagagaaaagcagtacaaaatgatacacattgccatcagctgctataagagcttgaatatatagatgaaagtatggttatactatttctgcagccaaaataaaaaccttaatgataccaacacaaaatacaatggaattgtggaataaaaatatgcggcaactttaaaacagccatctactcctggtgacaaacagccatctacatctggagtatgtagcaagagacgagtatgatcacgagtttactttgtctgtacagcacagataagtgacacctggtgagcaatgccatcgggtgaacacagaagtcagcagctgacttcatttagatgttaacattttagtggtaataaaataaagagctcattttgattcctgcatcctgaagtttttgcccatgttctatcgccactgtcccttggtgagacaaatgaaaacaatggaaggttaataatctggaatagatgcaaaggtataccctggtgctcctctcgaggaatagtaagcaactcgagtctcataaaaacctacaaaacaatgtcagaacaatataatccttctcgctaaatggatacaatagtagagatgtctgtctactatctacaataataacaaaggacataattttacactaatgcacatttaaatagatttcatatccaaagagattctgtttccagtatgacactccctccgttccatattataaggcgttttgggtttgtcctaagtcaaacttcttcaaatttgaccaagtttataaaaaaatgtagcaacatttccaacaaactacactaaaataaatacttttgaacaaagtcatggaaaatgatcaataaataattggggaaaatttttcattgagaagatgaaaaaatttccataataacgtgaaaatgtaaggtaagaacattaacataccaggaaggaaggcaaggatgcccaggaacaagagaccatatgcctgagagttatccccctccatgtgacctgtgaatataaaatatgacaggaagagaagcgaacatcctaggaggaggaggaatagtgccagggcaattgacttccacgggattttcctgagggattttggggtgtaagtgaaccgaaggtcaacatcatcagtaagattgctgtcatccctgtcctctgtaggaaggggagcatacccccgaacattgcgtctagacgccatagtgcagtgtctgcatttgaaacacatactgtaaaatacatgtagaaaatgacatggtaatacacagtaagatctaagagttcaattgacaaagaaaagttgaaatccacagttgctgctaatgataataaaaaattacaagctttgaaaaaataaggtgcaccaaacagtaacagagatgatatgacaaacaaaactaaggttgtggttgccgtcgcatgtgccatgccaagggccttaatggactgcatgtgacatgggcatcacaaatttcatgtgaatcattctcagaaaagaactaatagtttttatagaatgattagcaaaatataagaaaaaattttctgtaatgcgacatgtaatttgaagccaactcaaagaacagaatcaaagacaagaacaggatggcataccagacagattttttctctaggttgttgcatatatcaaataaaaccttatgcaacaagatgcgtattaaaagctttgatcatctacaatcatctgcacgaactaaggctaaaatgagcaatctattctacaggataacaatcagaaaatatgggctaaacaagacacatctaccctgacctccgaacacaagtactaacaaaatatggagtacattagtaccttgatgtgcaaattagttagaatctgaaatagtactaacaaaacatgaatacctcagatttttatatctgaaaaaacacctcaaaatatactagtctttagaacctttccaaaactgtatcttagttctgtatactcctacattatagccaagaaaatcataccagcagcctactgttagtaagaatcaccaatctgagcctttatatgtctcctagctctgaaccagatctatagaagagggaaaacgaattacaggcaagtcagcaaaactggtccgagtggtaaacaaatcacagaaagaaatcagaagagacaggggtggcaacaccaacgcttgtctcaggaaaggattgaaggaacgaggaggtctgggggaaatagaagaggaacaggcgaggacgagagcacgtctggagactggagtgacgtgtcctctcccttgatcctgatttccttcggtagccatactgttggcccgattggacctttattatcatgcatatagaggtaccatctatgggcttggagcccctaactaatgggggtccagatcggtcgtccttactgacctgcctcagggccagccctgtgaacttcacaagtttataaacatcgagcagcaaaatatcatttaattaacataaaaaaaaggaaaaccctacaataacttataattctccaggtaaggaccttctgaccccttccccccctctttttttttgtttcttttttgcaagtagcagggcagaatgtgatagaagagaaaaacagtaataggatcatagtaccagtggctgacttgcaagaaaccaaactttttgcaggcacaataaatccatctaaaattcaggagcctaatctttgggactagaaccgatgagtgagtattcctaaaaaagatggagttgtacagtttttattactcgaccatggaagatcacaaagacacagaagttagtatggttcaagggcgcatctgctataatgtgagagtccaagattttgctacccctgggctaacagtacagtgttctaggcttaattttggcaaaaaaaaaaaaggaaagaaaagaaaaaaaaacacagatagcagcctctgagatttgacgaatattgtcaatttacagtgcttagattacttttagtttttccgatgacggtgcttagactacaagccggctgtacaatggagtcatacaagattatgggttcagtcttaatagtaactcttcaactctgaggctaaaaacctaaacaagcaaatgctcaacataataaacataaaaataaaggatcgaactatgctttgagcaacaaattatattgtacatttggcatcatatcagcttgtcgtggggcaaggaaaacatacaaaatcttgtaatttcacaggcaaaatgttcattctctagttcgttcagacagaaaggtgttaaattcaatcgtaatggtcatacctaatatcaacaaggcaatatcacaagaaacctctcaaacgaatttctatatgagggatgtccagcaatcaaatgccataaacgaatttttgttacctttttttcctagatggagatgtccctcggtgatgaaggggagaaaggagacaaactgtcgacgacggaggccaccgtgcgatggggtggtgggaggccggattcaggaggtggtggcagccgcggaggactcggtggcggcgcgcaggcggccgtcgaggtggagatcggtcgcggcgcggaggagggcgaggggagcggcggatcgggggtggggaaacgcgataggcagggggattggggatttttttttttttactatttgacatctttccaatgccacgctcccaaatgccatcttccaaaaaattgtagctgaattgccattggtcccccacattagttgatttcctaccattttggtccattcttgatgccacatcagcagccacctcatgacactttaagaaaatgacaatgatacccctacccgttcagtacaaatttaacacagctcacagcaaataaaatgaaaccaacttcaatgcacaacaatttcacaagcaaacacagcttggaacatacaacaaaacttgcaattgggtggagccatggctccctcaaatctttctgaaaaccaaaccctagacagatcaatctaaaaaaagaagcaaagatcatgaaaaaaattgatgccaaatcaaagagggaaatacaaaggatctgttcttttacttgggattgtatcattgtttggccaccgccagcggagtcgcctagagcagggagtgacgcgaagtcagacgaggaggagcgatgcgaagcctggagaaagtagcgatgcaaatattagagtttttctcccactccctatacgtaagggcaaaatagggatttcgccccatccaatgctgatttgacataaaaaggaaaaaaatggctgagaatcaactaatatatggacccggtggcaatttatctagaatttttgggaagatggcatttgggagtgtggcatcggggaagatggcaaatagtcaaaaatcccgggggattgagggtggccacctttttttccccctttttttatggtatagaattcatctggagtatttctgctctattccgcattagaactccctcggctggaaaatataatatatgcgcattttactacctccatttcaaattataaaatattttgactttggtcaaagttaaactgcttcaagtttgactacgttcgtagaaaaatacaataacatttttaacccaagacaaatttaatatgaaaatatatttaattactgatttaatgaaactaatttggtattataaatattactatgtttttccataaacttagtcaaacttgaagtagtttgactttaaccaaagtcaaaacgtcttgtaacctgaaacggagggagtagttttttctagactaatcatggattttagtttttattaaaattacgccaaaacatgtagatatatagtacatgtggtgacgctatattcgtatttcatatgaagttaattttataatatattgatataaactatcaaagaaattaatgatcaaagttatcaaaggccatgtcaaaaactaaaatgacttatattcctcatcgaagggagtgcatactacgtaatcatgtacttcactgtatggtctttctttctttgcaaatccatataacttaggtggtgtttggatccagggacttaactttagtccctatatttagacactaatttagagtattaaatatagactacttacaaaactaattatataaatgaaagctaattcgcgagacaaattttttaagcctaattaatccataattagagaatgtttactgtagcatcacataggctaatcatggattaattaggctcaaaagattcatctcgtgaattagtccaagattatggatgggttttattaatagtctacatttaatatttataattagtgtccaaacatatgatatgatagggacttaaaagttttagtcccatctatacagggccttaacctccttgatccttgtttatttcaaaattaaaggacatgacaaagggatatgctaagaaaaaaaaagactatgtgtatataaacattgtctcttgatatcagtgttcctcattgagtaacaaagcgccaagcttggcgagctcaaagctgtcgtggttctctgtggtgagcaatgacttgacattactcttcccgaaccctttctcgcattcctccaccatgttggctgccttctccaacgccgacatcgcctccggaaacctgccagcctgcacgttgtagaagatgccaagctgaccctgtagcacgctggcgtatgctgcctggcacgactggaagcacaccgtcgtggcgtcgccgggtttcaagccgttgccgtcgtccttaaggatgttgtctatcttggccttggtgctcgtcgtgttggatgtcaggaggtcgatggcgatgatggcgaggtcactgtagtagctggcgctgaggctccggctgtcggaaccgagcgcgtccatgcagaacgtgacgctgatgacgccgctgctgctgccagcgacgatcttgcatgcgccggacatgaaagagtcagcgttggcggcgtgttgagcttgagacgccgcgacgagggcgacggcgaagaggaagaatgcattgacgatgccatgggaggagaccattgtgaaacctcgatcgatctgcaagatgatgtcgaatggtttttttggatgaatacttttgtggccttgcgtgtgaactatttatggacaggttttgcatggtgttaaaaacgaacagatcgtctccagttaataattagatagagtagatccgtaaaatcaattattgattccccgtaaatctctgaccaaatatggctgaggcatatacaatgacaatcattagcatgttttgaagttattaataagatgattttacttacataaaaaagagaagacagagaaatatatttgttacttgtgacaacgacagacttttagtgtttctaaaataacatttgtcgcatgagaatcgataaaagaaaagaaagataataaaaaaatagttttggtgtattaattgttagagtagtattttaccatctctactgctgttgtaaattgtaataagatagtctctaaatgaactaagaacctatactagctttaactttaatcatgcctaataaaacatccttaccgttgcatagagttgatgatttttttttatatgctgtaccatcaataattaagctcgtaaaactatactatatatgcctccgattcatttgatgttaataaaaagactgacagttgctagtttcctataacatgttctactctcacatcatttcagggaagctggaggtctggagcatatatatatagaagcagacaagagagccaacggtttgaatcaacgatgagattgagatatctcgcactgactgaactgcattccatgcaggtgacggcggatcaatccctaattagctgtggaatcagaaaatcgattgatatatagctcgagtttcagtcattatctttaaaaaaattatcaagtttcagtaatctatactcgagatatatctgtgctggactctatcgtcttgattattgaccgcacgatcatgatcaactggttcccgtggactcgatagggttcggaaactaattctccaaccccgcgtaacattcgtgacgcctccgacccctctttcctccgcatcgttgcacattctcgatccaacggctcgatcgtgtgaacccaacttggggagggggttcggagaattattcttcaacctggtgtgacctcccgctaagccgtcgcagcgcctgccgtgcctcggataccccattctaccggccgaacgcctccggcaagccattgtgttgcgctcgggcagcaaacaccacgagacttatggcgctcactatgtatctcgagataaaattcgatacctctagatactaagtatctcgagatacatctagatatcagtgtaaaattttctagttaaaatctaattcctatgtatactaagtatctcgagataagaaaaaggtgtaaaatttaggtgctaagatatcttctcaaggatcgtaaaatttcacttgttttagagatgtcggtacatgatgattacaagcatgcatgatgcatatcatattttactataaagttaatgctcaataactgctaaatcatttttttttgaaaaccgaagccagcttaagctggagttatattaaggaggagagaaagtatttacaatatcaccaagaaggtgaaagaaattagagggggcgaggaaaaaaaacctaaatagagctacacattgaacaaaaacctaagtggatattctcgcgatgtcttttgctccacacatgctccatagcttgatttcgtcttgtattttggcaagtagctgcagcattgttttttcttgacttcgaaacaccctcctgttatgttcacaccatatttcccatgccaccaacaagtggattgacttgagtgctttagccttgctttttccaacttgagatgttcttttaatccaccattccaaccgagcttcattttcatcatgtgggtggtctatgtcgtggcagtataggctacttagaaccctctcccagatctgacgcacgaaagtgcaatttttgaaaagatgttgggcggtttcaaggttcctatagcatagttggcagaagtagttgtttggccattgtctgacctgtagcctgtccgctgtccaaatcctattttgtaataggagccatgcaaaatgtttgcatttggaaggtgcccaatgcttccaaatcagttttgctgcagctgagcttattctgccattgaactgtgctatgtaggctgactttgcactgtactttccatttctcgtccatctccaagttatggtgtcctcaacaccttctgtaggaacaatgtcttccacacatggtagaacacctcaaagaattcattgacaagctcgactgtgaggctgtgcctgatgtctattatccattggtcatttgctaacccttcttggaccgttctacctttccttttggcatggttgtataaggccggggctaactccttcagtggttgttctccaatccaatttgattcccaaaagctcgctttccgaccatcacctatagtcaccttggttggagaagcaaaaagcttttttgtccatttcatcacaagtagggggtgtccctgcccaaggcttgttcgggctttcccaactgaaccatagccatcacactctcaatgctcgtgcaaatttctctaaatccaagactcctagtcccccaaatttggtgggtgaacataccgttggccaatttactttgcatttgcccccactaatctcttggtcgcctgcccaaaggaacctcttcctaattttgtccatgtcatgtaggaaatttttggggggttttagtgctgtgaggaagtatgttggtatagaggttagtaccgaagtgacaggggtcttccttcctgcctgttgcaacaacttccctttccaacctgcaagtcgggatccgagcttgtccatgactggttggaggtgcactctcttgattcttcccattgtcaaaggtaaatctcagcatccaagtgtgtcacctcatcatccactttaagttttattatttattgctttggtcaggtgtgatgtaatatgcattagtacatttgcttgtacattcttctttattgcattatattgtttgttacaacaatgtgtgcatttatgtcatttcgtaaaattcagcagattatgtatggaaggggacaaataatataatgtactcgcacatggaaatcatccagctggtacatgaagagaacaaacaaaatggagacacaaaaagtgagatattggttaagccattgttggatgcacttaatacaggcaaatagagtatgcatacattaagaatgtctttgccatttctgagtgcataattaatgtttatgtggtcacgtacttgcatctttttcttcccctcttgtcctttgcagcgttcaataatttcattgccacccaaattcatccatgtaaaaaattttattcacataactaggcacaattaataattcaagctagaaagagacgaacttggtccgatttgtgctagtacaaatacggaaatacggtcgtattttctcgatcccggtcatgtctagcccgggaagcaacaaccgagcggttgcccgttccgcctttccaccgctcgatcgaagatgacaagatccgtcaggaattcaggctacagatgtcacgttgtgatgtagcttgccggcaagcccatacttgtcttgttcatacttcatagcatcgcaggcctatttaaggatgcaagcagcatcacagctaaattccctcctgagctccgctaacactatcgaagcttcacaaattctgttcacgcacttgtagctgttgcctctcgtctccaagtgttggaggcaaaggcgtacttcgatccgcaggtcgaaaagttctttctctagcccccctaatcatgttcctgttgtcgtgcagtttacatgtttgatgaaatgcctgagagaaggccactactttgcttaccttctgttcttgattcattgcatgatagattcgtcttcatttcactttttatgaaccttcaaacctttgttagctgatcatcaaattcatcaatatatgtatgatgatggggaatcttcccctgttcctctaaaaaaaaatcttgtttgacggagattctgtgggattccactaaactttacatgggttcagtagtgactgcggacgatctttggagttccctttgttagtgtttggtagcggacttctgttgcggcagctgcagtttcaattttctagtaggtctaatccaatgatgcatactgttttctgttaaatttcttgctgtttaacaactcaatcgattccgtactcttctttttactgctccttttcttactctatatttctatatgactactagcgaagtagcaatggtctgaattacagtttttactgacctactgttgttcggcaggcaggaccgagggcatgggttccaaagatgcattcttttgcaccttctgctccttgcttcttttttgtttcagttccaaatgcctatcttcagagctggacctgcctcagacagcactagtagaggttgatgcttcatgggaggtttcacgaaagatccctgacacactatttggattattttttgaggtcagattttgcctatttagctctgtcagttcatcttatcgcgtcactttctctgccggcatcaaaatatgttaggatgagatcaataatttagtcaaccttacctaactgctgcagctagtcttttcagttgaatttaccattgttcacactacactgcactgtattaactatggtggttcttcatatatcttcatgcaaatcttctttctggtttcagaaaataactcctatgttgtacatgttttctcattccactgtttccttttccaccactattttgtgtggatgccggtgttataattttgtctgcattacttctagtcagggaaagaggagggattggggtgtgtgtgcgcgcgaagatttcttttgttagcgcttgctttatattcattatgtgttcactgcaatctgaatattctagattatgctcgtcagtcatgataactagatcagtgaacattataggaaattaaccatgctggagctggtgggatatgggcggagcttgtcagtaacagaagtaactctcagtttgataaacattcctcatggaagctgtgagaagtgaatggatgcacttgactaagttgaagatttgttatttacacaaaaatagataaatcagtccaaatatcaagcagtgaatcagtttcttgcactgcgcacatgtcaaaaagacacattgcaggttttgctgtataagaaatattcttatgttcacatacatccaatagtcaatgaaggaaattaaagtgtaaagtgacatttttgtgcaagtgatacacaatgctattttacaagaacaatatagaactccttgtcaacattcgcaactgcagccctttgcaatgctcaagtttattcatgagaaaaaaaatcaacccttgtcaaatgcatttactatatttatcctcattcatattaataactgacatcaggttgcttaatttctattccatattttggcttctaagttgctacagaacagaaaagattacagttctgaattaaaaccaaatgaaacaaaagcatctgtgttttataatttgtcatcaacattgaagtcttgctttaactgactaatgcatggattatactccaggatttgaatctggagggccccacaccccttctaacatcgatccatggtctatcattggagatgaatcctctatatacatcacaactgatcgctcatcttgtttcagcaaaaatagtgtcgctctaaggatggagattctctgtgagaattgtccagctggcggtgttggcatttacaacccaggattctggggcatggtatgagtccttatcgatgtaaaataactcattgtccaaataatcttttttctaaacaacagttactgtacaatgctgtcacttaaaggaaatacagcaaagttgtgatcttttttccaaaaagttaaactaatagctaacgttacctatattttgcttgatttcattttatgctcatttttctgacataatgttgtctttctatgcaatagttctgttttttttacttggaaatatgaatatctgttatagtttttcttccgaccatttctacttttatcttctgatatatatatatatatatatatatatttatttatttatttatttgcttgggattttaccatctgatttttggatgaacctgttcgttccaacttccagaacatagaagaaggaaagacctataatctagtcatgtatatcagatcattagaatctgtggagttgacagcttctctcacatgttcagatggaatgcaaaatctggcatcagtctctatacagtatgtatctttgacataacactgaaataaataattcttgatgtgtttttcttttatgattgaaaggattgcatattgaaatgttgcagagagattgatccgtcaaattggacaaagatagagatgcaattattggctcaaggaacatgcagaacttcaagacttgaattaacaagtatgaaaaggggagtaatttggtttgatcaagtgtcactcatgccatcagacacatacaaggttcactgcattttcatcctgctattggctactgacagtcatgagcatgctttgctatgggagtagccagtgaatattcatccactgctttgtgatgcaactaatgtactagcagaattataagttattcataaatgcgtaggaaacatgttgattcaatctcattgttaattagtgatacttaataaatctacttatattcattttcacaaaactttggaaaaaaaaagtcctcatttgtttattgctagaccatgcttattagtttccgcatttgttaacgggaaatttcttatatatgtacagggccatggttttcgtaaggagctaatatacatgcttttggaattaaggccacagtttctacgctttcctggtatttcttatgttcccaaaaatcatattttaactagaattagaccaaaatgaacatttagataactaaaactaaacctgaacatgcatacaatcataagaattttatgatttttgccgggtaatatgaattaatagtgataatatattgtatttactgtgtgattctattttgtggttatgcatgctttgcaagaggacttctaaaccaattctgggatactaacaagcataaataattaagaaataatactctagagtaaagcatcaaaaagttgtggtcaattagtacgaaaccagcatgattgtagatttatctatatttgcattatatatggttccatgatttcagcaactaacttttgaacaattctacacatatattgagtcaaaattttgtatcacaattatgacagggggggtgctttgttgaaggtgattggttaagaaatgctttcaggtggagagaaactattggtccatgggaacagagacctgggcactttggagatgtttagaattattggaccgatgatggcctaggatattatgagtttctccaggtatatgttgattaatgcaatctgagttttttttatctcttctgctaccaacatatctaaccaaatatttctaccgaaattttcatggaaagcttgctgaagacctgggtgctgcccctatttgggtgttcaatgttggtaatacattctaattatttaaaattttcctgttttaccatatcttttctcatcgctagcatgcccattaccagcttacaattttaccttgaaatttagggatcagccaccatgatgaagttgataccatcataattgaaccttttgttaaggtacgttaaatgccaaaagtaagaatagtcatccaaatagaactgggtagaggattactccggtttgacttttccttattgcagatgccatcgtagcaaaacaaaatgttttctatgcatttgtcattctttaagttcattattttttttctatttataggatgtattggatagtcttgaatttgcaaggggaagcgcagaatcaacatggggctctgttagatctgcaatggggcatcccgaacggttcccactgaagtatgttgctattggaaatgaagattgtgggaaggaattttaccgaggtatatttttattaatcagaatttgacatactactgatcccatttgttgtcaatgccatagttgttttccttaggttggtacatctataggctgaaatggtgtgatggccaagtgtacttaacacaaaatccctcatcatatatgaatgcatatctaaaaccacttattttccttcttctttaccccttgtttttctttgtttgtatgccgtcgttactttgtggagtcaactacaattatggcaaaacaatttcatccttacagataagcataataaaaatataaacattcgcaacaaataatagatgaaaatagaatggatgtaactttgagctatttatgtcatcagtttctgaggatagattttctttgcacatgaagttactataacattcactaatttcatgaaaataccagagagctagccaatagtatcccacttgtccccgagttgcccatgatggttttgaatcctatcttacaggaaattacctcaagttttatgatgctatacgcaaggcctatccagacattcaaatgatttcaaactgtgatggatcatctaggccgcttgaccatcctgctgatttgtacgattttcatgtaatcttcattccattttcactgtttaaatactgtctcattacttctaacagacttttcattgtgcttttattaagatgcactctgacatattttttcaggtatataccagtgctgctaatctttttatcatgaagaataagtttgacaggacatcacgcattgggcctaaggtatttttcagtccttgtttggatggtcagggatccgtggccatcacggcccatccaaaatatggactttgtttttgtgatttattctggcaatagatatatcctcgaaatactcctatatgggttggtctttaattgacctatcatcctaactttggtggaatatttttaggacattattttttttccatgttattctacctgaggctggccactggcatgtttatttattaaatttcttcagaaattatattgaagtcataatattatatgtgtaacttccattaatgatagtgttctagtgtcacaacacttcagccggctttgtttctctgtatcattacagttctcttgcatcccgacgccctaggatattggatacacagaaagtacttattaattactatgctatgatcctgttccaggtatttgtcagtgagtacgctgtcaatgaacaaagggatgctggtaaaggaagccttcttgcttcactggctgaggctgctttccttactgggttggagaaaaataggtgatctctctcacttcttcctttctttggataatctctcattccatattcttgggactaactgaatcgtgcatgcagctgtatttagatcattcatgacttttccaggataaatttcagtattgtcttggataattagtagtttatgaccctattcagataatcacatttggaacaaagggaaaatgtctgttgttcagaaattacaagataatgaataatacacgtattgtaaatattaatagtgagcagcaagaatactctatcatgaataaattaaaagtgtatgtcctgtttatctgcagtgatgttgttcagatggcaagttatgcaccactcttcgtaaatgacaatgacagcacgttagtacctccagctttgctcctttttatttccaacgttcttgttggtcacaagtacgcgagtttgactagaccttaatgtaatgatcagctggaacccagatgcaattgtgttcaattcctggcagcagtatggcactcctagttattgggtgcagacatatttccgtgaatcaagtggttctgtgattcatccgattacgatcagttccagatattctgattcattggctgcttctgcaatcacctggcaagactctgaggatatctttctgagagtaaaggtaaactaaccattccagtttctcctaatttgcatacccttgcagcaattcattacacaagcacctaaatgttttgaatgatttagttacaacgatataaaactgattcaactactgcatacttggataacatctctttggattttagaacatatgttgatcttcaaaagatcttctgcagatagtaaactttgggccaaatgctgtgaacctcacaatatcttcaagaggacttcaagatggcgtcaacactgcaaaatcaactgtgactgttctcacatccggcaactttctggatgaaaattcatttagtgaaccaaacaaggcaagacaaccattgtttccatcacaagtttcttgtttcataaccatgcactgaatttagcagagggcaaccttaccattacaaatttacagtctgccaatatatatgcaagccgtatgacttatttaatcaagtagtgtatgttatacataaggcataaacttttgtagtcttatagatgtcctctcctctgtctttttttttcaccgagccctctcctctgtctttcagttttatctgtaagttttccaggaaatagtttatttggttatgtctcaatgtctggaatcatttcctacaagtatttctagaagttgcacctttttttgatagagttgccaaaatttagtttggagagtctgttagagatgctctaacacgcaatattctcaggtgttggcgagttcatctaacatacaagtatctttgtgaatgacgcatgcaggtcgtgccggttgaaagcgagctgccaaatgctgcagaggtgatggaagcagtgctccctcctttttcattcacttcgtttgacctcgctctggatcaatacagcaagctcgtagcagagatgtgaagcaatgatgcatagtttcaacagagaaacaggatgtttacatgagatgtgatgcctgaatttcagaaacacttggtgtgatcctgctgtttatgacgctgcaagcatagtttaaggtttgtcacgttattgaacctaggggtaacgctaattaatatccttgtcaataagctatccccttgatcactgaactctggttactcagagcttgaatggattctcagttaatctggataagcaaacagaagggaaaatgtagggttgatgagaaatggtcctgcatgtttaccttgtgttcccccaagtgataagattgacatttaataatgcagcagaacatatctgtgatatctcaaacgtaagtccaataaaaactgatcaagcctttcagtgaaggtttcttaccatgcgatagtgcagtaaattaatgacaaccgtaatcatgcactaaatggacacatggtaagagtaagacaatggtgtctttgcttagggaactgcataaacacaagcgtagccaatacatttccccatccaaataagtatagtacatacattttgtaatgctaccaaatacatttcagttttttttcctacttgtctccattcaatagcatcgcttccatagggcagaaatttacatacaagaggataacaatcatagtagcattttttttaatataattcaatagtatgccaatcatctcttgacccagcgagctttccttactggacgaaaaaaggaaattcaattaagaaacatcgctgatatcgtgccaccaaagtaaatgactttcaggcagccaaagagatttacctcctcttagggagtcaatgaggacgaagtatgaggggatatgtacaacaccagccactgctccagcactgcatgaacagttgaataacaatgtgagcaaccataattatcatttaactaataggctcaaaacttttgatgatctcataccacagaaagcaatggtccttgcttaaatttgctatggaaggcaaatgcaagtggctttgctccatctccaggtcctcttatgaatccactgtatatgcacattggaaattcgtcagacaatggtccaaaattatcaagattcaatgttcatgaccaagataacatggtaaattagaggactgcacttacactagtgaaactgagacaagtggagatctcctcacatcatagacagcaacaaggccatgatacatttcattaccatctttgaatgataatgccaagcgctctcctgaagaatcccatgctaatttatctatgcctcggctagatgaaccagagaaagctagcataaataagtatatggactggacaacaagttacttttctaggctgtaatggatgaaatgatagacttttgaacatgtaaaggttcatcctaaatgaaagcatctgagtatatactaaaatggcaagagacagactttttacaagccagatctaaagatattttgaaaaaaaaaatggttgaggcgcttcaattgattagggagaacttgcctttacttgctaatgatcctaagttacataccataagtgatttatttaaaaccatacaatccatatcatgaatgacttcccaaccagatgcagatgtggttattcaaaatatcatcagttaaagttagcattgaagacagcagtaaaatatgttccatcgggtccacaagaagttaggagtatagaatggtaggtactgccactgttgttacctgacaatcagagaggaaatttcaggtagttcgactggtaggagatgggcatctgaagtcaatgaacacaacacaatgttcaggattcagacaataaacataatactgtaacttcacataaaaatgctgtggtgagatgagggtagctgtccatacctaaagatggtggctttgatgagaagtgaattgagcccagtgttgttgagttagaaaaggataataatgcagtacggccttctgggtcccaatttgctccctggtatgaaagcaagattaaaaaaaaaaagcatcataactccaaaattaatcacaacacccatatttcattcaaaatactgctttaaggggggggggggaatgtatatattacaagtgaatgagaaatgtttgctgtaaaactgatcttatgtgatatacttgggaaggttcaaattaagttgagctttatgtaatatttacaatttataaagtcaactgaaccaaaaatcaacttttgaacaagcaattgatcttgttggcaaacaaaagtatagctgttgaaatgacaatacattaacaagtaaaaaggtactgcaaggtagtcataaatacaaaataaacccaagttcagaagcttgatacaggcatgtttaaaatgtatatatcttaaaacaactggttatataagttaatatgttgtatcaatcttcagaatcatgctaaacacacttgttttcaagataaatacatgtacaaaatcagaaagaaagttacatatacaattttgaaatgggtctgagataacaattcttgagttaaaactggacccaataacccataacatgcaaagcatttgccctttcatttcatgacttaattaagaatccattccttgcaacatggtaaacaataatgttgaatgttaaacaatacttatttaaagagtgaagatactactacttacagacacatatccattagatgaagaccatggttctgacgtccatgtatttgtttcccataagtgaaaagttccatcactaattaaaaaaggaaaactatataaatcttcaaaaggtatgagcaatgaaaataactaaagttgaagttcatacagcttagcagttaaaaggtaatctccactaggtgaccaccgcactaatgatatactacttaatccacgtcttataggcgttcccaaccctgaagcagaagaaaatctaaagatattagcatgcagttctgtgtaagatggaattgggtatctgcattctgatgacatttagataccttgagaaacatcccaaattgtgaatgatgggctattacaagaggcagataccaagtatgtggagatatatgtcaaggaatattgtctagagtcactgatattttttctgtttgcaagtgaagacatattatttgttttaggttacattttttttatttttcaaataaaagagatgaatgatacttatgattaaatgctatactgaaaacttataaaggatatcttccatcaggtttccaacaaagtgcgctaactagctcagcagaagaaccacggagaatgtccacgagtatccattgaccaccggaacctctagaaaggcaccaaaagaagaagaggtgacaccagatttcacagatgcaacattgccaggatatgatgctgaccagaggcatatccctcccctgaaaataataataataaaagttaatctaatagtagattgtgccactaggtattatgacatgaaaagaatatcaaaacaaatctttaatagtgctctagtatatggcggcagtaggacatacttgcacccaactgcaatcacctttccactatttggcctccattcaacagctttaacatccttttgatggtcacttgttagaatgtaggattctttattatctgttcagagaatacaaatgattagttgttggcttcagctgagttgagaaacatacttcagttcattaaatacaagaataaatgttcatatagccatcatgcttcagttcatcatatctatcttattaatacaacataagaaagttcagcagatctcacctggctcctcaaagtcatgaactgtaacttggttcttcccagatacaaatgccaagcaatgcttgtgaggattccaacttactttctgggtatcaatttcttgtagcagatttggctgcgaaaacaaaagatttgtcgtaagtactaaagtacagttgttaaaaaaaatctatcctgagcactttgcacacaaaaataagcttgtgtgtagattttgggtgaacaacgagaatggggcaatatatgacagaaaagcagtaaaatcatgaatgcaagcaattgattcactaagatatgatgaagaaccaaactcacattgcacgaagggaagagcatttgtttgaaggactcagctatggtggaagctaaacttgttctggggacaacttcagcaggctcagcagcttcagtgacagcaggaggctcgtgggtggcaacagtcgcatccggctggaaaggaatcgggctgaagaccattccctggaagccccaaattgaagtttcaattagaggcctaataaaattagtgttgtgaaaaagaaaaagaaattattgcgagggggaggagagtgtactgacgaggacatccccgtaggcatccttggctcgatcatcggacagcgcatccgccacaactgcaacgcacagatttggacagccgattgagagaaaacaaggaggagaggagatcggggtggagaaagcaaggaggtggagggataccataccgaggtcacggttgatctcgcagacggtgacgccgccgggcggagggaagctcggcatggccacgccgcgcgcgggcggagaggttttgttcgcacctggacctggggaggagcttgtcggcgaggctgtggccggcgtggagcttgacggcgacgccaacgagaggggaggtgttggtttcctcattaaaccctcgccatccgcacgggaggagaagaacgga
